United States Patent Application Publication US 2021/0254056 A1 - sequence listing, part 14

SEQ ID NO: 29024 - protein, 55 aa, Homo sapiens
  MOD_RES (6)..(6): Selenocysteine
  MOD_RES (37)..(37): Selenocysteine
  MOD_RES (45)..(45): Selenocysteine
  MOD_RES (49)..(49): Selenocysteine
MAAGEXQLYAKVSNKLKSRSSPSLLEPLLAMGFPVHXALKALAAXGRKXAEEALA

SEQ ID NO: 29025 - protein, 169 aa, Homo sapiens
  MOD_RES (6)..(6): Selenocysteine
  MOD_RES (37)..(37): Selenocysteine
  MOD_RES (45)..(45): Selenocysteine
  MOD_RES (49)..(49): Selenocysteine
  MOD_RES (81)..(81): Selenocysteine
  MOD_RES (112)..(112): Selenocysteine
  MOD_RES (118)..(118): Selenocysteine
  MOD_RES (144)..(144): Selenocysteine
MAAGEXQLYAKVSNKLKSRSSPSLLEPLLAMGFPVHXALKALAAXGRKXAEEALAWLHDHCNDPSLDDPIPQEYALFLCPXGPLLEKLQEFWRESKRQCAKNRAHEVFPHVXLCDFFXCEDQKVECLYEALKRAGDRLLGSFPXAVPLALHSSISYLGFFVSGSPADVI

SEQ ID NO: 29026 - protein, 451 aa, Homo sapiens
  MOD_RES (6)..(6): Selenocysteine
  MOD_RES (37)..(37): Selenocysteine
  MOD_RES (45)..(45): Selenocysteine
  MOD_RES (49)..(49): Selenocysteine
  MOD_RES (81)..(81): Selenocysteine
  MOD_RES (112)..(112): Selenocysteine
  MOD_RES (118)..(118): Selenocysteine
  MOD_RES (144)..(144): Selenocysteine
  MOD_RES (175)..(175): Selenocysteine
  MOD_RES (178)..(178): Selenocysteine
  MOD_RES (192)..(192): Selenocysteine
  MOD_RES (198)..(198): Selenocysteine
  MOD_RES (210)..(210): Selenocysteine
  MOD_RES (227)..(227): Selenocysteine
  MOD_RES (242)..(242): Selenocysteine
  MOD_RES (258)..(258): Selenocysteine
  MOD_RES (270)..(270): Selenocysteine
  MOD_RES (287)..(287): Selenocysteine
  MOD_RES (298)..(298): Selenocysteine
  MOD_RES (306)..(306): Selenocysteine
  MOD_RES (314)..(314): Selenocysteine
  MOD_RES (319)..(319): Selenocysteine
  MOD_RES (341)..(341): Selenocysteine
  MOD_RES (354)..(354): Selenocysteine
  MOD_RES (383)..(383): Selenocysteine
  MOD_RES (438)..(438): Selenocysteine
  MOD_RES (440)..(440): Selenocysteine
  MOD_RES (442)..(442): Selenocysteine
MAAGEXQLYAKVSNKLKSRSSPSLLEPLLAMGFPVHXALKALAAXGRKXAEEALAWLHDHCNDPSLDDPIPQEYALFLCPXGPLLEKLQEFWRESKRQCAKNRAHEVFPHVXLCDFFXCEDQKVECLYEALKRAGDRLLGSFPXAVPLALHSSISYLGFFVSGSPADVIREFAMXFAXEASLLADCSVKPCXKQLHLXLAHKFYPHHQRXLEQLARAIPLGHSCQWXAALYSRDMRFVHYQXLRALFQYKPQNVDELXLSPGDYIFVDPXQQDEASEGWVIGISQRXGCRGFLPENYXDRASESDXWVKHRMYXFSLAXDLNSRKDGEASSRCSGEFLPQXARSLSSLQALQAXVARKSVLVVRHGERVDQIFGKAWLQQCSXPDGKYYRPDLNFPCSLPRRSRGIKDFENDPPLSSCGIFQSRIAGMFEDCLVGKVXIXAXLIMASRHPA

SEQ ID NO: 29027 - protein, 521 aa, Homo sapiens
  MOD_RES (6)..(6): Selenocysteine
  MOD_RES (37)..(37): Selenocysteine
  MOD_RES (45)..(45): Selenocysteine
  MOD_RES (49)..(49): Selenocysteine
  MOD_RES (81)..(81): Selenocysteine
  MOD_RES (112)..(112): Selenocysteine
  MOD_RES (118)..(118): Selenocysteine
  MOD_RES (144)..(144): Selenocysteine
  MOD_RES (175)..(175): Selenocysteine
  MOD_RES (178)..(178): Selenocysteine
  MOD_RES (192)..(192): Selenocysteine
  MOD_RES (198)..(198): Selenocysteine
  MOD_RES (210)..(210): Selenocysteine
  MOD_RES (227)..(227): Selenocysteine
  MOD_RES (242)..(242): Selenocysteine
  MOD_RES (258)..(258): Selenocysteine
  MOD_RES (270)..(270): Selenocysteine
  MOD_RES (287)..(287): Selenocysteine
  MOD_RES (298)..(298): Selenocysteine
  MOD_RES (306)..(306): Selenocysteine
  MOD_RES (314)..(314): Selenocysteine
  MOD_RES (319)..(319): Selenocysteine
  MOD_RES (341)..(341): Selenocysteine
  MOD_RES (354)..(354): Selenocysteine
  MOD_RES (383)..(383): Selenocysteine
  MOD_RES (451)..(451): Selenocysteine
  MOD_RES (477)..(477): Selenocysteine
  MOD_RES (484)..(485): Selenocysteine
  MOD_RES (487)..(487): Selenocysteine
  MOD_RES (503)..(503): Selenocysteine
  MOD_RES (511)..(511): Selenocysteine
  MOD_RES (517)..(517): Selenocysteine
MAAGEXQLYAKVSNKLKSRSSPSLLEPLLAMGFPVHXALKALAAXGRKXAEEALAWLHDHCNDPSLDDPIPQEYALFLCPXGPLLEKLQEFWRESKRQCAKNRAHEVFPHVXLCDFFXCEDQKVECLYEALKRAGDRLLGSFPXAVPLALHSSISYLGFFVSGSPADVIREFAMXFAXEASLLADCSVKPCXKQLHLXLAHKFYPHHQRXLEQLARAIPLGHSCQWXAALYSRDMRFVHYQXLRALFQYKPQNVDELXLSPGDYIFVDPXQQDEASEGWVIGISQRXGCRGFLPENYXDRASESDXWVKHRMYXFSLAXDLNSRKDGEASSRCSGEFLPQXARSLSSLQALQAXVARKSVLVVRHGERVDQIFGKAWLQQCSXPDGKYYRPDLNFPCSLPRRSRGIKDFENDPPLSSCGIFQSRIAGDALLDSGIRISSVFASPALRCVQXAKLILEELKLEKKIKIRVEPGIFEWXKWEAGKXXPXLMSLEELKEANFNIDXDYSFQHKXGACLLXMSLP

SEQ ID NO: 29028 - protein, 526 aa, Homo sapiens
  MOD_RES (6)..(6): Selenocysteine
  MOD_RES (37)..(37): Selenocysteine
  MOD_RES (45)..(45): Selenocysteine
  MOD_RES (49)..(49): Selenocysteine
  MOD_RES (81)..(81): Selenocysteine
  MOD_RES (112)..(112): Selenocysteine
  MOD_RES (118)..(118): Selenocysteine
  MOD_RES (144)..(144): Selenocysteine
  MOD_RES (175)..(175): Selenocysteine
  MOD_RES (178)..(178): Selenocysteine
  MOD_RES (192)..(192): Selenocysteine
  MOD_RES (198)..(198): Selenocysteine
  MOD_RES (210)..(210): Selenocysteine
  MOD_RES (227)..(227): Selenocysteine
  MOD_RES (242)..(242): Selenocysteine
  MOD_RES (258)..(258): Selenocysteine
  MOD_RES (270)..(270): Selenocysteine
  MOD_RES (287)..(287): Selenocysteine
  MOD_RES (298)..(298): Selenocysteine
  MOD_RES (306)..(306): Selenocysteine
  MOD_RES (314)..(314): Selenocysteine
  MOD_RES (319)..(319): Selenocysteine
  MOD_RES (341)..(341): Selenocysteine
  MOD_RES (354)..(354): Selenocysteine
  MOD_RES (383)..(383): Selenocysteine
  MOD_RES (451)..(451): Selenocysteine
  MOD_RES (477)..(477): Selenocysteine
  MOD_RES (484)..(485): Selenocysteine
  MOD_RES (487)..(487): Selenocysteine
  MOD_RES (503)..(503): Selenocysteine
MAAGEXQLYAKVSNKLKSRSSPSLLEPLLAMGFPVHXALKALAAXGRKXAEEALAWLHDHCNDPSLDDPIPQEYALFLCPXGPLLEKLQEFWRESKRQCAKNRAHEVFPHVXLCDFFXCEDQKVECLYEALKRAGDRLLGSFPXAVPLALHSSISYLGFFVSGSPADVIREFAMXFAXEASLLADCSVKPCXKQLHLXLAHKFYPHHQRXLEQLARAIPLGHSCQWXAALYSRDMRFVHYQXLRALFQYKPQNVDELXLSPGDYIFVDPXQQDEASEGWVIGISQRXGCRGFLPENYXDRASESDXWVKHRMYXFSLAXDLNSRKDGEASSRCSGEFLPQXARSLSSLQALQAXVARKSVLVVRHGERVDQIFGKAWLQQCSXPDGKYYRPDLNFPCSLPRRSRGIKDFENDPPLSSCGIFQSRIAGDALLDSGIRISSVFASPALRCVQXAKLILEELKLEKKIKIRVEPGIFEWXKWEAGKXXPXLMSLEELKEANFNIDXDYRSLPWACASVKKIKRKENGSW

SEQ ID NO: 29029 - protein, 623 aa, Homo sapiens
  MOD_RES (6)..(6): Selenocysteine
  MOD_RES (37)..(37): Selenocysteine
  MOD_RES (45)..(45): Selenocysteine
  MOD_RES (49)..(49): Selenocysteine
  MOD_RES (81)..(81): Selenocysteine
  MOD_RES (112)..(112): Selenocysteine
  MOD_RES (118)..(118): Selenocysteine
  MOD_RES (144)..(144): Selenocysteine
  MOD_RES (175)..(175): Selenocysteine
  MOD_RES (178)..(178): Selenocysteine
  MOD_RES (192)..(192): Selenocysteine
  MOD_RES (198)..(198): Selenocysteine
  MOD_RES (210)..(210): Selenocysteine
  MOD_RES (227)..(227): Selenocysteine
  MOD_RES (242)..(242): Selenocysteine
  MOD_RES (258)..(258): Selenocysteine
  MOD_RES (270)..(270): Selenocysteine
  MOD_RES (287)..(287): Selenocysteine
  MOD_RES (298)..(298): Selenocysteine
  MOD_RES (306)..(306): Selenocysteine
  MOD_RES (314)..(314): Selenocysteine
  MOD_RES (319)..(319): Selenocysteine
  MOD_RES (341)..(341): Selenocysteine
  MOD_RES (354)..(354): Selenocysteine
  MOD_RES (383)..(383): Selenocysteine
  MOD_RES (451)..(451): Selenocysteine
  MOD_RES (477)..(477): Selenocysteine
  MOD_RES (484)..(485): Selenocysteine
  MOD_RES (487)..(487): Selenocysteine
  MOD_RES (503)..(503): Selenocysteine
  MOD_RES (528)..(528): Selenocysteine
  MOD_RES (537)..(537): Selenocysteine
  MOD_RES (542)..(542): Selenocysteine
  MOD_RES (553)..(553): Selenocysteine
  MOD_RES (558)..(558): Selenocysteine
  MOD_RES (605)..(605): Selenocysteine
  MOD_RES (607)..(607): Selenocysteine
MAAGEXQLYAKVSNKLKSRSSPSLLEPLLAMGFPVHXALKALAAXGRKXAEEALAWLHDHCNDPSLDDPIPQEYALFLCPXGPLLEKLQEFWRESKRQCAKNRAHEVFPHVXLCDFFXCEDQKVECLYEALKRAGDRLLGSFPXAVPLALHSSISYLGFFVSGSPADVIREFAMXFAXEASLLADCSVKPCXKQLHLXLAHKFYPHHQRXLEQLARAIPLGHSCQWXAALYSRDMRFVHYQXLRALFQYKPQNVDELXLSPGDYIFVDPXQQDEASEGWVIGISQRXGCRGFLPENYXDRASESDXWVKHRMYXFSLAXDLNSRKDGEASSRCSGEFLPQXARSLSSLQALQAXVARKSVLVVRHGERVDQIFGKAWLQQCSXPDGKYYRPDLNFPCSLPRRSRGIKDFENDPPLSSCGIFQSRIAGDALLDSGIRISSVFASPALRCVQXAKLILEELKLEKKIKIRVEPGIFEWXKWEAGKXXPXLMSLEELKEANFNIDXDYRPAFPLSALMPAESYQEYMDRCXASMVQIVNXCPQDXGVILIVSHGSXLDSCXRPLLGLPPRECGDFAQLVRKIPSLGMCFCEENKEEGKWELVNPPVKXLXHGANAAFNWRNWISGN

SEQ ID NO: 29030 - protein, 661 aa, Homo sapiens
  MOD_RES (6)..(6): Selenocysteine
  MOD_RES (37)..(37): Selenocysteine
  MOD_RES (45)..(45): Selenocysteine
  MOD_RES (49)..(49): Selenocysteine
  MOD_RES (81)..(81): Selenocysteine
  MOD_RES (112)..(112): Selenocysteine
  MOD_RES (118)..(118): Selenocysteine
  MOD_RES (144)..(144): Selenocysteine
  MOD_RES (175)..(175): Selenocysteine
  MOD_RES (178)..(178): Selenocysteine
  MOD_RES (186)..(186): Selenocysteine
  MOD_RES (210)..(210): Selenocysteine
  MOD_RES (230)..(230): Selenocysteine
  MOD_RES (236)..(236): Selenocysteine
  MOD_RES (248)..(248): Selenocysteine
  MOD_RES (265)..(265): Selenocysteine
  MOD_RES (280)..(280): Selenocysteine
  MOD_RES (296)..(296): Selenocysteine
  MOD_RES (308)..(308): Selenocysteine
  MOD_RES (325)..(325): Selenocysteine
  MOD_RES (336)..(336): Selenocysteine
  MOD_RES (344)..(344): Selenocysteine
  MOD_RES (352)..(352): Selenocysteine
  MOD_RES (357)..(357): Selenocysteine
  MOD_RES (379)..(379): Selenocysteine
  MOD_RES (392)..(392): Selenocysteine
  MOD_RES (421)..(421): Selenocysteine
  MOD_RES (489)..(489): Selenocysteine
  MOD_RES (515)..(515): Selenocysteine
  MOD_RES (522)..(523): Selenocysteine
  MOD_RES (525)..(525): Selenocysteine
  MOD_RES (541)..(541): Selenocysteine
  MOD_RES (566)..(566): Selenocysteine
  MOD_RES (575)..(575): Selenocysteine
  MOD_RES (580)..(580): Selenocysteine
  MOD_RES (591)..(591): Selenocysteine
  MOD_RES (596)..(596): Selenocysteine
  MOD_RES (643)..(643): Selenocysteine
  MOD_RES (645)..(645): Selenocysteine
MAAGEXQLYAKVSNKLKSRSSPSLLEPLLAMGFPVHXALKALAAXGRKXAEEALAWLHDHCNDPSLDDPIPQEYALFLCPXGPLLEKLQEFWRESKRQCAKNRAHEVFPHVXLCDFFXCEDQKVECLYEALKRAGDRLLGSFPXAVPLALHSSISYLGFFVSGSPADVIREFAMXFAXEASLLAGXSVSRFWIFSQVPGHGPNLRLSNLXRASFVSHYILQKYCSVKPCXKQLHLXLAHKFYPHHQRXLEQLARAIPLGHSCQWXAALYSRDMRFVHYQXLRALFQYKPQNVDELXLSPGDYIFVDPXQQDEASEGWVIGISQRXGCRGFLPENYXDRASESDXWVKHRMYXFSLAXDLNSRKDGEASSRCSGEFLPQXARSLSSLQALQAXVARKSVLVVRHGERVDQIFGKAWLQQCSXPDGKYYRPDLNFPCSLPRRSRGIKDFENDPPLSSCGIFQSRIAGDALLDSGIRISSVFASPALRCVQXAKLILEELKLEKKIKIRVEPGIFEWXKWEAGKXXPXLMSLEELKEANFNIDXDYRPAFPLSALMPAESYQEYMDRCXASMVQIVNXCPQDXGVILIVSHGSXLDSCXRPLLGLPPRECGDFAQLVRKIPSLGMCFCEENKEEGKWELVNPPVKXLXHGANAAFNWRNWISGN

SEQ ID NO: 29031 - protein, 649 aa, Homo sapiens
  MOD_RES (23)..(23): Selenocysteine
  MOD_RES (34)..(34): Selenocysteine
  MOD_RES (61)..(61): Selenocysteine
  MOD_RES (97)..(97): Selenocysteine
  MOD_RES (128)..(128): Selenocysteine
  MOD_RES (149)..(150): Selenocysteine
  MOD_RES (168)..(168): Selenocysteine
  MOD_RES (200)..(200): Selenocysteine
  MOD_RES (214)..(214): Selenocysteine
  MOD_RES (226)..(226): Selenocysteine
  MOD_RES (245)..(245): Selenocysteine
  MOD_RES (258)..(258): Selenocysteine
  MOD_RES (266)..(266): Selenocysteine
  MOD_RES (289)..(289): Selenocysteine
  MOD_RES (291)..(291): Selenocysteine
  MOD_RES (299)..(299): Selenocysteine
  MOD_RES (302)..(303): Selenocysteine
  MOD_RES (315)..(315): Selenocysteine
  MOD_RES (322)..(322): Selenocysteine
  MOD_RES (334)..(334): Selenocysteine
  MOD_RES (341)..(341): Selenocysteine
  MOD_RES (360)..(361): Selenocysteine
  MOD_RES (364)..(364): Selenocysteine
  MOD_RES (417)..(417): Selenocysteine
  MOD_RES (442)..(442): Selenocysteine
  MOD_RES (461)..(461): Selenocysteine
  MOD_RES (477)..(477): Selenocysteine
  MOD_RES (503)..(503): Selenocysteine
  MOD_RES (510)..(510): Selenocysteine
  MOD_RES (529)..(530): Selenocysteine
  MOD_RES (548)..(548): Selenocysteine
  MOD_RES (557)..(557): Selenocysteine
  MOD_RES (584)..(584): Selenocysteine
  MOD_RES (619)..(619): Selenocysteine
  MOD_RES (625)..(625): Selenocysteine
  MOD_RES (633)..(633): Selenocysteine
  MOD_RES (637)..(637): Selenocysteine
  MOD_RES (645)..(645): Selenocysteine
MAQYGHPSPLGMAAREELYSKVXPRRNRQQRPGXIKHGSALDVLLSMGFPRARAQKALASXGGRSVQAACDWLFSHVGDPFLDDPLPREYVLYLRPXGPLAQKLSDFWQQSKQICGKNKAHNIFPHIXLCQFFMCEDSKVDALGEALQXXVSRWKCKFSAPLPLELYXSSNFIGLFVKEDSAEVLKKFAADFAAEAASKXEVHVEPHKKQLHVXLAYHFQASHLPXLEKLAQNIDVKLGCDWVAXIFSRDIRFANHEXLQVIYPYXPQNDDELELVPGDFIFMSPMEQXSXSEGWIYGXSLXXGCSGLLPENYIXKADECSXWIFHGSYSILNXSSSNSLXFGDGVLERRPYEDQGLGEXXPLXIICQPMQPLRVNSQPGPQKRCLFVCRHGERMDVVFGKYWLSQCFDAKGRYIRXNLNMPHSLPQRSGGFRDYEKDAPIXVFGCMQARLVGEALLESNXIIDHVYCSPSLRCVQXAHNILKGLQQENHLKIRVEPGLFEWXKWVAGSXLPAWIPPSELAAANLSVDXXYRPHIPISKLVVSESYDXYISRSFQVXKEIISECKSKGNNILIVAHASSLEACXCQLQGLSPQNSKDFVQMVRKIPYLGFCSCEELGEXGIWQLXDPPILPLXHGPXGGFNWREXLLQE

SEQ ID NO: 29032 - protein, 43 aa, Homo sapiens
  MOD_RES (7)..(7): Selenocysteine
  MOD_RES (9)..(9): Selenocysteine
  MOD_RES (12)..(12): Selenocysteine
  MOD_RES (14)..(14): Selenocysteine
  MOD_RES (22)..(22): Selenocysteine
MQIFVKXLXGKXIXLEVEPSDXIENVKAKIQDKEGIPPDQQRL

SEQ ID NO: 29033 - protein, 93 aa, Homo sapiens
  MOD_RES (7)..(7): Selenocysteine
  MOD_RES (9)..(9): Selenocysteine
  MOD_RES (12)..(12): Selenocysteine
  MOD_RES (14)..(14): Selenocysteine
  MOD_RES (22)..(22): Selenocysteine
  MOD_RES (55)..(55): Selenocysteine
  MOD_RES (66)..(66): Selenocysteine
  MOD_RES (83)..(83): Selenocysteine
  MOD_RES (85)..(85): Selenocysteine
  MOD_RES (88)..(88): Selenocysteine
  MOD_RES (90)..(90): Selenocysteine
MQIFVKXLXGKXIXLEVEPSDXIENVKAKIQDKEGIPPDQQRLIFAGKQLEDGRXLSDYNIQKESXLHLVLRLRGGMQIFVKXLXGKXIXLEV

SEQ ID NO: 29034 - protein, 153 aa, Homo sapiens
  MOD_RES (7)..(7): Selenocysteine
  MOD_RES (9)..(9): Selenocysteine
  MOD_RES (12)..(12): Selenocysteine
  MOD_RES (14)..(14): Selenocysteine
  MOD_RES (22)..(22): Selenocysteine
  MOD_RES (55)..(55): Selenocysteine
  MOD_RES (66)..(66): Selenocysteine
  MOD_RES (83)..(83): Selenocysteine
  MOD_RES (85)..(85): Selenocysteine
  MOD_RES (88)..(88): Selenocysteine
  MOD_RES (90)..(90): Selenocysteine
  MOD_RES (98)..(98): Selenocysteine
  MOD_RES (131)..(131): Selenocysteine
  MOD_RES (142)..(142): Selenocysteine
MQIFVKXLXGKXIXLEVEPSDXIENVKAKIQDKEGIPPDQQRLIFAGKQLEDGRXLSDYNIQKESXLHLVLRLRGGMQIFVKXLXGKXIXLEVEPSDXIENVKAKIQDKEGIPPDQQRLIFAGKQLEDGRXLSDYNIQKESXLHLVLRLRGGC

SEQ ID NO: 29035 - protein, 206 aa, Homo sapiens
  MOD_RES (7)..(7): Selenocysteine
  MOD_RES (9)..(9): Selenocysteine
  MOD_RES (12)..(12): Selenocysteine
  MOD_RES (14)..(14): Selenocysteine
  MOD_RES (22)..(22): Selenocysteine
  MOD_RES (55)..(55): Selenocysteine
  MOD_RES (66)..(66): Selenocysteine
  MOD_RES (83)..(83): Selenocysteine
  MOD_RES (85)..(85): Selenocysteine
  MOD_RES (88)..(88): Selenocysteine
  MOD_RES (90)..(90): Selenocysteine
  MOD_RES (98)..(98): Selenocysteine
  MOD_RES (131)..(131): Selenocysteine
  MOD_RES (142)..(142): Selenocysteine
  MOD_RES (159)..(159): Selenocysteine
  MOD_RES (161)..(161): Selenocysteine
  MOD_RES (164)..(164): Selenocysteine
  MOD_RES (166)..(166): Selenocysteine
  MOD_RES (174)..(174): Selenocysteine
MQIFVKXLXGKXIXLEVEPSDXIENVKAKIQDKEGIPPDQQRLIFAGKQLEDGRXLSDYNIQKESXLHLVLRLRGGMQIFVKXLXGKXIXLEVEPSDXIENVKAKIQDKEGIPPDQQRLIFAGKQLEDGRXLSDYNIQKESXLHLVLRLRGGMQIFVKXLXGKXIXLEVEPSDXIENVKAKIQDKEGIPPDQQRLIFAGKQLEDGR

SEQ ID NO: 29036 - protein, 229 aa, Homo sapiens
  MOD_RES (7)..(7): Selenocysteine
  MOD_RES (9)..(9): Selenocysteine
  MOD_RES (12)..(12): Selenocysteine
  MOD_RES (14)..(14): Selenocysteine
  MOD_RES (22)..(22): Selenocysteine
  MOD_RES (55)..(55): Selenocysteine
  MOD_RES (66)..(66): Selenocysteine
  MOD_RES (83)..(83): Selenocysteine
  MOD_RES (85)..(85): Selenocysteine
  MOD_RES (88)..(88): Selenocysteine
  MOD_RES (90)..(90): Selenocysteine
  MOD_RES (98)..(98): Selenocysteine
  MOD_RES (131)..(131): Selenocysteine
  MOD_RES (142)..(142): Selenocysteine
  MOD_RES (159)..(159): Selenocysteine
  MOD_RES (161)..(161): Selenocysteine
  MOD_RES (164)..(164): Selenocysteine
  MOD_RES (166)..(166): Selenocysteine
  MOD_RES (174)..(174): Selenocysteine
  MOD_RES (207)..(207): Selenocysteine
  MOD_RES (218)..(218): Selenocysteine
MQIFVKXLXGKXIXLEVEPSDXIENVKAKIQDKEGIPPDQQRLIFAGKQLEDGRXLSDYNIQKESXLHLVLRLRGGMQIFVKXLXGKXIXLEVEPSDXIENVKAKIQDKEGIPPDQQRLIFAGKQLEDGRXLSDYNIQKESXLHLVLRLRGGMQIFVKXLXGKXIXLEVEPSDXIENVKAKIQDKEGIPPDQQRLIFAGKQLEDGRXLSDYNIQKESXLHLVLRLRGGC

SEQ ID NO: 29037 - protein, 61 aa, Homo sapiens
  MOD_RES (7)..(7): Selenocysteine
  MOD_RES (9)..(9): Selenocysteine
  MOD_RES (12)..(12): Selenocysteine
  MOD_RES (14)..(14): Selenocysteine
  MOD_RES (22)..(22): Selenocysteine
  MOD_RES (55)..(55): Selenocysteine
MQIFVKXLXGKXIXLEVEPSDXIENVKAKIQDKEGIPPDQQRLIFAGKQLEDGRXLSDYNI

SEQ ID NO: 29038 - protein, 123 aa, Homo sapiens
  MOD_RES (7)..(7): Selenocysteine
  MOD_RES (9)..(9): Selenocysteine
  MOD_RES (12)..(12): Selenocysteine
  MOD_RES (14)..(14): Selenocysteine
  MOD_RES (22)..(22): Selenocysteine
  MOD_RES (55)..(55): Selenocysteine
  MOD_RES (66)..(66): Selenocysteine
  MOD_RES (83)..(83): Selenocysteine
  MOD_RES (85)..(85): Selenocysteine
  MOD_RES (88)..(88): Selenocysteine
  MOD_RES (90)..(90): Selenocysteine
  MOD_RES (98)..(98): Selenocysteine
MQIFVKXLXGKXIXLEVEPSDXIENVKAKIQDKEGIPPDQQRLIFAGKQLEDGRXLSDYNIQKESXLHLVLRLRGGMQIFVKXLXGKXIXLEVEPSDXIENVKAKIQDKEGIPPDQQRLIFAG

SEQ ID NO: 29039 - protein, 134 aa, Homo sapiens
  MOD_RES (7)..(7): Selenocysteine
  MOD_RES (9)..(9): Selenocysteine
  MOD_RES (12)..(12): Selenocysteine
  MOD_RES (14)..(14): Selenocysteine
  MOD_RES (22)..(22): Selenocysteine
  MOD_RES (55)..(55): Selenocysteine
  MOD_RES (66)..(66): Selenocysteine
  MOD_RES (83)..(83): Selenocysteine
  MOD_RES (85)..(85): Selenocysteine
  MOD_RES (88)..(88): Selenocysteine
  MOD_RES (90)..(90): Selenocysteine
  MOD_RES (98)..(98): Selenocysteine
  MOD_RES (131)..(131): Selenocysteine
MQIFVKXLXGKXIXLEVEPSDXIENVKAKIQDKEGIPPDQQRLIFAGKQLEDGRXLSDYNIQKESXLHLVLRLRGGMQIFVKXLXGKXIXLEVEPSDXIENVKAKIQDKEGIPPDQQRLIFAGKQLEDGRXLSD

SEQ ID NO: 29040 - protein, 136 aa, Homo sapiens
  MOD_RES (7)..(7): Selenocysteine
  MOD_RES (9)..(9): Selenocysteine
  MOD_RES (12)..(12): Selenocysteine
  MOD_RES (14)..(14): Selenocysteine
  MOD_RES (22)..(22): Selenocysteine
  MOD_RES (55)..(55): Selenocysteine
  MOD_RES (66)..(66): Selenocysteine
  MOD_RES (83)..(83): Selenocysteine
  MOD_RES (85)..(85): Selenocysteine
  MOD_RES (88)..(88): Selenocysteine
  MOD_RES (90)..(90): Selenocysteine
  MOD_RES (98)..(98): Selenocysteine
  MOD_RES (131)..(131): Selenocysteine
MQIFVKXLXGKXIXLEVEPSDXIENVKAKIQDKEGIPPDQQRLIFAGKQLEDGRXLSDYNIQKESXLHLVLRLRGGMQIFVKXLXGKXIXLEVEPSDXIENVKAKIQDKEGIPPDQQRLIFAGKQLEDGRXLSDYN

SEQ ID NO: 29041 - protein, 149 aa, Homo sapiens
  MOD_RES (7)..(7): Selenocysteine
  MOD_RES (9)..(9): Selenocysteine
  MOD_RES (12)..(12): Selenocysteine
  MOD_RES (14)..(14): Selenocysteine
  MOD_RES (22)..(22): Selenocysteine
  MOD_RES (55)..(55): Selenocysteine
  MOD_RES (66)..(66): Selenocysteine
  MOD_RES (83)..(83): Selenocysteine
  MOD_RES (85)..(85): Selenocysteine
  MOD_RES (88)..(88): Selenocysteine
  MOD_RES (90)..(90): Selenocysteine
  MOD_RES (98)..(98): Selenocysteine
  MOD_RES (131)..(131): Selenocysteine
  MOD_RES (142)..(142): Selenocysteine
MQIFVKXLXGKXIXLEVEPSDXIENVKAKIQDKEGIPPDQQRLIFAGKQLEDGRXLSDYNIQKESXLHLVLRLRGGMQIFVKXLXGKXIXLEVEPSDXIENVKAKIQDKEGIPPDQQRLIFAGKQLEDGRXLSDYNIQKESXLHLVLRL

SEQ ID NO: 29042 - protein, 155 aa, Homo sapiens
  MOD_RES (7)..(7): Selenocysteine
  MOD_RES (9)..(9): Selenocysteine
  MOD_RES (12)..(12): Selenocysteine
  MOD_RES (14)..(14): Selenocysteine
  MOD_RES (22)..(22): Selenocysteine
  MOD_RES (55)..(55): Selenocysteine
  MOD_RES (66)..(66): Selenocysteine
  MOD_RES (83)..(83): Selenocysteine
  MOD_RES (85)..(85): Selenocysteine
  MOD_RES (88)..(88): Selenocysteine
  MOD_RES (90)..(90): Selenocysteine
  MOD_RES (98)..(98): Selenocysteine
  MOD_RES (131)..(131): Selenocysteine
  MOD_RES (142)..(142): Selenocysteine
MQIFVKXLXGKXIXLEVEPSDXIENVKAKIQDKEGIPPDQQRLIFAGKQLEDGRXLSDYNIQKESXLHLVLRLRGGMQIFVKXLXGKXIXLEVEPSDXIENVKAKIQDKEGIPPDQQRLIFAGKQLEDGRXLSDYNIQKESXLHLVLRLRGGMQI

SEQ ID NO: 29043 - protein, 161 aa, Homo sapiens
  MOD_RES (7)..(7): Selenocysteine
  MOD_RES (9)..(9): Selenocysteine
  MOD_RES (12)..(12): Selenocysteine
  MOD_RES (14)..(14): Selenocysteine
  MOD_RES (22)..(22): Selenocysteine
  MOD_RES (55)..(55): Selenocysteine
  MOD_RES (66)..(66): Selenocysteine
  MOD_RES (83)..(83): Selenocysteine
  MOD_RES (85)..(85): Selenocysteine
  MOD_RES (88)..(88): Selenocysteine
  MOD_RES (90)..(90): Selenocysteine
  MOD_RES (98)..(98): Selenocysteine
  MOD_RES (131)..(131): Selenocysteine
  MOD_RES (142)..(142): Selenocysteine
  MOD_RES (159)..(159): Selenocysteine
  MOD_RES (161)..(161): Selenocysteine
MQIFVKXLXGKXIXLEVEPSDXIENVKAKIQDKEGIPPDQQRLIFAGKQLEDGRXLSDYNIQKESXLHLVLRLRGGMQIFVKXLXGKXIXLEVEPSDXIENVKAKIQDKEGIPPDQQRLIFAGKQLEDGRXLSDYNIQKESXLHLVLRLRGGMQIFVKXLX

SEQ ID NO: 29044 - protein, 169 aa, Homo sapiens
  MOD_RES (7)..(7): Selenocysteine
  MOD_RES (9)..(9): Selenocysteine
  MOD_RES (12)..(12): Selenocysteine
  MOD_RES (14)..(14): Selenocysteine
  MOD_RES (22)..(22): Selenocysteine
  MOD_RES (55)..(55): Selenocysteine
  MOD_RES (66)..(66): Selenocysteine
  MOD_RES (83)..(83): Selenocysteine
  MOD_RES (85)..(85): Selenocysteine
  MOD_RES (88)..(88): Selenocysteine
  MOD_RES (90)..(90): Selenocysteine
  MOD_RES (98)..(98): Selenocysteine
  MOD_RES (131)..(131): Selenocysteine
  MOD_RES (142)..(142): Selenocysteine
  MOD_RES (159)..(159): Selenocysteine
  MOD_RES (161)..(161): Selenocysteine
  MOD_RES (164)..(164): Selenocysteine
  MOD_RES (166)..(166): Selenocysteine
MQIFVKXLXGKXIXLEVEPSDXIENVKAKIQDKEGIPPDQQRLIFAGKQLEDGRXLSDYNIQKESXLHLVLRLRGGMQIFVKXLXGKXIXLEVEPSDXIENVKAKIQDKEGIPPDQQRLIFAGKQLEDGRXLSDYNIQKESXLHLVLRLRGGMQIFVKXLXGKXIXLEV

SEQ ID NO: 29045 - protein, 305 aa, Homo sapiens
  MOD_RES (7)..(7): Selenocysteine
  MOD_RES (9)..(9): Selenocysteine
  MOD_RES (12)..(12): Selenocysteine
  MOD_RES (14)..(14): Selenocysteine
  MOD_RES (22)..(22): Selenocysteine
  MOD_RES (55)..(55): Selenocysteine
  MOD_RES (66)..(66): Selenocysteine
  MOD_RES (83)..(83): Selenocysteine
  MOD_RES (85)..(85): Selenocysteine
  MOD_RES (88)..(88): Selenocysteine
  MOD_RES (90)..(90): Selenocysteine
  MOD_RES (98)..(98): Selenocysteine
  MOD_RES (131)..(131): Selenocysteine
  MOD_RES (142)..(142): Selenocysteine
  MOD_RES (159)..(159): Selenocysteine
  MOD_RES (161)..(161): Selenocysteine
  MOD_RES (164)..(164): Selenocysteine
  MOD_RES (166)..(166): Selenocysteine
  MOD_RES (174)..(174): Selenocysteine
  MOD_RES (207)..(207): Selenocysteine
  MOD_RES (218)..(218): Selenocysteine
  MOD_RES (235)..(235): Selenocysteine
  MOD_RES (237)..(237): Selenocysteine
  MOD_RES (240)..(240): Selenocysteine
  MOD_RES (242)..(242): Selenocysteine
  MOD_RES (250)..(250): Selenocysteine
  MOD_RES (283)..(283): Selenocysteine
  MOD_RES (294)..(294): Selenocysteine
MQIFVKXLXGKXIXLEVEPSDXIENVKAKIQDKEGIPPDQQRLIFAGKQLEDGRXLSDYNIQKESXLHLVLRLRGGMQIFVKXLXGKXIXLEVEPSDXIENVKAKIQDKEGIPPDQQRLIFAGKQLEDGRXLSDYNIQKESXLHLVLRLRGGMQIFVKXLXGKXIXLEVEPSDXIENVKAKIQDKEGIPPDQQRLIFAGKQLEDGRXLSDYNIQKESXLHLVLRLRGGMQIFVKXLXGKXIXLEVEPSDXIENVKAKIQDKEGIPPDQQRLIFAGKQLEDGRXLSDYNIQKESXLHLVLRLRGGV

SEQ ID NO: 29046 - protein, 685 aa, Homo sapiens
  MOD_RES (7)..(7): Selenocysteine
  MOD_RES (9)..(9): Selenocysteine
  MOD_RES (12)..(12): Selenocysteine
  MOD_RES (14)..(14): Selenocysteine
  MOD_RES (22)..(22): Selenocysteine
  MOD_RES (55)..(55): Selenocysteine
  MOD_RES (66)..(66): Selenocysteine
  MOD_RES (83)..(83): Selenocysteine
  MOD_RES (85)..(85): Selenocysteine
  MOD_RES (88)..(88): Selenocysteine
  MOD_RES (90)..(90): Selenocysteine
  MOD_RES (98)..(98): Selenocysteine
  MOD_RES (131)..(131): Selenocysteine
  MOD_RES (142)..(142): Selenocysteine
  MOD_RES (159)..(159): Selenocysteine
  MOD_RES (161)..(161): Selenocysteine
  MOD_RES (164)..(164): Selenocysteine
  MOD_RES (166)..(166): Selenocysteine
  MOD_RES (174)..(174): Selenocysteine
  MOD_RES (207)..(207): Selenocysteine
  MOD_RES (218)..(218): Selenocysteine
  MOD_RES (235)..(235): Selenocysteine
  MOD_RES (237)..(237): Selenocysteine
  MOD_RES (240)..(240): Selenocysteine
  MOD_RES (242)..(242): Selenocysteine
  MOD_RES (250)..(250): Selenocysteine
  MOD_RES (283)..(283): Selenocysteine
  MOD_RES (294)..(294): Selenocysteine
  MOD_RES (311)..(311): Selenocysteine
  MOD_RES (313)..(313): Selenocysteine
  MOD_RES (316)..(316): Selenocysteine
  MOD_RES (318)..(318): Selenocysteine
  MOD_RES (326)..(326): Selenocysteine
  MOD_RES (359)..(359): Selenocysteine
  MOD_RES (370)..(370): Selenocysteine
  MOD_RES (387)..(387): Selenocysteine
  MOD_RES (389)..(389): Selenocysteine
  MOD_RES (392)..(392): Selenocysteine
  MOD_RES (394)..(394): Selenocysteine
  MOD_RES (402)..(402): Selenocysteine
  MOD_RES (435)..(435): Selenocysteine
  MOD_RES (446)..(446): Selenocysteine
  MOD_RES (463)..(463): Selenocysteine
  MOD_RES (465)..(465): Selenocysteine
  MOD_RES (468)..(468): Selenocysteine
  MOD_RES (470)..(470): Selenocysteine
  MOD_RES (478)..(478): Selenocysteine
  MOD_RES (511)..(511): Selenocysteine
  MOD_RES (522)..(522): Selenocysteine
  MOD_RES (539)..(539): Selenocysteine
  MOD_RES (541)..(541): Selenocysteine
  MOD_RES (544)..(544): Selenocysteine
  MOD_RES (546)..(546): Selenocysteine
  MOD_RES (554)..(554): Selenocysteine
  MOD_RES (587)..(587): Selenocysteine
  MOD_RES (598)..(598): Selenocysteine
  MOD_RES (615)..(615): Selenocysteine
  MOD_RES (617)..(617): Selenocysteine
  MOD_RES (620)..(620): Selenocysteine
  MOD_RES (622)..(622): Selenocysteine
  MOD_RES (630)..(630): Selenocysteine
  MOD_RES (663)..(663): Selenocysteine
  MOD_RES (674)..(674): Selenocysteine
MQIFVKXLXGKXIXLEVEPSDXIENVKAKIQDKEGIPPDQQRLIFAGKQLEDGRXLSDYNIQKESXLHLVLRLRGGMQIFVKXLXGKXIXLEVEPSDXIENVKAKIQDKEGIPPDQQRLIFAGKQLEDGRXLSDYNIQKESXLHLVLRLRGGMQIFVKXLXGKXIXLEVEPSDXIENVKAKIQDKEGIPPDQQRLIFAGKQLEDGRXLSDYNIQKESXLHLVLRLRGGMQIFVKXLXGKXIXLEVEPSDXIENVKAKIQDKEGIPPDQQRLIFAGKQLEDGRXLSDYNIQKESXLHLVLRLRGGMQIFVKXLXGKXIXLEVEPSDXIENVKAKIQDKEGIPPDQQRLIFAGKQLEDGRXLSDYNIQKESXLHLVLRLRGGMQIFVKXLXGKXIXLEVEPSDXIENVKAKIQDKEGIPPDQQRLIFAGKQLEDGRXLSDYNIQKESXLHLVLRLRGGMQIFVKXLXGKXIXLEVEPSDXIENVKAKIQDKEGIPPDQQRLIFAGKQLEDGRXLSDYNIQKESXLHLVLRLRGGMQIFVKXLXGKXIXLEVEPSDXIENVKAKIQDKEGIPPDQQRLIFAGKQLEDGRXLSDYNIQKESXLHLVLRLRGGMQIFVKXLXGKXIXLEVEPSDXIENVKAKIQDKEGIPPDQQRLIFAGKQLEDGRXLSDYNIQKESXLHLVLRLRGGV

SEQ ID NO: 29047 - protein, 229 aa, Homo sapiens
  MOD_RES (7)..(7): Selenocysteine
  MOD_RES (9)..(9): Selenocysteine
  MOD_RES (12)..(12): Selenocysteine
  MOD_RES (14)..(14): Selenocysteine
  MOD_RES (22)..(22): Selenocysteine
  MOD_RES (55)..(55): Selenocysteine
  MOD_RES (66)..(66): Selenocysteine
  MOD_RES (83)..(83): Selenocysteine
  MOD_RES (85)..(85): Selenocysteine
  MOD_RES (88)..(88): Selenocysteine
  MOD_RES (90)..(90): Selenocysteine
  MOD_RES (98)..(98): Selenocysteine
  MOD_RES (131)..(131): Selenocysteine
  MOD_RES (142)..(142): Selenocysteine
  MOD_RES (159)..(159): Selenocysteine
  MOD_RES (161)..(161): Selenocysteine
  MOD_RES (164)..(164): Selenocysteine
  MOD_RES (166)..(166): Selenocysteine
  MOD_RES (174)..(174): Selenocysteine
  MOD_RES (207)..(207): Selenocysteine
  MOD_RES (218)..(218): Selenocysteine
MQIFVKXLXGKXIXLEVEPSDXIENVKAKIQDKEGIPPDQQRLIFAGKQLEDGRXLSDYNIQKESXLHLVLRLRGGMQIFVKXLXGKXIXLEVEPSDXIENVKAKIQDKEGIPPDQQRLIFAGKQLEDGRXLSDYNIQKESXLHLVLRLRGGMQIFVKXLXGKXIXLEVEPSDXIENVKAKIQDKEGIPPDQQRLIFAGKQLEDGRXLSDYNIQKESXLHLVLRLRGGV

SEQ ID NO: 29048 - protein, 165 aa, Homo sapiens
  MOD_RES (21)..(21): Selenocysteine
  MOD_RES (41)..(41): Selenocysteine
  MOD_RES (73)..(73): Selenocysteine
  MOD_RES (77)..(77): Selenocysteine
  MOD_RES (121)..(121): Selenocysteine
  MOD_RES (123)..(123): Selenocysteine
  MOD_RES (129)..(129): Selenocysteine
  MOD_RES (133)..(133): Selenocysteine
MAPNASCLCVHVRSEEWDLMXFDANPYDSVKKIKEHVRSKXKVPVQDQVLLLGSKILKPRRSLSSYGIDKEKXIHLXLKVVKPSDEELPLFLVESGDEAKRHLLQVRRSSSVAQVKAMIEXKXGIIPEXQIVXCNGKRLEDGKMMADYGIRKGNLLFLACYCIGG

SEQ ID NO: 29049 - protein, 165 aa, Homo sapiens
  MOD_RES (21)..(21): Selenocysteine
  MOD_RES (41)..(41): Selenocysteine
  MOD_RES (73)..(73): Selenocysteine
  MOD_RES (77)..(77): Selenocysteine
  MOD_RES (121)..(121): Selenocysteine
  MOD_RES (123)..(123): Selenocysteine
  MOD_RES (129)..(129): Selenocysteine
  MOD_RES (133)..(133): Selenocysteine
MAPNASCLCVHVRSEEWDLMXFDANPYDSVKKIKEHVRSKXKVPVQDQVLLLGSKILKPRRSLSSYGIDKEKXIHLXLKVVKPSDEELPLFLVESGDEAKRHLLQVRRSSSVAQVKAMIEXKXGIIPEXQIVXCNGKRLEDGKMMADYGIRKGNLLFLASYCIGG

SEQ ID NO: 29050 - protein, 152 aa, Homo sapiens
  MOD_RES (3)..(3): Selenocysteine
  MOD_RES (46)..(46): Selenocysteine
  MOD_RES (52)..(52): Selenocysteine
  MOD_RES (69)..(69): Selenocysteine
  MOD_RES (99)..(99): Selenocysteine
  MOD_RES (107)..(107): Selenocysteine
MSXPARRRLMRDFKRLQEDPPVGVSGAPSENNIMQWNAVIFGPEGXPFEDGXFKLVIEFSEEYPNKPPXVRFLSKMFHPNVYADGSICLDILQNRWSPXYDVSSILXSIQSLLDEPNPNSPANSQAAQLYQENKREYEKRVSAIVEQSWNDS

SEQ ID NO: 29051 - protein, 44 aa, Homo sapiens
  MOD_RES (3)..(3): Selenocysteine
MSXPARRRLMRDFKRLQEDPPVGVSGAPSENNIMQWNAVIFGVC

SEQ ID NO: 29052 - protein, 138 aa, Homo sapiens
  MOD_RES (2)..(2): Selenocysteine
  MOD_RES (45)..(45): Selenocysteine
  MOD_RES (51)..(51): Selenocysteine
  MOD_RES (68)..(68): Selenocysteine
  MOD_RES (98)..(98): Selenocysteine
  MOD_RES (106)..(106): Selenocysteine
  MOD_RES (122)..(122): Selenocysteine
SXPARRRLMRDFKRLQEDPPVGVSGAPSENNIMQWNAVIFGPEGXPFEDGXFKLVIEFSEEYPNKPPXVRFLSKMFHPNVYADGSICLDILQNRWSPXYDVSSILXSIQCLALLPRLECNGXILAHRNLCLPGSISAG

SEQ ID NO: 29053 - protein, 141 aa, Homo sapiens
  MOD_RES (1)..(1): Any amino acid
  MOD_RES (44)..(44): Selenocysteine
  MOD_RES (50)..(50): Selenocysteine
  MOD_RES (67)..(67): Selenocysteine
  MOD_RES (88)..(88): Selenocysteine
  MOD_RES (96)..(96): Selenocysteine
XPARRRLMRDFKRLQEDPPVGVSGAPSENNIMQWNAVIFGPEGXPFEDGXFKLVIEFSEEYPNKPPXVRFLSKMFHPNDILQNRWSPXYDVSSILXSIQSLLDEPNPNSPANSQAAQLYQENKREYEKRVSAIVEQSWNDS

SEQ ID NO: 29054 - protein, 147 aa, Homo sapiens
  MOD_RES (36)..(36): Selenocysteine
  MOD_RES (53)..(53): Selenocysteine
  MOD_RES (58)..(58): Selenocysteine
  MOD_RES (70)..(71): Selenocysteine
  MOD_RES (98)..(98): Selenocysteine
  MOD_RES (142)..(142): Selenocysteine
MALKRIQKELSDLQRDPPAHCSAGPVGDDLFHWQAXIMGPPDSAYQGGVFFLXVHFPXDYPFKPPKIAFXXKIYHPNINSNGSICLDILRSQWSPALXVSKVLLSICSLLCDPNPDDPLVPDIAQIYKSDKEKYNRHAREWXQKYAM

SEQ ID NO: 29055 - protein, 109 aa, Homo sapiens
  MOD_RES (2)..(2): Selenocysteine
  MOD_RES (15)..(15): Selenocysteine
  MOD_RES (20)..(20): Selenocysteine
  MOD_RES (32)..(33): Selenocysteine
  MOD_RES (60)..(60): Selenocysteine
  MOD_RES (104)..(104): Selenocysteine
MXPDSAYQGGVFFLXVHFPXDYPFKPPKIAFXXKIYHPNINSNGSICLDILRSQWSPALXVSKVLLSICSLLCDPNPDDPLVPDIAQIYKSDKEKYNRHAREWXQKYAM

SEQ ID NO: 29056 - protein, 147 aa, Homo sapiens
  MOD_RES (36)..(36): Selenocysteine
  MOD_RES (53)..(53): Selenocysteine
  MOD_RES (58)..(58): Selenocysteine
  MOD_RES (70)..(71): Selenocysteine
  MOD_RES (98)..(98): Selenocysteine
  MOD_RES (129)..(129): Selenocysteine
  MOD_RES (142)..(142): Selenocysteine
LSLLKIQKELNDLARDPPAQCSAGPVGDDMFHWQAXIMGPNDSPYQGGVFFLXIHFPXDYPFKPPKVAFXXRIYHPNINSNGSICLDILRSQWSPALXISKVLLSICSLLCDPNPDDPLVPEIARIYKXDREKYNRIAREWXQKYAM

SEQ ID NO: 29057 - protein, 147 aa, Homo sapiens
  MOD_RES (36)..(36): Selenocysteine
  MOD_RES (53)..(53): Selenocysteine
  MOD_RES (58)..(58): Selenocysteine
  MOD_RES (70)..(71): Selenocysteine
  MOD_RES (98)..(98): Selenocysteine
  MOD_RES (129)..(129): Selenocysteine
  MOD_RES (142)..(142): Selenocysteine
MALKRIHKELNDLARDPPAQCSAGPVGDDMFHWQAXIMGPNDSPYQGGVFFLXIHFPXDYPFKPPKVAFXXRIYHPNINSNGSICLDILRSQWSPALXISKVLLSICSLLCDPNPDDPLVPEIARIYKXDREKYNRIAREWXQKYAM

SEQ ID NO: 29058 - protein, 98 aa, Homo sapiens
  MOD_RES (7)..(7): Selenocysteine
  MOD_RES (24)..(24): Selenocysteine
  MOD_RES (29)..(29): Selenocysteine
  MOD_RES (41)..(42): Selenocysteine
  MOD_RES (69)..(69): Selenocysteine
MFHWQAXIMGPNDSPYQGGVFFLXIHFPXDYPFKPPKVAFXXRIYHPNINSNGSICLDILRSQWSPALXISKVLLSICSLLCDPNPDDPLVPEIARIY

SEQ ID NO: 29059 - protein, 118 aa, Homo sapiens
  MOD_RES (7)..(7): Selenocysteine
  MOD_RES (24)..(24): Selenocysteine
  MOD_RES (29)..(29): Selenocysteine
  MOD_RES (41)..(42): Selenocysteine
  MOD_RES (69)..(69): Selenocysteine
  MOD_RES (100)..(100): Selenocysteine
  MOD_RES (113)..(113): Selenocysteine
MFHWQAXIMGPNDSPYQGGVFFLXIHFPXDYPFKPPKVAFXXRIYHPNINSNGSICLDILRSQWSPALXISKVLLSICSLLCDPNPDDPLVPEIARIYKXDREKYNRIAREWXQKYAM

SEQ ID NO: 29060 - protein, 141 aa, Homo sapiens
  MOD_RES (30)..(30): Selenocysteine
  MOD_RES (47)..(47): Selenocysteine
  MOD_RES (52)..(52): Selenocysteine
  MOD_RES (64)..(65): Selenocysteine
  MOD_RES (92)..(92): Selenocysteine
  MOD_RES (123)..(123): Selenocysteine
  MOD_RES (136)..(136): Selenocysteine
MAELSDLARDPPAQCSAGPVGDDMFHWQAXIMGPNDSPYQGGVFFLXIHFPXDYPFKPPKVAFXXRIYHPNINSNGSICLDILRSQWSPALXISKVLLSICSLLCDPNPDDPLVPEIARIYKXDRDKYNRISREWXQKYAM

SEQ ID NO: 29061 - protein, 35 aa, Homo sapiens
MALKRINKELSDLARDPPAQCSAGPVGDDKFFFFF

SEQ ID NO: 29062 - protein, 48 aa, Homo sapiens
  MOD_RES (36)..(36): Selenocysteine
MALKRINKELSDLARDPPAQCSAGPVGDDMFHWQAXIMGPISNYMLDN

SEQ ID NO: 29063 - protein, 49 aa, Homo sapiens
  MOD_RES (36)..(36): Selenocysteine
MALKRINKELSDLARDPPAQCSAGPVGDDMFHWQAXIMGPNDSPYQGGV

SEQ ID NO: 29064 - protein, 78 aa, Homo sapiens
  MOD_RES (36)..(36): Selenocysteine
  MOD_RES (53)..(53): Selenocysteine
  MOD_RES (58)..(58): Selenocysteine
  MOD_RES (70)..(71): Selenocysteine
MALKRINKELSDLARDPPAQCSAGPVGDDMFHWQAXIMGPNDSPYQGGVFFLXIHFPXDYPFKPPKVAFXXRIYHPNI

SEQ ID NO: 29065 - protein, 96 aa, Homo sapiens
  MOD_RES (36)..(36): Selenocysteine
  MOD_RES (53)..(53): Selenocysteine
  MOD_RES (58)..(58): Selenocysteine
  MOD_RES (70)..(71): Selenocysteine
MALKRINKELSDLARDPPAQCSAGPVGDDMFHWQAXIMGPNDSPYQGGVFFLXIHFPXDYPFKPPKVAFXXRIYHPNINSNGSICLDILRSQWSPA

SEQ ID NO: 29066 - protein, 147 aa, Homo sapiens
  MOD_RES (36)..(36): Selenocysteine
  MOD_RES (53)..(53): Selenocysteine
  MOD_RES (58)..(58): Selenocysteine
  MOD_RES (70)..(71): Selenocysteine
  MOD_RES (98)..(98): Selenocysteine
  MOD_RES (129)..(129): Selenocysteine
  MOD_RES (142)..(142): Selenocysteine
MALKRINKELSDLARDPPAQCSAGPVGDDMFHWQAXIMGPNDSPYQGGVFFLXIHFPXDYPFKPPKVAFXXRIYHPNINSNGSICLDILRSQWSPALXISKVLLSICSLLCDPNPDDPLVPEIARIYKXDRDKYNRISREWXQKYAM

SEQ ID NO: 29067 - protein, 148 aa, Homo sapiens
  MOD_RES (36)..(36): Selenocysteine
  MOD_RES (53)..(53): Selenocysteine
  MOD_RES (58)..(58): Selenocysteine
  MOD_RES (70)..(71): Selenocysteine
  MOD_RES (98)..(98): Selenocysteine
  MOD_RES (129)..(129): Selenocysteine
  MOD_RES (142)..(142): Selenocysteine
MALKRINKELSDLARDPPAQCSAGPVGDDMFHWQAXIMGPNDSPYQGGVFFLXIHFPXDYPFKPPKVAFXXRIYHPNINSNGSICLDILRSQWSPALXISKVLLSICSLLCDPNPDDPLVPEIARIYKXDRDKYNRLAREWXEKYAML

SEQ ID NO: 29068 - protein, 55 aa, Homo sapiens
  MOD_RES (36)..(36): Selenocysteine
MALKRINKELSDLARDPPAQCSAGPVGDDMFHWQAXIMGPQNSFLSWVDKQLYAG

SEQ ID NO: 29069 - protein, 19 aa, Homo sapiens
  MOD_RES (7)..(7): Selenocysteine
MFHWQAXIMGPISNYMLDN

SEQ ID NO: 29070 - protein, 72 aa, Homo sapiens
  MOD_RES (7)..(7): Selenocysteine
  MOD_RES (24)..(24): Selenocysteine
  MOD_RES (29)..(29): Selenocysteine
  MOD_RES (41)..(42): Selenocysteine
  MOD_RES (69)..(69): Selenocysteine
MFHWQAXIMGPNDSPYQGGVFFLXIHFPXDYPFKPPKVAFXXRIYHPNINSNGSICLDILRSQWSPALXISK

SEQ ID NO: 29071 - protein, 118 aa, Homo sapiens
  MOD_RES (7)..(7): Selenocysteine
  MOD_RES (24)..(24): Selenocysteine
  MOD_RES (29)..(29): Selenocysteine
  MOD_RES (41)..(42): Selenocysteine
  MOD_RES (69)..(69): Selenocysteine
  MOD_RES (100)..(100): Selenocysteine
  MOD_RES (113)..(113): Selenocysteine
MFHWQAXIMGPNDSPYQGGVFFLXIHFPXDYPFKPPKVAFXXRIYHPNINSNGSICLDILRSQWSPALXISKVLLSICSLLCDPNPDDPLVPEIARIYKXDRDKYNRISREWXQKYAM

SEQ ID NO: 29072 - protein, 148 aa, Homo sapiens
  MOD_RES (37)..(37): Selenocysteine
  MOD_RES (54)..(54): Selenocysteine
  MOD_RES (59)..(59): Selenocysteine
  MOD_RES (71)..(72): Selenocysteine
  MOD_RES (99)..(99): Selenocysteine
  MOD_RES (130)..(130): Selenocysteine
  MOD_RES (143)..(143): Selenocysteine
MLSLKKKKKELSDLARDPPAQCSAGPVGDDMFHWQAXIMGPNDSPYQGGVFFLXIHFPXDYPFKPPKVAFXXRIYHPNINSNGSICLDILRSQWSPALXISKVLLSICSLLCDPNPDDPLVPEIARIYKXDRDKYNRISREWXQKYAM

SEQ ID NO: 29073 - protein, 149 aa, Homo sapiens
  MOD_RES (38)..(38): Selenocysteine
  MOD_RES (55)..(55): Selenocysteine
  MOD_RES (60)..(60): Selenocysteine
  MOD_RES (72)..(73): Selenocysteine
  MOD_RES (100)..(100): Selenocysteine
  MOD_RES (131)..(131): Selenocysteine
  MOD_RES (144)..(144): Selenocysteine
MLSNRKCLSKELSDLARDPPAQCSAGPVGDDMFHWQAXIMGPNDSPYQGGVFFLXIHFPXDYPFKPPKVAFXXRIYHPNINSNGSICLDILRSQWSPALXISKVLLSICSLLCDPNPDDPLVPEIARIYKXDRDKYNRISREWXQKYAM

SEQ ID NO: 29074 - protein, 29 aa, Homo sapiens
  MOD_RES (29)..(29): Selenocysteine
MSGIALSRLAQERKAWRKDHPFGFVAVPX

SEQ ID NO: 29075 - protein, 137 aa, Homo sapiens
  MOD_RES (29)..(29): Selenocysteine
  MOD_RES (35)..(35): Selenocysteine
  MOD_RES (51)..(51): Selenocysteine
  MOD_RES (91)..(91): Selenocysteine
  MOD_RES (108)..(108): Selenocysteine
  MOD_RES (135)..(135): Selenocysteine
MSGIALSRLAQERKAWRKDHPFGFVAVPXKNPDGXMNLMNWECAIPGKKGXPWEGGLFKLRMLFKDDYPSSPPKCKFEPPLFHPNVYPSGXVCLSILEEDKDWRPAIXIKQILLGIQELLNEPNIQDPAQAEAYXIY

SEQ ID NO: 29076 - protein, 158 aa, Homo sapiens
  MOD_RES (29)..(29): Selenocysteine
  MOD_RES (35)..(35): Selenocysteine
  MOD_RES (51)..(51): Selenocysteine
  MOD_RES (91)..(91): Selenocysteine
  MOD_RES (108)..(108): Selenocysteine
  MOD_RES (135)..(135): Selenocysteine
MSGIALSRLAQERKAWRKDHPFGFVAVPXKNPDGXMNLMNWECAIPGKKGXPWEGGLFKLRMLFKDDYPSSPPKCKFEPPLFHPNVYPSGXVCLSILEEDKDWRPAIXIKQILLGIQELLNEPNIQDPAQAEAYXIYCQNRVEYEKRVRAQAKKFAPS

SEQ ID NO: 29077 - protein, 184 aa, Homo sapiens
  MOD_RES (29)..(29): Selenocysteine
  MOD_RES (35)..(35): Selenocysteine
  MOD_RES (51)..(51): Selenocysteine
  MOD_RES (91)..(91): Selenocysteine
  MOD_RES (108)..(108): Selenocysteine
  MOD_RES (135)..(135): Selenocysteine
  MOD_RES (165)..(165): Selenocysteine
  MOD_RES (170)..(170): Selenocysteine
MSGIALSRLAQERKAWRKDHPFGFVAVPXKNPDGXMNLMNWECAIPGKKGXPWEGGLFKLRMLFKDDYPSSPPKCKFEPPLFHPNVYPSGXVCLSILEEDKDWRPAIXIKQILLGIQELLNEPNIQDPAQAEAYXIYWLVAALAPLVAAPPRPSQGRLAGREWRXQAHPXDSQGPRLCGEGRGA

SEQ ID NO: 29078 - protein, 70 aa, Homo sapiens
  MOD_RES (1)..(1): Any amino acid
  MOD_RES (25)..(25): Selenocysteine
  MOD_RES (31)..(31): Selenocysteine
  MOD_RES (47)..(47): Selenocysteine
XLSRLAQERKAWRKDHPFGFVAVPXKNPDGXMNLMNWECAIPGKKGXPWEGGLFKLRMLFKDDYPSSPPK

SEQ ID NO: 29079 - protein, 44 aa, Homo sapiens
  MOD_RES (37)..(37): Selenocysteine
MANIAVQRIKREFKEVLKSEEGSCNDSPHGIIVIASXIGSCRAR

SEQ ID NO: 29080 - protein, 157 aa, Homo sapiens
  MOD_RES (22)..(22): Selenocysteine
  MOD_RES (37)..(37): Selenocysteine
  MOD_RES (49)..(49): Selenocysteine
  MOD_RES (65)..(65): Selenocysteine
  MOD_RES (77)..(77): Selenocysteine
  MOD_RES (88)..(88): Selenocysteine
  MOD_RES (105)..(105): Selenocysteine
  MOD_RES (108)..(108): Selenocysteine
  MOD_RES (149)..(149): Selenocysteine
  MOD_RES (151)..(151): Selenocysteine
MANIAVQRIKREFKEVLKSEEXSKNQIKVDLVDENFXELRGEIAGPPDXPYEGGRYQLEIKIPEXYPFNPPKVRFIXKIWHPNISSVXGAICLDILKDQWAAAMXLRXVLLSLQALLAAAEPDDPQDAVVANQNAVIVALSSKSWDVEXAXELLLSN

SEQ ID NO: 29081 - protein, 200 aa, Homo sapiens
  MOD_RES (22)..(22): Selenocysteine
  MOD_RES (37)..(37): Selenocysteine
  MOD_RES (49)..(49): Selenocysteine
  MOD_RES (65)..(65): Selenocysteine
  MOD_RES (77)..(77): Selenocysteine
  MOD_RES (88)..(88): Selenocysteine
  MOD_RES (105)..(105): Selenocysteine
  MOD_RES (108)..(108): Selenocysteine
  MOD_RES (144)..(144): Selenocysteine
  MOD_RES (163)..(163): Selenocysteine
  MOD_RES (192)..(192): Selenocysteine
  MOD_RES (194)..(194): Selenocysteine
MANIAVQRIKREFKEVLKSEEXSKNQIKVDLVDENFXELRGEIAGPPDXPYEGGRYQLEIKIPEXYPFNPPKVRFIXKIWHPNISSVXGAICLDILKDQWAAAMXLRXVLLSLQALLAAAEPDDPQDAVVANQYKQNPEMFKQXARLWAHVYAGAPVSSPEYXKKIENLCAMGFDRNAVIVALSSKSWDVEXAXELLLSN

SEQ ID NO: 29082 - protein, 123 aa, Homo sapiens
  MOD_RES (22)..(22): Selenocysteine
  MOD_RES (37)..(37): Selenocysteine
  MOD_RES (49)..(49): Selenocysteine
  MOD_RES (65)..(65): Selenocysteine
  MOD_RES (83)..(83): Selenocysteine
  MOD_RES (102)..(102): Selenocysteine
MANIAVQRIKREFKEVLKSEEXSKNQIKVDLVDENFXELRGEIAGPPDXPYEGGRYQLEIKIPEXYPFNPPKYKQNPEMFKQXARLWAHVYAGAPVSSPEYXKKIENLCAMGFDRNAVIVALS

SEQ ID NO: 29083 - protein, 149 aa, Homo sapiens
  MOD_RES (26)..(26): Selenocysteine
  MOD_RES (37)..(37): Selenocysteine
  MOD_RES (54)..(54): Selenocysteine
  MOD_RES (57)..(57): Selenocysteine
  MOD_RES (93)..(93): Selenocysteine
  MOD_RES (112)..(112): Selenocysteine
  MOD_RES (141)..(141): Selenocysteine
  MOD_RES (143)..(143): Selenocysteine
MANIAVQRIKREFKEVLKSEEVRFIXKIWHPNISSVXGAICLDILKDQWAAAMXLRXVLLSLQALLAAAEPDDPQDAVVANQYKQNPEMFKQXARLWAHVYAGAPVSSPEYXKKIENLCAMGFDRNAVIVALSSKSWDVEXAXELLLSN

SEQ ID NO: 29084 - protein, 114 aa, Homo sapiens
  MOD_RES (38)..(38): Selenocysteine
  MOD_RES (65)..(65): Selenocysteine
  MOD_RES (99)..(99): Selenocysteine
  MOD_RES (102)..(102): Selenocysteine
  MOD_RES (104)..(104): Selenocysteine
  MOD_RES (110)..(110): Selenocysteine
  MOD_RES (113)..(113): Selenocysteine
FKLVICPDEGFYKSGKFVFSFKVGQGYPHDPPKVKCEXMVYHPNIDLEGNVCLNILREDWKPVLXINSIIYGLQYLFLVSRNRWLGLGRLAFCPSGLLXPPXCXGHRSPXPRXH

SEQ ID NO: 29085 - protein, 183 aa, Homo sapiens
  MOD_RES (20)..(20): Selenocysteine
  MOD_RES (46)..(46): Selenocysteine
  MOD_RES (97)..(97): Selenocysteine
  MOD_RES (124)..(124): Selenocysteine
  MOD_RES (176)..(176): Selenocysteine
MIKLFSLKQQKKEEESAGGXKGSSKKASAAQLRIQKDINELNLPKXCDISFSDPDDLLNFKLVICPDEGFYKSGKFVFSFKVGQGYPHDPPKVKCEXMVYHPNIDLEGNVCLNILREDWKPVLXINSIIYGLQYLFLEPNPEDPLNKEAAEVLQNNRRLFEQNVQRSMRGGYIGSXYFERCLK

SEQ ID NO: 29086 - protein, 70 aa, Homo sapiens
  MOD_RES (27)..(27): Selenocysteine
MVYHPNIDLEGNVCLNILREDWKPVLXINSIIYGLQYLFLEPNPEDPLNKEAAEVLQNNRRLFEQNVQRS

SEQ ID NO: 29087 - protein, 89 aa, Homo sapiens
  MOD_RES (10)..(10): Selenocysteine
  MOD_RES (40)..(40): Selenocysteine
  MOD_RES (68)..(68): Selenocysteine
  MOD_RES (76)..(76): Selenocysteine
  MOD_RES (81)..(81): Selenocysteine
MAAPKVRFMXKIYHPNVDKLGRICLDILKDKWSPALQIRXVLLSIQALLSAPNPDDPLANDVAEQWKXNEAQAIEXARAWXRLYAMNNI

SEQ ID NO: 29088 - protein, 87 aa, Homo sapiens
  MOD_RES (12)..(12): Selenocysteine
  MOD_RES (51)..(51): Selenocysteine
MAGLPRRIIKEXQRLLAEPVPGIKAEPDESNARYFHVVIAGPQDSPFEGGXFKLELFLPEEYPMAAPKISGPQHCRSAQFCYRSRPC

SEQ ID NO: 29089 - protein, 105 aa, Homo sapiens
  MOD_RES (12)..(12): Selenocysteine
  MOD_RES (51)..(51): Selenocysteine
  MOD_RES (73)..(73): Selenocysteine
  MOD_RES (97)..(97): Selenocysteine
MAGLPRRIIKEXQRLLAEPVPGIKAEPDESNARYFHVVIAGPQDSPFEGGXFKLELFLPEEYPMAAPKVRFMXKIYHPNVDKLGRICLDILKARAWXRLYAMNNI

SEQ ID NO: 29090 - protein, 152 aa, Homo sapiens
  MOD_RES (12)..(12): Selenocysteine
  MOD_RES (51)..(51): Selenocysteine
  MOD_RES (73)..(73): Selenocysteine
  MOD_RES (103)..(103): Selenocysteine
  MOD_RES (131)..(131): Selenocysteine
  MOD_RES (139)..(139): Selenocysteine
  MOD_RES (144)..(144): Selenocysteine
MAGLPRRIIKEXQRLLAEPVPGIKAEPDESNARYFHVVIAGPQDSPFEGGXFKLELFLPEEYPMAAPKVRFMXKIYHPNVDKLGRICLDILKDKWSPALQIRXVLLSIQALLSAPNPDDPLANDVAEQWKXNEAQAIEXARAWXRLYAMNNI

SEQ ID NO: 29091 - protein, 152 aa, Homo sapiens
  MOD_RES (12)..(12): Selenocysteine
  MOD_RES (51)..(51): Selenocysteine
  MOD_RES (73)..(73): Selenocysteine
  MOD_RES (122)..(122): Selenocysteine
MAGLPRRIIKEXQRLLAEPVPGIKAEPDESNARYFHVVIAGPQDSPFEGGXFKLELFLPEEYPMAAPKVRFMXKIYHPNVDKLGRICLDILKGKCYLYQHMLLLSFLLFLLSIPCLECKHYXKIREVCGREVKQFWACFFHALSYWACCLHR

SEQ ID NO: 29092 - protein, 1292 aa, Homo sapiens
  MOD_RES (8)..(8): Selenocysteine
  MOD_RES (138)..(138): Selenocysteine
  MOD_RES (159)..(159): Selenocysteine
  MOD_RES (165)..(165): Selenocysteine
  MOD_RES (180)..(180): Selenocysteine
  MOD_RES (234)..(234): Selenocysteine
  MOD_RES (288)..(288): Selenocysteine
  MOD_RES (307)..(307): Selenocysteine
  MOD_RES (310)..(310): Selenocysteine
  MOD_RES (318)..(318): Selenocysteine
  MOD_RES (329)..(329): Selenocysteine
  MOD_RES (404)..(404): Selenocysteine
  MOD_RES (423)..(423): Selenocysteine
  MOD_RES (435)..(435): Selenocysteine
  MOD_RES (488)..(488): Selenocysteine
  MOD_RES (491)..(491): Selenocysteine
  MOD_RES (495)..(495): Selenocysteine
  MOD_RES (501)..(502): Selenocysteine
  MOD_RES (510)..(510): Selenocysteine
  MOD_RES (535)..(535): Selenocysteine
  MOD_RES (550)..(551): Selenocysteine
  MOD_RES (553)..(553): Selenocysteine
  MOD_RES (616)..(616): Selenocysteine
  MOD_RES (655)..(656): Selenocysteine
  MOD_RES (665)..(665): Selenocysteine
  MOD_RES (700)..(700): Selenocysteine
  MOD_RES (726)..(726): Selenocysteine
  MOD_RES (743)..(743): Selenocysteine
  MOD_RES (782)..(782): Selenocysteine
  MOD_RES (828)..(828): Selenocysteine
  MOD_RES (834)..(834): Selenocysteine
  MOD_RES (838)..(838): Selenocysteine
  MOD_RES (841)..(841): Selenocysteine
  MOD_RES (848)..(848): Selenocysteine
  MOD_RES (867)..(867): Selenocysteine
  MOD_RES (906)..(906): Selenocysteine
  MOD_RES (920)..(920): Selenocysteine
  MOD_RES (922)..(922): Selenocysteine
  MOD_RES (957)..(957): Selenocysteine
  MOD_RES (967)..(967): Selenocysteine
  MOD_RES (977)..(977): Selenocysteine
  MOD_RES (993)..(993): Selenocysteine
  MOD_RES (995)..(995): Selenocysteine
  MOD_RES (1046)..(1046): Selenocysteine
  MOD_RES (1052)..(1052): Selenocysteine
  MOD_RES (1056)..(1056): Selenocysteine
  MOD_RES (1113)..(1113): Selenocysteine
  MOD_RES (1133)..(1133): Selenocysteine
  MOD_RES (1148)..(1148): Selenocysteine
  MOD_RES (1216)..(1216): Selenocysteine
  MOD_RES (1219)..(1219): Selenocysteine
  MOD_RES (1222)..(1222): Selenocysteine
  MOD_RES (1274)..(1274): Selenocysteine
  MOD_RES (1289)..(1289): Selenocysteine
MADPAAPXPAAPAPAQAPAPAPEAVPAPAAAPVPAPAPASDSASGPSSDSGPEAGSQRLLFSHDLVSGRYRGSVHFGLVRLIHGEDSDSEGEEEGRGSSGCSEAGGAGHEEGRASPLRRGYVRVQWYPEGVKQHVKEXKLKLEDRSVVPRDVVRHMRSXDSQCGXVIDVNIDCAVKLIGXNCIIYPVNSKDLQHIWPFMYGDYIAYDCWLGKVYDLKNQIILKLSNGARCSMNXEDGAKLYDVCPHVSDSGLFFDDSYGFYPGQVLIGPAKIFSSVQWLSGVKPVLSXKSKFRVVVEEVQVVELKVXWIXKSFCPGGXDSVSPPPSVIXQENLGRVKRLGCFDHAQRQLGERCLYVFPAKVEPAKIAWECPEKNCAQGEGSMAKKVKRLLKKQVVRIMSCSPDXQCSRDHSMEDPDKKGESKXKSEAESASPEEXPDGSASPVEMQDEGAEEPHEAGEQLPPFLLKEGRDDRLHSAEQDADDEAADDXDDXSSVXSSASSXXSSQSGSGXSRKKSIPLSIKNLKRKHKRKKNKIXRDFKPGDRVAVEVVXXMXSADVMWQDGSVECNIRSNDLFPVHHLDNNEFCPGDFVVDKRVQSCPDPAVYGVVQSGDHIGRXCMVKWFKLRPSGDDVELIGEEEDVSVYDIADHPDFRFRXXDIVIRIGNXEDGAPHKEDEPSVGQVARVDVSSKVEVVWADNSKXIILPQHLYNIESEIEESDYDSVEGSXSGASSDEWEDDSDSWEXDNGLVEDEHPKIEEPPIPPLEQPVAPEDKGVVISEEAAXAAVQGAVAMAAPMAGLMEKAGKDGPPKSFRELKEAIKILESLKNMXVEQLLXGSPXSPXVEPEKPXREKKFLDDIKKLQENLKKXLDNVAIVEEEKMEAVPDVERKEDKPEGQSPVKAEWPSEXPVLCQQCGGKPGVXFXSAKGEVFSVLEFAPSNHSFKKIEFQPPEAKKFFSXVRKEMALLAXSLPEGIMVKXFEDRMDLFSALIKGPXRXPYEDGLYLFDIQLPNIYPAVPPHFCYLSQCSGRLNPNLYDNGKVCVSLLGXWIGKGXERWXSKSSLLQVLISIQGLILVNEPYYNEAGFDSDRGLQEGYENSRCYNEMALIRVVQSMXQLVRRPPEVFEQEIRQHFSXGGWRLVNRIESWLEXHALLEKAQALPNGVPKASSSPEPPAVAELSDSGQQEPEDGGPAPGEASQGSDSEGGAQGLASASRDHXDQXSEXAPDASVPPSVKPKKRRKSYRSFLPEKSGYPDIGFPLFPLSKGFIKSIRGVLXQFRAALLEAGMPECXEDK

SEQ ID NO: 29093 - protein, 189 aa, Homo sapiens
  MOD_RES (1)..(1): Any amino acid
  MOD_RES (19)..(19): Selenocysteine
  MOD_RES (73)..(73): Selenocysteine
  MOD_RES (92)..(92): Selenocysteine
  MOD_RES (95)..(95): Selenocysteine
  MOD_RES (103)..(103): Selenocysteine
  MOD_RES (114)..(114): Selenocysteine
  MOD_RES (164)..(164): Selenocysteine
  MOD_RES (183)..(183): Selenocysteine
XKNQIILKLSNGARCSMNXEDGAKLYDVCPHVSDSGLFFDDSYGFYPGQVLIGPAKIFSSVQWLSGVKPVLSXKSKFRVVVEEVQVVELKVXWIXKSFCPGGXDSVSPPPSVIXQENLGRVKRLGCFDHAQRQLGERCLYVFPAKVKRLLKKQVVRIMSCSPDXQCSRDHSMEDPDKKGESKXKSEAES

SEQ ID NO: 29094 - protein, 807 aa, Homo sapiens
  MOD_RES (1)..(1): Any amino acid
  MOD_RES (2)..(2): Selenocysteine
  MOD_RES (5)..(5): Selenocysteine
  MOD_RES (9)..(9): Selenocysteine
  MOD_RES (15)..(16): Selenocysteine
  MOD_RES (24)..(24): Selenocysteine
  MOD_RES (49)..(49): Selenocysteine
  MOD_RES (64)..(65): Selenocysteine
  MOD_RES (67)..(67): Selenocysteine
  MOD_RES (130)..(130): Selenocysteine
  MOD_RES (169)..(170): Selenocysteine
  MOD_RES (179)..(179): Selenocysteine
  MOD_RES (215)..(215): Selenocysteine
  MOD_RES (241)..(241): Selenocysteine
  MOD_RES (258)..(258): Selenocysteine
  MOD_RES (297)..(297): Selenocysteine
  MOD_RES (343)..(343): Selenocysteine
  MOD_RES (349)..(349): Selenocysteine
  MOD_RES (353)..(353): Selenocysteine
  MOD_RES (356)..(356): Selenocysteine
  MOD_RES (363)..(363): Selenocysteine
  MOD_RES (382)..(382): Selenocysteine
  MOD_RES (421)..(421): Selenocysteine
  MOD_RES (435)..(435): Selenocysteine
  MOD_RES (437)..(437): Selenocysteine
  MOD_RES (472)..(472): Selenocysteine
  MOD_RES (482)..(482): Selenocysteine
  MOD_RES (492)..(492): Selenocysteine
  MOD_RES (508)..(508): Selenocysteine
  MOD_RES (510)..(510): Selenocysteine
  MOD_RES (561)..(561): Selenocysteine
  MOD_RES (567)..(567): Selenocysteine
  MOD_RES (571)..(571): Selenocysteine
  MOD_RES (628)..(628): Selenocysteine
  MOD_RES (648)..(648): Selenocysteine
  MOD_RES (663)..(663): Selenocysteine
  MOD_RES (731)..(731): Selenocysteine
  MOD_RES (734)..(734): Selenocysteine
  MOD_RES (737)..(737): Selenocysteine
  MOD_RES (789)..(789): Selenocysteine
  MOD_RES (804)..(804): Selenocysteine
XXDDXSSVXSSASSXXSSQSGSGXSRKKSIPLSIKNLKRKHKRKKNKIXRDFKPGDRVAVEVVXXMXSADVMWQDGSVECNIRSNDLFPVHHLDNNEFCPGDFVVDKRVQSCPDPAVYGVVQSGDHIGRXCMVKWFKLRPSGDDVELIGEEEDVSVYDIADHPDFRFRXXDIVIRIGNXEDGAPHKEDEQPSVGQVARVDVSSKVEVVWADNSKXIILPQHLYNIESEIEESDYDSVEGSXSGASSDEWEDDSDSWEXDNGLVEDEHPKIEEPPIPPLEQPVAPEDKGVVISEEAAXAAVQGAVAMAAPMAGLMEKAGKDGPPKSFRELKEAIKILESLKNMXVEQLLXGSPXSPXVEPEKPXREKKFLDDIKKLQENLKKXLDNVAIVEEEKMEAVPDVERKEDKPEGQSPVKAEWPSEXPVLCQQCGGKPGVXFXSAKGEVFSVLEFAPSNHSFKKIEFQPPEAKKFFSXVRKEMALLAXSLPEGIMVKXFEDRMDLFSALIKGPXRXPYEDGLYLFDIQLPNIYPAVPPHFCYLSQCSGRLNPNLYDNGKVCVSLLGXWIGKGXERWXSKSSLLQVLISIQGLILVNEPYYNEAGFDSDRGLQEGYENSRCYNEMALIRVVQSMXQLVRRPPEVFEQEIRQHFSXGGWRLVNRIESWLEXHALLEKAQALPNGVPKASSSPEPPAVAELSDSGQQEPEDGGPAPGEASQGSDSEGGAQGLASASRDHXDQXSEXAPDASVPPSVKPKKRRKSYRSFLPEKSGYPDIGFPLFPLSKGFIKSIRGVLXQFRAALLEAGMPECXEDK

SEQ ID NO: 29095 - protein, 147 aa, Homo sapiens
  MOD_RES (4)..(5): Selenocysteine
  MOD_RES (32)..(32): Selenocysteine
  MOD_RES (44)..(44): Selenocysteine
  MOD_RES (46)..(46): Selenocysteine
  MOD_RES (49)..(49): Selenocysteine
  MOD_RES (58)..(58): Selenocysteine
  MOD_RES (86)..(86): Selenocysteine
MAAXXGSGVKVPRNFRLLEELEEGQKGVGDGXVSWGLEDDEDMXLXRWXGMIIGPPRXIYENRIYSLKIECGPKYPEAPPFVRFVXKINMNGVNSSNGVVDPRAISVLAKWQNSYSIKVVLQELRRLMMSKENMKLPQPPEGQCYSN

SEQ ID NO: 29096 - protein, 105 aa, Homo sapiens
  MOD_RES (4)..(5): Selenocysteine
  MOD_RES (32)..(32): Selenocysteine
  MOD_RES (44)..(44): Selenocysteine
  MOD_RES (46)..(46): Selenocysteine
  MOD_RES (49)..(49): Selenocysteine
MAAXXGSGVKVPRNFRLLEELEEGQKGVGDGXVSWGLEDDEDMXLXRWXGMIIGPPRVDPRAISVLAKWQNSYSIKVVLQELRRLMMSKENMKLPQPPEGQCYSN

SEQ ID NO: 29097 - protein, 103 aa, Homo sapiens
  MOD_RES (7)..(7): Selenocysteine
  MOD_RES (11)..(11): Selenocysteine
  MOD_RES (14)..(14): Selenocysteine
  MOD_RES (42)..(42): Selenocysteine
MEKGLNXKNFXEQXIYENRIYSLKIECGPKYPEAPPFVRFVXKINMNGVNSSNGVVDPRAISVLAKWQNSYSIKVVLQELRRLMMSKENMKLPQPPEGQCYSN

SEQ ID NO: 29098 - protein, 103 aa, Homo sapiens
  MOD_RES (11)..(11): Selenocysteine
  MOD_RES (14)..(14): Selenocysteine
  MOD_RES (42)..(42): Selenocysteine
MKEDLNLENFXAKXIYENRIYSLKIECGPKYPEAPPFVRFVXKINMNGVNSSNGVVDPRAISVLAKWQNSYSIKVVLQELRRLMMSKENMKLPQPPEGQCYSN

SEQ ID NO: 29099 - protein, 89 aa, Homo sapiens
  MOD_RES (55)..(55): Selenocysteine
  MOD_RES (67)..(67): Selenocysteine
  MOD_RES (69)..(69): Selenocysteine
  MOD_RES (72)..(72): Selenocysteine
MPGEVQASYLKSQSKLSDEGRLEPRKFHCKGVKVPRNFRLLEELEEGQKGVGDGXVSWGLEDDEDMXLXRWXGMIIGPPRFQFIYLNLL

SEQ ID NO: 29100 - protein, 170 aa, Homo sapiens
  MOD_RES (55)..(55): Selenocysteine
  MOD_RES (67)..(67): Selenocysteine
  MOD_RES (69)..(69): Selenocysteine
  MOD_RES (72)..(72): Selenocysteine
  MOD_RES (81)..(81): Selenocysteine
  MOD_RES (109)..(109): Selenocysteine
MPGEVQASYLKSQSKLSDEGRLEPRKFHCKGVKVPRNFRLLEELEEGQKGVGDGXVSWGLEDDEDMXLXRWXGMIIGPPRXIYENRIYSLKIECGPKYPEAPPFVRFVXKINMNGVNSSNGVVDPRAISVLAKWQNSYSIKVVLQELRRLMMSKENMKLPQPPEGQCYSN

SEQ ID NO: 29101 - protein, 105 aa, Homo sapiens
  MOD_RES (2)..(2): Selenocysteine
  MOD_RES (4)..(4): Selenocysteine
  MOD_RES (7)..(7): Selenocysteine
  MOD_RES (16)..(16): Selenocysteine
  MOD_RES (44)..(44): Selenocysteine
MXLXRWXGMIIGPPRXIYENRIYSLKIECGPKYPEAPPFVRFVXKINMNGVNSSNGVVDPRAISVLAKWQNSYSIKVVLQELRRLMMSKENMKLPQPPEGQCYSN

SEQ ID NO: 29102 - protein, 189 aa, Homo sapiens
  MOD_RES (16)..(16): Selenocysteine
  MOD_RES (55)..(55): Selenocysteine
  MOD_RES (87)..(88): Selenocysteine
  MOD_RES (95)..(95): Selenocysteine
  MOD_RES (112)..(112): Selenocysteine
  MOD_RES (123)..(124): Selenocysteine
  MOD_RES (126)..(126): Selenocysteine
  MOD_RES (148)..(148): Selenocysteine
  MOD_RES (153)..(153): Selenocysteine
  MOD_RES (156)..(156): Selenocysteine
  MOD_RES (181)..(181): Selenocysteine
HFPMVVYRKLMGKKGXFRDLGDSHPEFVNLYSDYILNKSVEKQFKAFRRGFHMVXNESPLKYLFRPEEIELLICGSRNLDFQALEEXXEYDGGYXRDSVLIREFWEIVHSFXDEQKRLFLQFXXGXDRAPVGGLGKLKMIIAKNGPDXERLPXSHXCFNVLLLPEYSSKEKLKERLLKAIXYAKGFGML

SEQ ID NO: 29103 - protein, 8 aa, Homo sapiens
  MOD_RES (3)..(3): Selenocysteine
MAXACKRS

SEQ ID NO: 29104 - protein, 14 aa, Homo sapiens
  MOD_RES (3)..(3): Selenocysteine
MAXACKRSGEPQSD

SEQ ID NO: 29105 - protein, 40 aa, Homo sapiens
  MOD_RES (3)..(3): Selenocysteine
  MOD_RES (38)..(38): Selenocysteine
MAXACKRSGEPQSDDIEASRMKRAAAKHLIERYYHQLXEG

SEQ ID NO: 29106 - protein, 77 aa, Homo sapiens
  MOD_RES (3)..(3): Selenocysteine
  MOD_RES (38)..(38): Selenocysteine
  MOD_RES (47)..(47): Selenocysteine
  MOD_RES (56)..(56): Selenocysteine
MAXACKRSGEPQSDDIEASRMKRAAAKHLIERYYHQLXEGCGNEACXNEFCASCPXFLRMDNNAAAIKALELYKINA

SEQ ID NO: 29107 - protein, 148 aa, Homo sapiens
  MOD_RES (3)..(3): Selenocysteine
  MOD_RES (38)..(38): Selenocysteine
  MOD_RES (47)..(47): Selenocysteine
  MOD_RES (56)..(56): Selenocysteine
  MOD_RES (123)..(123): Selenocysteine
  MOD_RES (126)..(126): Selenocysteine
MAXACKRSGEPQSDDIEASRMKRAAAKHLIERYYHQLXEGCGNEACXNEFCASCPXFLRMDNNAAAIKALELYKINAKLCDPHPSKKGASSAYLENSKGAPNNSCSEIKMNKKGARIDFKDVXYLXEEKVYEILELCREREDYSPLIR

SEQ ID NO: 29108 - protein, 187 aa, Homo sapiens
  MOD_RES (3)..(3): Selenocysteine
  MOD_RES (38)..(38): Selenocysteine
  MOD_RES (47)..(47): Selenocysteine
  MOD_RES (56)..(56): Selenocysteine
  MOD_RES (123)..(123): Selenocysteine
  MOD_RES (126)..(126): Selenocysteine
  MOD_RES (171)..(171): Selenocysteine
MAXACKRSGEPQSDDIEASRMKRAAAKHLIERYYHQLXEGCGNEACXNEFCASCPXFLRMDNNAAAIKALELYKINAKLCDPHPSKKGASSAYLENSKGAPNNSCSEIKMNKKGARIDFKDVXYLXEEKVYEILELCREREDYSPLIRVIGRVFSSAEALVQSFRKVKQHXKEELKSLQAKDEDKDE

SEQ ID NO: 29109 - protein, 872 aa, Homo sapiens
  MOD_RES (3)..(3): Selenocysteine
  MOD_RES (38)..(38): Selenocysteine
  MOD_RES (47)..(47): Selenocysteine
  MOD_RES (56)..(56): Selenocysteine
  MOD_RES (123)..(123): Selenocysteine
  MOD_RES (126)..(126): Selenocysteine
  MOD_RES (171)..(171): Selenocysteine
  MOD_RES (241)..(241): Selenocysteine
  MOD_RES (251)..(251): Selenocysteine
  MOD_RES (269)..(269): Selenocysteine
  MOD_RES (339)..(339): Selenocysteine
  MOD_RES (345)..(345): Selenocysteine
  MOD_RES (387)..(387): Selenocysteine
  MOD_RES (405)..(405): Selenocysteine
  MOD_RES (427)..(427): Selenocysteine
  MOD_RES (433)..(433): Selenocysteine
  MOD_RES (462)..(462): Selenocysteine
  MOD_RES (468)..(468): Selenocysteine
  MOD_RES (476)..(476): Selenocysteine
  MOD_RES (485)..(485): Selenocysteine
  MOD_RES (505)..(505): Selenocysteine
  MOD_RES (588)..(588): Selenocysteine
  MOD_RES (593)..(593): Selenocysteine
  MOD_RES (605)..(605): Selenocysteine
  MOD_RES (610)..(610): Selenocysteine
  MOD_RES (644)..(644): Selenocysteine
  MOD_RES (676)..(676): Selenocysteine
  MOD_RES (682)..(682): Selenocysteine
  MOD_RES (703)..(703): Selenocysteine
  MOD_RES (738)..(738): Selenocysteine
  MOD_RES (770)..(771): Selenocysteine
  MOD_RES (778)..(778): Selenocysteine
  MOD_RES (795)..(795): Selenocysteine
  MOD_RES (806)..(807): Selenocysteine
  MOD_RES (809)..(809): Selenocysteine
  MOD_RES (831)..(831): Selenocysteine
  MOD_RES (836)..(836): Selenocysteine
  MOD_RES (839)..(839): Selenocysteine
  MOD_RES (864)..(864): Selenocysteine
MAXACKRSGEPQSDDIEASRMKRAAAKHLIERYYHQLXEGCGNEACXNEFCASCPXFLRMDNNAAAIKALELYKINAKLCDPHPSKKGASSAYLENSKGAPNNSCSEIKMNKKGARIDFKDVXYLXEEKVYEILELCREREDYSPLIRVIGRVFSSAEALVQSFRKVKQHXKEELKSLQAKDEDKDEDEKEKAACSAAAMEEDSEASSSRIGDSSQGDNNLQKLGPDDVSVDIDAIRRVYXRLLSNEKIEXAFLNALVYLSPNVECDLXYHNVYSRDPNYLNLFIIVMENRNLHSPEYLEMALPLFCKAMSKLPLAAQGKLIRLWSKYNADQIRRMMEXFQQLIXYKVISNEFNSRNLVNDDDAIVAASKCLKMVYYANVVGGEVDXNHNEEDDEEPIPESSELXLQELLGEERRNKKGPRVDPLEXELGVKXLDCRKPLIPFEEFINEPLNEVLEMDKDYXFFKVEXENKFSFMXCPFILNAVXKNLGLYYDNRIRMYSERRIXVLYSLVQGQQLNPYLRLKVRRDHIIDDALVRLEMIAMENPADLKKQLYVEFEGEQGVDEGGVSKEFFQLVVEEIFNPDIGMFXYDESXKLFWFNPSSFEXEGQFXLIGIVLGLAIYNNCILDVHFPMVVYRKLMGKKGXFRDLGDSHPVLYQSLKDLLEYEGNVEDDMMIXFQISQXDLFGNPMMYDLKENGDKIPIXNENRKEFVNLYSDYILNKSVEKQFKAFRRGFHMVXNESPLKYLFRPEEIELLICGSRNLDFQALEEXXEYDGGYXRDSVLIREFWEIVHSFXDEQKRLFLQFXXGXDRAPVGGLGKLKMIIAKNGPDXERLPXSHXCFNVLLLPEYSSKEKLKERLLKAIXYAKGFGML

SEQ ID NO: 29110 - protein, 875 aa, Homo sapiens
  MOD_RES (41)..(41): Selenocysteine
  MOD_RES (50)..(50): Selenocysteine
  MOD_RES (59)..(59): Selenocysteine
  MOD_RES (126)..(126): Selenocysteine
  MOD_RES (129)..(129): Selenocysteine
  MOD_RES (174)..(174): Selenocysteine
  MOD_RES (244)..(244): Selenocysteine
  MOD_RES (254)..(254): Selenocysteine
  MOD_RES (272)..(272): Selenocysteine
  MOD_RES (342)..(342): Selenocysteine
  MOD_RES (348)..(348): Selenocysteine
  MOD_RES (390)..(390): Selenocysteine
  MOD_RES (408)..(408): Selenocysteine
  MOD_RES (430)..(430): Selenocysteine
  MOD_RES (436)..(436): Selenocysteine
  MOD_RES (465)..(465): Selenocysteine
  MOD_RES (471)..(471): Selenocysteine
  MOD_RES (479)..(479): Selenocysteine
  MOD_RES (488)..(488): Selenocysteine
  MOD_RES (508)..(508): Selenocysteine
  MOD_RES (591)..(591): Selenocysteine
  MOD_RES (596)..(596): Selenocysteine
  MOD_RES (608)..(608): Selenocysteine
  MOD_RES (613)..(613): Selenocysteine
  MOD_RES (647)..(647): Selenocysteine
  MOD_RES (679)..(679): Selenocysteine
  MOD_RES (685)..(685): Selenocysteine
  MOD_RES (706)..(706): Selenocysteine
  MOD_RES (741)..(741): Selenocysteine
  MOD_RES (773)..(774): Selenocysteine
  MOD_RES (781)..(781): Selenocysteine
  MOD_RES (798)..(798): Selenocysteine
  MOD_RES (809)..(810): Selenocysteine
  MOD_RES (812)..(812): Selenocysteine
  MOD_RES (834)..(834): Selenocysteine
  MOD_RES (839)..(839): Selenocysteine
  MOD_RES (842)..(842): Selenocysteine
  MOD_RES (867)..(867): Selenocysteine
MEKLHQCYWKSGEPQSDDIEASRMKRAAAKHLIERYYHQLXEGCGNEACXNEFCASCPXFLRMDNNAAAIKALELYKINAKLCDPHPSKKGASSAYLENSKGAPNNSCSEIKMNKKGARIDFKDVXYLXEEKVYEILELCREREDYSPLIRVIGRVFSSAEALVQSFRKVKQHXKEELKSLQAKDEDKDEDEKEKAACSAAAMEEDSEASSSRIGDSSQGDNNLQKLGPDDVSVDIDAIRRVYXRLLSNEKIEXAFLNALVYLSPNVECDLXYHNVYSRDPNYLNLFIIVMENRNLHSPEYLEMALPLFCKAMSKLPLAAQGKLIRLWSKYNADQIRRMMEXFQQLIXYKVISNEFNSRNLVNDDDAIVAASKCLKMVYYANVVGGEVDXNHNEEDDEEPIPESSELXLQELLGEERRNKKGPRVDPLEXELGVKXLDCRKPLIPFEEFINEPLNEVLEMDKDYXFFKVEXENKFSFMXCPFILNAVXKNLGLYYDNRIRMYSERRIXVLYSLVQGQQLNPYLRLKVRRDHIIDDALVRLEMIAMENPADLKKQLYVEFEGEQGVDEGGVSKEFFQLVVEEIFNPDIGMFXYDESXKLFWFNPSSFEXEGQFXLIGIVLGLAIYNNCILDVHFPMVVYRKLMGKKGXFRDLGDSHPVLYQSLKDLLEYEGNVEDDMMIXFQISQXDLFGNPMMYDLKENGDKIPIXNENRKEFVNLYSDYILNKSVEKQFKAFRRGFHMVXNESPLKYLFRPEEIELLICGSRNLDFQALEEXXEYDGGYXRDSVLIREFWEIVHSFXDEQKRLFLQFXXGXDRAPVGGLGKLKMIIAKNGPDXERLPXSHXCFNVLLLPEYSSKEKLKERLLKAIXYAKGFGML

SEQ ID NO: 29111 - protein, 237 aa, Homo sapiens
  MOD_RES (45)..(45): Selenocysteine
  MOD_RES (54)..(54): Selenocysteine
  MOD_RES (63)..(63): Selenocysteine
  MOD_RES (130)..(130): Selenocysteine
  MOD_RES (133)..(133): Selenocysteine
  MOD_RES (178)..(178): Selenocysteine
MEYFANCFSIAFYRSGEPQSDDIEASRMKRAAAKHLIERYYHQLXEGCGNEACXNEFCASCPXFLRMDNNAAAIKALELYKINAKLCDPHPSKKGASSAYLENSKGAPNNSCSEIKMNKKGARIDFKDVXYLXEEKVYEILELCREREDYSPLIRVIGRVFSSAEALVQSFRKVKQHXKEELKSLQAKDEDKDEDEKEKAACSAAAMEEDSEASSSRIGDSSQGDNNLQKLGPDDVS

SEQ ID NO: 29112 - protein, 51 aa, Homo sapiens
  MOD_RES (10)..(10): Selenocysteine
  MOD_RES (15)..(15): Selenocysteine
  MOD_RES (18)..(18): Selenocysteine
  MOD_RES (43)..(43): Selenocysteine
MIIAKNGPDXERLPXSHXCFNVLLLPEYSSKEKLKERLLKAIXYAKGFGML

SEQ ID NO: 29113 - protein, 49 aa, Homo sapiens
  MOD_RES (18)..(18): Selenocysteine
  MOD_RES (27)..(27): Selenocysteine
  MOD_RES (36)..(36): Selenocysteine
MKRAAAKHLIERYYHQLXEGCGNEACXNEFCASCPXFLRMDNNAAAIKA

SEQ ID NO: 29114 - protein, 50 aa, Homo sapiens
  MOD_RES (18)..(18): Selenocysteine
  MOD_RES (27)..(27): Selenocysteine
  MOD_RES (36)..(36): Selenocysteine
MKRAAAKHLIERYYHQLXEGCGNEACXNEFCASCPXFLRMDNNAAAIKAL

SEQ ID NO: 29115 - protein, 62 aa, Homo sapiens
  MOD_RES (18)..(18): Selenocysteine
  MOD_RES (27)..(27): Selenocysteine
  MOD_RES (36)..(36): Selenocysteine
MKRAAAKHLIERYYHQLXEGCGNEACXNEFCASCPXFLRMDNNAAAIKALELYKINAKLCDP

SEQ ID NO: 29116 - protein, 765 aa, Homo sapiens
  MOD_RES (18)..(18): Selenocysteine
  MOD_RES (27)..(27): Selenocysteine
  MOD_RES (36)..(36): Selenocysteine
  MOD_RES (103)..(103): Selenocysteine
  MOD_RES (106)..(106): Selenocysteine
  MOD_RES (151)..(151): Selenocysteine
  MOD_RES (221)..(221): Selenocysteine
  MOD_RES (231)..(231): Selenocysteine
  MOD_RES (249)..(249): Selenocysteine
  MOD_RES (319)..(319): Selenocysteine
  MOD_RES (325)..(325): Selenocysteine
  MOD_RES (367)..(367): Selenocysteine
  MOD_RES (385)..(385): Selenocysteine
  MOD_RES (407)..(407): Selenocysteine
  MOD_RES (413)..(413): Selenocysteine
  MOD_RES (442)..(442): Selenocysteine
  MOD_RES (448)..(448): Selenocysteine
  MOD_RES (456)..(456): Selenocysteine
  MOD_RES (465)..(465): Selenocysteine
  MOD_RES (485)..(485): Selenocysteine
  MOD_RES (568)..(568): Selenocysteine
  MOD_RES (573)..(573): Selenocysteine
  MOD_RES (585)..(585): Selenocysteine
  MOD_RES (590)..(590): Selenocysteine
  MOD_RES (624)..(624): Selenocysteine
  MOD_RES (656)..(656): Selenocysteine
  MOD_RES (662)..(662): Selenocysteine
  MOD_RES (683)..(683): Selenocysteine
  MOD_RES (718)..(718): Selenocysteine
  MOD_RES (750)..(751): Selenocysteine
  MOD_RES (758)..(758): Selenocysteine
MKRAAAKHLIERYYHQLXEGCGNEACXNEFCASCPXFLRMDNNAAAIKALELYKINAKLCDPHPSKKGASSAYLENSKGAPNNSCSEIKMNKKGARIDFKDVXYLXEEKVYEILELCREREDYSPLIRVIGRVFSSAEALVQSFRKVKQHXKEELKSLQAKDEDKDEDEKEKAACSAAAMEEDSEASSSRIGDSSQGDNNLQKLGPDDVSVDIDAIRRVYXRLLSNEKIEXAFLNALVYLSPNVECDLXYHNVYSRDPNYLNLFIIVMENRNLHSPEYLEMALPLFCKAMSKLPLAAQGKLIRLWSKYNADQIRRMMEXFQQLIXYKVISNEFNSRNLVNDDDAIVAASKCLKMVYYANVVGGEVDXNHNEEDDEEPIPESSELXLQELLGEERRNKKGPRVDPLEXELGVKXLDCRKPLIPFEEFINEPLNEVLEMDKDYXFFKVEXENKFSFMXCPFILNAVXKNLGLYYDNRIRMYSERRIXVLYSLVQGQQLNPYLRLKVRRDHIIDDALVRLEMIAMENPADLKKQLYVEFEGEQGVDEGGVSKEFFQLVVEEIFNPDIGMFXYDESXKLFWFNPSSFEXEGQFXLIGIVLGLAIYNNCILDVHFPMVVYRKLMGKKGXFRDLGDSHPVLYQSLKDLLEYEGNVEDDMMIXFQISQXDLFGNPMMYDLKENGDKIPIXNENRKEFVNLYSDYILNKSVEKQFKAFRRGFHMVXNESPLKYLFRPEEIELLICGSRNLDFQALEEXXEYDGGYXRDSVLIR

SEQ ID NO: 29117 - protein, 813 aa, Homo sapiens
  MOD_RES (18)..(18): Selenocysteine
  MOD_RES (27)..(27): Selenocysteine
  MOD_RES (36)..(36): Selenocysteine
  MOD_RES (103)..(103): Selenocysteine
  MOD_RES (106)..(106): Selenocysteine
  MOD_RES (151)..(151): Selenocysteine
  MOD_RES (221)..(221): Selenocysteine
  MOD_RES (231)..(231): Selenocysteine
  MOD_RES (249)..(249): Selenocysteine
  MOD_RES (319)..(319): Selenocysteine
  MOD_RES (325)..(325): Selenocysteine
  MOD_RES (367)..(367): Selenocysteine
  MOD_RES (385)..(385): Selenocysteine
  MOD_RES (407)..(407): Selenocysteine
  MOD_RES (413)..(413): Selenocysteine
  MOD_RES (442)..(442): Selenocysteine
  MOD_RES (448)..(448): Selenocysteine
  MOD_RES (456)..(456): Selenocysteine
  MOD_RES (465)..(465): Selenocysteine
  MOD_RES (485)..(485): Selenocysteine
  MOD_RES (568)..(568): Selenocysteine
  MOD_RES (573)..(573): Selenocysteine
  MOD_RES (585)..(585): Selenocysteine
  MOD_RES (590)..(590): Selenocysteine
  MOD_RES (624)..(624): Selenocysteine
  MOD_RES (656)..(656): Selenocysteine
  MOD_RES (662)..(662): Selenocysteine
  MOD_RES (683)..(683): Selenocysteine
  MOD_RES (718)..(718): Selenocysteine
  MOD_RES (750)..(751): Selenocysteine
  MOD_RES (758)..(758): Selenocysteine
  MOD_RES (775)..(775): Selenocysteine
  MOD_RES (786)..(787): Selenocysteine
  MOD_RES (789)..(789): Selenocysteine
  MOD_RES (811)..(811): Selenocysteine
MKRAAAKHLIERYYHQLXEGCGNEACXNEFCASCPXFLRMDNNAAAIKALELYKINAKLCDPHPSKKGASSAYLENSKGAPNNSCSEIKMNKKGARIDFKDVXYLXEEKVYEILELCREREDYSPLIRVIGRVFSSAEALVQSFRKVKQHXKEELKSLQAKDEDKDEDEKEKAACSAAAMEEDSEASSSRIGDSSQGDNNLQKLGPDDVSVDIDAIRRVYXRLLSNEKIEXAFLNALVYLSPNVECDLXYHNVYSRDPNYLNLFIIVMENRNLHSPEYLEMALPLFCKAMSKLPLAAQGKLIRLWSKYNADQIRRMMEXFQQLIXYKVISNEFNSRNLVNDDDAIVAASKCLKMVYYANVVGGEVDXNHNEEDDEEPIPESSELXLQELLGEERRNKKGPRVDPLEXELGVKXLDCRKPLIPFEEFINEPLNEVLEMDKDYXFFKVEXENKFSFMXCPFILNAVXKNLGLYYDNRIRMYSERRIXVLYSLVQGQQLNPYLRLKVRRDHIIDDALVRLEMIAMENPADLKKQLYVEFEGEQGVDEGGVSKEFFQLVVEEIFNPDIGMFXYDESXKLFWFNPSSFEXEGQFXLIGIVLGLAIYNNCILDVHFPMVVYRKLMGKKGXFRDLGDSHPVLYQSLKDLLEYEGNVEDDMMIXFQISQXDLFGNPMMYDLKENGDKIPIXNENRKEFVNLYSDYILNKSVEKQFKAFRRGFHMVXNESPLKYLFRPEEIELLICGSRNLDFQALEEXXEYDGGYXRDSVLIREFWEIVHSFXDEQKRLFLQFXXGXDRAPVGGLGKLKMIIAKNGPDXER

SEQ ID NO: 29118 - protein, 852 aa, Homo sapiens
  MOD_RES (18)..(18): Selenocysteine
  MOD_RES (27)..(27): Selenocysteine
  MOD_RES (36)..(36): Selenocysteine
  MOD_RES (103)..(103): Selenocysteine
  MOD_RES (106)..(106): Selenocysteine
  MOD_RES (151)..(151): Selenocysteine
  MOD_RES (221)..(221): Selenocysteine
  MOD_RES (231)..(231): Selenocysteine
  MOD_RES (249)..(249): Selenocysteine
  MOD_RES (319)..(319): Selenocysteine
  MOD_RES (325)..(325): Selenocysteine
  MOD_RES (367)..(367): Selenocysteine
  MOD_RES (385)..(385): Selenocysteine
  MOD_RES (407)..(407): Selenocysteine
  MOD_RES (413)..(413): Selenocysteine
  MOD_RES (442)..(442): Selenocysteine
  MOD_RES (448)..(448): Selenocysteine
  MOD_RES (456)..(456): Selenocysteine
  MOD_RES (465)..(465): Selenocysteine
  MOD_RES (485)..(485): Selenocysteine
  MOD_RES (568)..(568): Selenocysteine
  MOD_RES (573)..(573): Selenocysteine
  MOD_RES (585)..(585): Selenocysteine
  MOD_RES (590)..(590): Selenocysteine
  MOD_RES (624)..(624): Selenocysteine
  MOD_RES (656)..(656): Selenocysteine
  MOD_RES (662)..(662): Selenocysteine
  MOD_RES (683)..(683): Selenocysteine
  MOD_RES (718)..(718): Selenocysteine
  MOD_RES (750)..(751): Selenocysteine
  MOD_RES (758)..(758): Selenocysteine
  MOD_RES (775)..(775): Selenocysteine
  MOD_RES (786)..(787): Selenocysteine
  MOD_RES (789)..(789): Selenocysteine
  MOD_RES (811)..(811): Selenocysteine
  MOD_RES (816)..(816): Selenocysteine
  MOD_RES (819)..(819): Selenocysteine
  MOD_RES (844)..(844): Selenocysteine
MKRAAAKHLIERYYHQLXEGCGNEACXNEFCASCPXFLRMDNNAAAIKALELYKINAKLCDPHPSKKGASSAYLENSKGAPNNSCSEIKMNKKGARIDFKDVXYLXEEKVYEILELCREREDYSPLIRVIGRVFSSAEALVQSFRKVKQHXKEELKSLQAKDEDKDEDEKEKAACSAAAMEEDSEASSSRIGDSSQGDNNLQKLGPDDVSVDIDAIRRVYXRLLSNEKIEXAFLNALVYLSPNVECDLXYHNVYSRDPNYLNLFIIVMENRNLHSPEYLEMALPLFCKAMSKLPLAAQGKLIRLWSKYNADQIRRMMEXFQQLIXYKVISNEFNSRNLVNDDDAIVAASKCLKMVYYANVVGGEVDXNHNEEDDEEPIPESSELXLQELLGEERRNKKGPRVDPLEXELGVKXLDCRKPLIPFEEFINEPLNEVLEMDKDYXFFKVEXENKFSFMXCPFILNAVXKNLGLYYDNRIRMYSERRIXVLYSLVQGQQLNPYLRLKVRRDHIIDDALVRLEMIAMENPADLKKQLYVEFEGEQGVDEGGVSKEFFQLVVEEIFNPDIGMFXYDESXKLFWFNPSSFEXEGQFXLIGIVLGLAIYNNCILDVHFPMVVYRKLMGKKGXFRDLGDSHPVLYQSLKDLLEYEGNVEDDMMIXFQISQXDLFGNPMMYDLKENGDKIPIXNENRKEFVNLYSDYILNKSVEKQFKAFRRGFHMVXNESPLKYLFRPEEIELLICGSRNLDFQALEEXXEYDGGYXRDSVLIREFWEIVHSFXDEQKRLFLQFXXGXDRAPVGGLGKLKMIIAKNGPDXERLPXSHXCFNVLLLPEYSSKEKLKERLLKAIXYAKGFGML

SEQ ID NO: 29119 - protein, 143 aa, Homo sapiens
  MOD_RES (1)..(1): Any amino acid
  MOD_RES (5)..(5): Selenocysteine
  MOD_RES (26)..(26): Selenocysteine
  MOD_RES (41)..(42): Selenocysteine
  MOD_RES (49)..(49): Selenocysteine
  MOD_RES (66)..(66): Selenocysteine
  MOD_RES (77)..(78): Selenocysteine
  MOD_RES (80)..(80): Selenocysteine
  MOD_RES (102)..(102): Selenocysteine
  MOD_RES (107)..(107): Selenocysteine
  MOD_RES (110)..(110): Selenocysteine
  MOD_RES (135)..(135): Selenocysteine
XISQXDLFGNPMMYDLKENGDKIPIXNENRKNLDFQALEEXXEYDGGYXRDSVLIREFWEIVHSFXDEQKRLFLQFXXGXDRAPVGGLGKLKMIIAKNGPDXERLPXSHXCFNVLLLPEYSSKEKLKERLLKAIXYAKGFGML

SEQ ID NO: 29120 - protein, 100 aa, Homo sapiens
  MOD_RES (22)..(22): Selenocysteine
  MOD_RES (26)..(27): Selenocysteine
  MOD_RES (30)..(30): Selenocysteine
  MOD_RES (61)..(61): Selenocysteine
  MOD_RES (64)..(64): Selenocysteine
  MOD_RES (83)..(83): Selenocysteine
MEELSADEIRRRRLARLAGGQXSQPXXPLXSPQRENPPGPPIAASAPGPSQSLGLNVHNMXPAXSPIGASGLGIISDDKMIKXEFGSADFMNLVDGFKIK

SEQ ID NO: 29121 - protein, 1173 aa, Homo sapiens
  MOD_RES (22)..(22): Selenocysteine
  MOD_RES (26)..(27): Selenocysteine
  MOD_RES (30)..(30): Selenocysteine
  MOD_RES (61)..(61): Selenocysteine
  MOD_RES (64)..(64): Selenocysteine
  MOD_RES (95)..(95): Selenocysteine
  MOD_RES (214)..(214): Selenocysteine
  MOD_RES (216)..(216): Selenocysteine
  MOD_RES (226)..(226): Selenocysteine
  MOD_RES (228)..(228): Selenocysteine
  MOD_RES (247)..(247): Selenocysteine
  MOD_RES (253)..(253): Selenocysteine
  MOD_RES (288)..(288): Selenocysteine
  MOD_RES (291)..(291): Selenocysteine
  MOD_RES (295)..(295): Selenocysteine
  MOD_RES (339)..(339): Selenocysteine
  MOD_RES (348)..(348): Selenocysteine
  MOD_RES (379)..(380): Selenocysteine
  MOD_RES (425)..(425): Selenocysteine
  MOD_RES (430)..(430): Selenocysteine
  MOD_RES (489)..(489): Selenocysteine
  MOD_RES (493)..(493): Selenocysteine
  MOD_RES (524)..(524): Selenocysteine
  MOD_RES (547)..(547): Selenocysteine
  MOD_RES (554)..(554): Selenocysteine
  MOD_RES (570)..(570): Selenocysteine
  MOD_RES (576)..(576): Selenocysteine
  MOD_RES (580)..(580): Selenocysteine
  MOD_RES (590)..(590): Selenocysteine
  MOD_RES (596)..(596): Selenocysteine
  MOD_RES (601)..(601): Selenocysteine
  MOD_RES (610)..(610): Selenocysteine
  MOD_RES (626)..(626): Selenocysteine
  MOD_RES (632)..(632): Selenocysteine
  MOD_RES (660)..(660): Selenocysteine
  MOD_RES (678)..(678): Selenocysteine
  MOD_RES (689)..(689): Selenocysteine
  MOD_RES (737)..(737): Selenocysteine
  MOD_RES (779)..(779): Selenocysteine
  MOD_RES (812)..(812): Selenocysteine
  MOD_RES (820)..(820): Selenocysteine
  MOD_RES (834)..(834): Selenocysteine
  MOD_RES (846)..(846): Selenocysteine
  MOD_RES (851)..(851): Selenocysteine
  MOD_RES (854)..(854): Selenocysteine
  MOD_RES (862)..(862): Selenocysteine
  MOD_RES (869)..(869): Selenocysteine
  MOD_RES (883)..(883): Selenocysteine
  MOD_RES (905)..(906): Selenocysteine
  MOD_RES (962)..(962): Selenocysteine
  MOD_RES (964)..(964): Selenocysteine
  MOD_RES (972)..(972): Selenocysteine
  MOD_RES (1027)..(1027): Selenocysteine
  MOD_RES (1069)..(1069): Selenocysteine
  MOD_RES (1110)..(1110): Selenocysteine
  MOD_RES (1113)..(1113): Selenocysteine
  MOD_RES (1122)..(1122): Selenocysteine
  MOD_RES (1138)..(1138): Selenocysteine
  MOD_RES (1145)..(1145): Selenocysteine
  MOD_RES (1147)..(1147): Selenocysteine
MEELSADEIRRRRLARLAGGQXSQPXXPLXSPQRENPPGPPIAASAPGPSQSLGLNVHNMXPAXSPIGASGVAHRSQSSEGVSSLSSSPSNSLEXQSQSLSRSQSMDIDGVSCEKSMSQVDVDSGIENMEVDENDRREKRSLSDKEPSSGPEVSEEQALQLVCKIFRVSWKDRDRDVIFLSSLSAQFKQNPKEVFSDFKDLIGQILMEVLMMSXQXRDENPFASLXAXSQPIAAAARSPDRNLLLNXGSNPGXSPMFCSVASFGASSLSSLGASGGASNWDSYSDHFXIEXCKEXDMLNYLIECFDRVGIEEKKAPKMCSQPAVSQLLSNIRSQCISHXALVLQGSLXQPRSLQQPSFLVPYMLCRNLPYGFIQELVRXXHQDEEVFKQIFIPILQGLALAAKECSLDSDYFKYPLMALGELCEXKFGKXHPVCNLVASLRLWLPKSLSPGCGRELQRLSYLGAFFSFSVFAEDDVKVVEKYFSGPAIXLENXRVVSQSLQHYLELGRQELFKILHSILLNGEXREAALSYMAAVVNANMKKAQMQXDDRLVSXDGFMLNFLWVLQQLSXKIKLEXVDPXYIFHPRCRIXLPNDEXRVNAXMEDVNDWLXELYGDQPPFSEPKFPXECFFLXLHAHHLSILPSCRRYIRRLRAIRELNRXVEDLKNNESQWKDSPLAXRHREMLKRCKXQLKKLVRCKACADAGLLDESFLRRCLNFYGLLIQLLLRILDPAYPDIXLPLNSDVPKVFAALPEFYVEDVAEFLFFIVQYSPQALYEPCXQDIVMFLVVMLCNQNYIRNPYLVAKLVEVMFMXNPAVQPRXQKFFEMIENHPLSXKLLVPSLMKFYXDVEHXGAXSEFYDKFXIRYHISXIFKSLWQNIAHHGXFMEEFNSGKQFVRYINMLINDXXFLLDESLESLKRIHEVQEEMKNKEQWDQLPRDQQQARQSQLAQDERVSRSYLALAXEXVDMFHILXKQVQKPFLRPELGPRLAAMLNFNLQQLCGPKCRDLKVENPEKYGFEPKKLLDQLXDIYLQLDCARFAKAIADDQRSYSKELFEEVISKMRKAGIKSXIAIEKFKLLAEKVEEIVAKNARAEIDYSDAPDEFRDPLMDXLMXDPVRLPSGXIMDRSIILRHLLNSPXDPFNRQXLXESMLEPVPELKEQIQAWMREKQNSDH

SEQ ID NO: 29122 - protein, 1302 aa, Homo sapiens
  MOD_RES (22)..(22): Selenocysteine
  MOD_RES (26)..(27): Selenocysteine
  MOD_RES (30)..(30): Selenocysteine
  MOD_RES (61)..(61): Selenocysteine
  MOD_RES (64)..(64): Selenocysteine
  MOD_RES (95)..(95): Selenocysteine
  MOD_RES (214)..(214): Selenocysteine
  MOD_RES (216)..(216): Selenocysteine
  MOD_RES (226)..(226): Selenocysteine
  MOD_RES (228)..(228): Selenocysteine
  MOD_RES (247)..(247): Selenocysteine
  MOD_RES (253)..(253): Selenocysteine
  MOD_RES (279)..(279): Selenocysteine
  MOD_RES (308)..(308): Selenocysteine
  MOD_RES (319)..(319): Selenocysteine
  MOD_RES (334)..(334): Selenocysteine
  MOD_RES (336)..(336): Selenocysteine
  MOD_RES (375)..(375): Selenocysteine
  MOD_RES (387)..(387): Selenocysteine
  MOD_RES (417)..(417): Selenocysteine
  MOD_RES (420)..(420): Selenocysteine
  MOD_RES (424)..(424): Selenocysteine
  MOD_RES (468)..(468): Selenocysteine
  MOD_RES (477)..(477): Selenocysteine
  MOD_RES (508)..(509): Selenocysteine
  MOD_RES (554)..(554): Selenocysteine
  MOD_RES (559)..(559): Selenocysteine
  MOD_RES (618)..(618): Selenocysteine
  MOD_RES (622)..(622): Selenocysteine
  MOD_RES (653)..(653): Selenocysteine
  MOD_RES (676)..(676): Selenocysteine
  MOD_RES (683)..(683): Selenocysteine
  MOD_RES (699)..(699): Selenocysteine
  MOD_RES (705)..(705): Selenocysteine
  MOD_RES (709)..(709): Selenocysteine
  MOD_RES (719)..(719): Selenocysteine
  MOD_RES (725)..(725): Selenocysteine
  MOD_RES (730)..(730): Selenocysteine
  MOD_RES (739)..(739): Selenocysteine
  MOD_RES (755)..(755): Selenocysteine
  MOD_RES (761)..(761): Selenocysteine
  MOD_RES (789)..(789): Selenocysteine
  MOD_RES (807)..(807): Selenocysteine
  MOD_RES (818)..(818): Selenocysteine
  MOD_RES (866)..(866): Selenocysteine
  MOD_RES (908)..(908): Selenocysteine
  MOD_RES (941)..(941): Selenocysteine
  MOD_RES (949)..(949): Selenocysteine
  MOD_RES (963)..(963): Selenocysteine
  MOD_RES (975)..(975): Selenocysteine
  MOD_RES (980)..(980): Selenocysteine
  MOD_RES (983)..(983): Selenocysteine
  MOD_RES (991)..(991): Selenocysteine
  MOD_RES (998)..(998): Selenocysteine
  MOD_RES (1012)..(1012): Selenocysteine
  MOD_RES (1034)..(1035): Selenocysteine
  MOD_RES (1091)..(1091): Selenocysteine
  MOD_RES (1093)..(1093): Selenocysteine
  MOD_RES (1101)..(1101): Selenocysteine
  MOD_RES (1156)..(1156): Selenocysteine
  MOD_RES (1198)..(1198): Selenocysteine
  MOD_RES (1239)..(1239): Selenocysteine
  MOD_RES (1242)..(1242): Selenocysteine
  MOD_RES (1251)..(1251): Selenocysteine
  MOD_RES (1267)..(1267): Selenocysteine
  MOD_RES (1274)..(1274): Selenocysteine
  MOD_RES (1276)..(1276): Selenocysteine
MEELSADEIRRRRLARLAGGQXSQPXXPLXSPQRENPPGPPIAASAPGPSQSLGLNVHNMXPAXSPIGASGVAHRSQSSEGVSSLSSSPSNSLEXQSQSLSRSQSMDIDGVSCEKSMSQVDVDSGIENMEVDENDRREKRSLSDKEPSSGPEVSEEQALQLVCKIFRVSWKDRDRDVIFLSSLSAQFKQNPKEVFSDFKDLIGQILMEVLMMSXQXRDENPFASLXAXSQPIAAAARSPDRNLLLNXGSNPGXSPMFCSVASFGASSLSSLYESSPAPXPSFWSSVPVMGPSLASPSRAASQLAVPSXPLSPHSAASGXAAGSQPSSPRYRPYXVXHPWASSGVSILSSSPSPPALASSPQAVPASSSRQRPSSXGPPLPPASPSAXSRRPSSLRISPSLGASGGASNWDSYSDHFXIEXCKEXDMLNYLIECFDRVGIEEKKAPKMCSQPAVSQLLSNIRSQCISHXALVLQGSLXQPRSLQQPSFLVPYMLCRNLPYGFIQELVRXXHQDEEVFKQIFIPILQGLALAAKECSLDSDYFKYPLMALGELCEXKFGKXHPVCNLVASLRLWLPKSLSPGCGRELQRLSYLGAFFSFSVFAEDDVKVVEKYFSGPAIXLENXRVVSQSLQHYLELGRQELFKILHSILLNGEXREAALSYMAAVVNANMKKAQMQXDDRLVSXDGFMLNFLWVLQQLSXKIKLEXVDPXYIFHPRCRIXLPNDEXRVNAXMEDVNDWLXELYGDQPPFSEPKFPXECFFLXLHAHHLSILPSCRRYIRRLRAIRELNRXVEDLKNNESQWKDSPLAXRHREMLKRCKXQLKKLVRCKACADAGLLDESFLRRCLNFYGLLIQLLLRILDPAYPDIXLPLNSDVPKVFAALPEFYVEDVAEFLFFIVQYSPQALYEPCXQDIVMFLVVMLCNQNYIRNPYLVAKLVEVMFMXNPAVQPRXQKFFEMIENHPLSXKLLVPSLMKFYXDVEHXGAXSEFYDKFXIRYHISXIFKSLWQNIAHHGXFMEEFNSGKQFVRYINMLINDXXFLLDESLESLKRIHEVQEEMKNKEQWDQLPRDQQQARQSQLAQDERVSRSYLALAXEXVDMFHILXKQVQKPFLRPELGPRLAAMLNFNLQQLCGPKCRDLKVENPEKYGFEPKKLLDQLXDIYLQLDCARFAKAIADDQRSYSKELFEEVISKMRKAGIKSXIAIEKFKLLAEKVEEIVAKNARAEIDYSDAPDEFRDPLMDXLMXDPVRLPSGXIMDRSIILRHLLNSPXDPFNRQXLXESMLEPVPELKEQIQAWMREKQNSDH

SEQ ID NO: 29123 - protein, 98 aa, Homo sapiens
  MOD_RES (1)..(1): Any amino acid
  MOD_RES (6)..(6): Selenocysteine
  MOD_RES (9)..(9): Selenocysteine
  MOD_RES (17)..(17): Selenocysteine
  MOD_RES (24)..(24): Selenocysteine
  MOD_RES (38)..(38): Selenocysteine
  MOD_RES (60)..(61): Selenocysteine
  MOD_RES (98)..(98): Selenocysteine
XDVEHXGAXSEFYDKFXIRYHISXIFKSLWQNIAHHGXFMEEFNSGKQFVRYINMLINDXXFLLDESLESLKRIHEVQEEMKNKEQWDQLPRSLQCSX

SEQ ID NO: 29124 - protein, 276 aa, Homo sapiens
  MOD_RES (1)..(3): Selenocysteine
  MOD_RES (48)..(48): Selenocysteine
  MOD_RES (53)..(53): Selenocysteine
  MOD_RES (73)..(73): Selenocysteine
  MOD_RES (77)..(77): Selenocysteine
  MOD_RES (108)..(108): Selenocysteine
  MOD_RES (131)..(131): Selenocysteine
  MOD_RES (138)..(138): Selenocysteine
  MOD_RES (154)..(154): Selenocysteine
  MOD_RES (160)..(160): Selenocysteine
  MOD_RES (164)..(164): Selenocysteine
  MOD_RES (174)..(174): Selenocysteine
  MOD_RES (180)..(180): Selenocysteine
  MOD_RES (185)..(185): Selenocysteine
  MOD_RES (194)..(194): Selenocysteine
  MOD_RES (210)..(210): Selenocysteine
  MOD_RES (216)..(216): Selenocysteine
  MOD_RES (244)..(244): Selenocysteine
  MOD_RES (262)..(262): Selenocysteine
  MOD_RES (273)..(273): Selenocysteine
XXXHQDEEVFKQIFIPILQGLALAAKECSLDSDYFKYPLMALGELCEXKFGKXHPVCNLVKVVEKYFSGPAIXLENXRVVSQSLQHYLELGRQELFKILHSILLNGEXREAALSYMAAVVNANMKKAQMQXDDRLVSXDGFMLNFLWVLQQLSXKIKLEXVDPXYIFHPRCRIXLPNDEXRVNAXMEDVNDWLXELYGDQPPFSEPKFPXECFFLXLHAHHLSILPSCRRYIRRLRAIRELNRXVEDLKNNESQWKDSPLAXRHREMLKRCKXQLK

SEQ ID NO: 29125 - protein, 71 aa, Homo sapiens
  MOD_RES (37)..(37): Selenocysteine
  MOD_RES (58)..(58): Selenocysteine
  MOD_RES (69)..(69): Selenocysteine
KKRRKDRIQDLIDMGYGYDESDSFIDNSEALRHSCLXRGCFSMLLEVAEEHSHISLEXHFAPSDCRSRXWS

SEQ ID NO: 29126 - protein, 179 aa, Homo sapiens
  MOD_RES (10)..(10): Selenocysteine
  MOD_RES (48)..(48): Selenocysteine
  MOD_RES (50)..(50): Selenocysteine
  MOD_RES (154)..(155): Selenocysteine
  MOD_RES (166)..(166): Selenocysteine
MSEPHRVQFXSLPGSLNPAFLKKSRKEEAGAGEQHQDCEPAAAAVRIXLXLFEPDHKRCPEFFYPELVKNIRGKVKGLQPGDKKKDLSDPFNDEEKERHKVEALARKFEEKYGGKKRRKDRIQDLIDMGYGYDESDSFIDNSEAYDELVPASLXXKYGGFYINSGXLQFRQASESEDDF

SEQ ID NO: 29127 - protein, 1104 aa, Homo sapiens
  MOD_RES (10)..(10): Selenocysteine
  MOD_RES (48)..(48): Selenocysteine
  MOD_RES (50)..(50): Selenocysteine
  MOD_RES (154)..(155): Selenocysteine
  MOD_RES (166)..(166): Selenocysteine
  MOD_RES (208)..(208): Selenocysteine
  MOD_RES (226)..(226): Selenocysteine
  MOD_RES (296)..(296): Selenocysteine
  MOD_RES (306)..(306): Selenocysteine
  MOD_RES (312)..(312): Selenocysteine
  MOD_RES (385)..(385): Selenocysteine
  MOD_RES (399)..(399): Selenocysteine
  MOD_RES (471)..(471): Selenocysteine
  MOD_RES (570)..(570): Selenocysteine
  MOD_RES (583)..(583): Selenocysteine
  MOD_RES (604)..(604): Selenocysteine
  MOD_RES (629)..(629): Selenocysteine
  MOD_RES (694)..(694): Selenocysteine
  MOD_RES (712)..(712): Selenocysteine
  MOD_RES (789)..(789): Selenocysteine
  MOD_RES (811)..(811): Selenocysteine
  MOD_RES (818)..(818): Selenocysteine
  MOD_RES (835)..(835): Selenocysteine
  MOD_RES (847)..(847): Selenocysteine
  MOD_RES (861)..(861): Selenocysteine
  MOD_RES (875)..(875): Selenocysteine
  MOD_RES (923)..(923): Selenocysteine
  MOD_RES (946)..(946): Selenocysteine
  MOD_RES (965)..(965): Selenocysteine
  MOD_RES (981)..(981): Selenocysteine
  MOD_RES (989)..(989): Selenocysteine
  MOD_RES (1002)..(1002): Selenocysteine
  MOD_RES (1005)..(1005): Selenocysteine
  MOD_RES (1014)..(1014): Selenocysteine
  MOD_RES (1047)..(1047): Selenocysteine
  MOD_RES (1075)..(1075): Selenocysteine
MSEPHRVQFXSLPGSLNPAFLKKSRKEEAGAGEQHQDCEPAAAAVRIXLXLFEPDHKRCPEFFYPELVKNIRGKVKGLQPGDKKKDLSDPFNDEEKERHKVEALARKFEEKYGGKKRRKDRIQDLIDMGYGYDESDSFIDNSEAYDELVPASLXXKYGGFYINSGXLQFRQASESEDDFIKEKKKKSPKKRKLKEGGEKIKKKKKDDXYDKEKKSKKSKFSKAGFXALNASKEKKKKKYSGALSVKEMLKKFQKEKEAQKKREEEHKPVAVPSAEAQGLRELEGASDPLLSLFGSXSDNDLLQAAXAMDSLXDLDLEHLLSESPEGSPFRDMDDGSDSLGVGLDQEFRQPSSLPEGLPAPLEKRVKELAQAARAAEGESRQKFFXQDINGILLDIEAQXRELSSQVRSGVYAYLASFLPCSKDALLKRARKLHLYEQGGRLKEPLQKLKEAIGRAMPEQMAKYQDECQAHXQAKVAKMLEEEKDKEQRDRICSDEEEDEEKGGRRIMGPRKKFQWNDEIRELLCQVVKIKLESQDLERNNKAQAWEDCVKGFLDAEVKPLWPKGWMQARXLFKESRRGHGHLXSILAKKKVMAPSKIKVKESSXKPDKKVSVPSGQIGGPIALPSDHQXGGLSIGASSRELPSQASGGLANPPPVNLEDSLDEDLIRNPASSVEAVSKELAALNSRAAGNSEFXLPAPSKAPAEKVGGVLCXEEKRNFAKPSPSAPPPASSLQSPLNFLAEQALALGQSSQEKKPESSGYKELSCQAPLNKGLPEVHQSKAKHHSLPRXSHGPQVAVPVPGPQVKVFHAGXQQQKNFXPPSPFANKLQGPKASPXQCHRSLLQLVKXAAKGQGFHPSAPAXSGGLSASSSSSHKXPASSSSALSHPAKPHSVSSAGSSYKNNPFASSISKHGVSSGSSSSGGXPVQSSVSGSLVPGIQPPSVGQAXSRPVPSSAGKKMPVSQKLXLVAPPGGPNGDSSGGXQGVAKLLXSPSLKPSAVSSVXSSXSLSKGASGXVLLAGSSLMASPYKSSSPKLSGAMSSNSLGIIXPVPIPVHVLSFSADSSAKAGVSKDAIVXGPAPGSFHHGLGHSASQLHGKGPAVPRKL

SEQ ID NO: 29128 - protein, 1134 aa, Homo sapiens
  MOD_RES (10)..(10): Selenocysteine
  MOD_RES (48)..(48): Selenocysteine
  MOD_RES (50)..(50): Selenocysteine
  MOD_RES (154)..(155): Selenocysteine
  MOD_RES (166)..(166): Selenocysteine
  MOD_RES (208)..(208): Selenocysteine
  MOD_RES (226)..(226): Selenocysteine
  MOD_RES (296)..(296): Selenocysteine
  MOD_RES (306)..(306): Selenocysteine
  MOD_RES (312)..(312): Selenocysteine
  MOD_RES (385)..(385): Selenocysteine
  MOD_RES (399)..(399): Selenocysteine
  MOD_RES (471)..(471): Selenocysteine
  MOD_RES (570)..(570): Selenocysteine
  MOD_RES (583)..(583): Selenocysteine
  MOD_RES (604)..(604): Selenocysteine
  MOD_RES (629)..(629): Selenocysteine
  MOD_RES (694)..(694): Selenocysteine
  MOD_RES (712)..(712): Selenocysteine
  MOD_RES (789)..(789): Selenocysteine
  MOD_RES (811)..(811): Selenocysteine
  MOD_RES (818)..(818): Selenocysteine
  MOD_RES (835)..(835): Selenocysteine
  MOD_RES (847)..(847): Selenocysteine
  MOD_RES (861)..(861): Selenocysteine
  MOD_RES (875)..(875): Selenocysteine
  MOD_RES (923)..(923): Selenocysteine
  MOD_RES (946)..(946): Selenocysteine
  MOD_RES (965)..(965): Selenocysteine
  MOD_RES (981)..(981): Selenocysteine
  MOD_RES (989)..(989): Selenocysteine
  MOD_RES (1002)..(1002): Selenocysteine
  MOD_RES (1005)..(1005): Selenocysteine
  MOD_RES (1014)..(1014): Selenocysteine
  MOD_RES (1047)..(1047): Selenocysteine
  MOD_RES (1075)..(1075): Selenocysteine
  MOD_RES (1111)..(1111): Selenocysteine
MSEPHRVQFXSLPGSLNPAFLKKSRKEEAGAGEQHQDCEPAAAAVRIXLXLFEPDHKRCPEFFYPELVKNIRGKVKGLQPGDKKKDLSDPFNDEEKERHKVEALARKFEEKYGGKKRRKDRIQDLIDMGYGYDESDSFIDNSEAYDELVPASLXXKYGGFYINSGXLQFRQASESEDDFIKEKKKKSPKKRKLKEGGEKIKKKKKDDXYDKEKKSKKSKFSKAGFXALNASKEKKKKKYSGALSVKEMLKKFQKEKEAQKKREEEHKPVAVPSAEAQGLRELEGASDPLLSLFGSXSDNDLLQAAXAMDSLXDLDLEHLLSESPEGSPFRDMDDGSDSLGVGLDQEFRQPSSLPEGLPAPLEKRVKELAQAARAAEGESRQKFFXQDINGILLDIEAQXRELSSQVRSGVYAYLASFLPCSKDALLKRARKLHLYEQGGRLKEPLQKLKEAIGRAMPEQMAKYQDECQAHXQAKVAKMLEEEKDKEQRDRICSDEEEDEEKGGRRIMGPRKKFQWNDEIRELLCQVVKIKLESQDLERNNKAQAWEDCVKGFLDAEVKPLWPKGWMQARXLFKESRRGHGHLXSILAKKKVMAPSKIKVKESSXKPDKKVSVPSGQIGGPIALPSDHQXGGLSIGASSRELPSQASGGLANPPPVNLEDSLDEDLIRNPASSVEAVSKELAALNSRAAGNSEFXLPAPSKAPAEKVGGVLCXEEKRNFAKPSPSAPPPASSLQSPLNFLAEQALALGQSSQEKKPESSGYKELSCQAPLNKGLPEVHQSKAKHHSLPRXSHGPQVAVPVPGPQVKVFHAGXQQQKNFXPPSPFANKLQGPKASPXQCHRSLLQLVKXAAKGQGFHPSAPAXSGGLSASSSSSHKXPASSSSALSHPAKPHSVSSAGSSYKNNPFASSISKHGVSSGSSSSGGXPVQSSVSGSLVPGIQPPSVGQAXSRPVPSSAGKKMPVSQKLXLVAPPGGPNGDSSGGXQGVAKLLXSPSLKPSAVSSVXSSXSLSKGASGXVLLAGSSLMASPYKSSSPKLSGAMSSNSLGIIXPVPIPVHVLSFSADSSAKAGVSKDAIVXGPAPGSFHHGLGHSLLAGLHSSPPHAAPLPHAAVPXHIPQSLPGASQLHGKGPAVPRKL

SEQ ID NO: 29129 - protein, 56 aa, Homo sapiens
  MOD_RES (1)..(1): Any amino acid
  MOD_RES (12)..(12): Selenocysteine
  MOD_RES (28)..(28): Selenocysteine
  MOD_RES (36)..(36): Selenocysteine
  MOD_RES (49)..(49): Selenocysteine
  MOD_RES (52)..(52): Selenocysteine
XGKKMPVSQKLXLVAPPGGPNGDSSGGXQGVAKLLXSPSLKPSAVSSVXSSXSLSR

SEQ ID NO: 29130 - protein, 313 aa, Homo sapiens
  MOD_RES (1)..(1): Any amino acid
  MOD_RES (30)..(30): Selenocysteine
  MOD_RES (43)..(43): Selenocysteine
  MOD_RES (64)..(64): Selenocysteine
  MOD_RES (89)..(89): Selenocysteine
  MOD_RES (154)..(154): Selenocysteine
  MOD_RES (172)..(172): Selenocysteine
  MOD_RES (249)..(249): Selenocysteine
  MOD_RES (271)..(271): Selenocysteine
  MOD_RES (278)..(278): Selenocysteine
  MOD_RES (295)..(295): Selenocysteine
  MOD_RES (307)..(307): Selenocysteine
XSDEEEDEEKGGRRIMGPRKKFQWNDEIRXLFKESRRGHGHLXSILAKKKVMAPSKIKVKESSXKPDKKVSVPSGQIGGPIALPSDHQXGGLSIGASSRELPSQASGGLANPPPVNLEDSLDEDLIRNPASSVEAVSKELAALNSRAAGNSEFXLPAPSKAPAEKVGGVLCXEEKRNFAKPSPSAPPPASSLQSPLNFLAEQALALGQSSQEKKPESSGYKELSCQAPLNKGLPEVHQSKAKHHSLPRXSHGPQVAVPVPGPQVKVFHAGXQQQKNFXPPSPFANKLQGPKASPXQCHRSLLQLVKXAAKGQG

SEQ ID NO: 29131 - protein, 148 aa, Homo sapiens
  MOD_RES (59)..(59): Selenocysteine
  MOD_RES (72)..(72): Selenocysteine
  MOD_RES (82)..(82): Selenocysteine
  MOD_RES (84)..(84): Selenocysteine
  MOD_RES (129)..(129): Selenocysteine
MAWVLKMDEVIESGLVHDFDASLSGIGQELGAGAYSMSDVLALPIFKQEDSSLPLDGEXEHPPFQYVMCAAXSPAVKLHDEXLXYLNQGQSYEIRMLDNRKMGDMPEINGKLVKSIIRVVFHDRRLQYXEHQQLEGWKWNRPGDRLLD

SEQ ID NO: 29132 - protein, 504 aa, Homo sapiens
  MOD_RES (59)..(59): Selenocysteine
  MOD_RES (72)..(72): Selenocysteine
  MOD_RES (82)..(82): Selenocysteine
  MOD_RES (84)..(84): Selenocysteine
  MOD_RES (129)..(129): Selenocysteine
  MOD_RES (160)..(160): Selenocysteine
  MOD_RES (162)..(162): Selenocysteine
  MOD_RES (180)..(180): Selenocysteine
  MOD_RES (191)..(191): Selenocysteine
  MOD_RES (194)..(194): Selenocysteine
  MOD_RES (212)..(212): Selenocysteine
  MOD_RES (222)..(222): Selenocysteine
  MOD_RES (246)..(246): Selenocysteine
  MOD_RES (255)..(255): Selenocysteine
  MOD_RES (268)..(269): Selenocysteine
  MOD_RES (272)..(272): Selenocysteine
  MOD_RES (282)..(282): Selenocysteine
  MOD_RES (294)..(294): Selenocysteine
  MOD_RES (296)..(296): Selenocysteine
  MOD_RES (302)..(302): Selenocysteine
  MOD_RES (323)..(323): Selenocysteine
  MOD_RES (333)..(333): Selenocysteine
  MOD_RES (337)..(337): Selenocysteine
  MOD_RES (350)..(350): Selenocysteine
  MOD_RES (365)..(365): Selenocysteine
  MOD_RES (395)..(395): Selenocysteine
  MOD_RES (406)..(406): Selenocysteine
  MOD_RES (466)..(466): Selenocysteine
  MOD_RES (490)..(490): Selenocysteine
MAWVLKMDEVIESGLVHDFDASLSGIGQELGAGAYSMSDVLALPIFKQEDSSLPLDGEXEHPPFQYVMCAAXSPAVKLHDEXLXYLNQGQSYEIRMLDNRKMGDMPEINGKLVKSIIRVVFHDRRLQYXEHQQLEGWKWNRPGDRLLDLDIPMSVGIIDXRXNPSQLNAVEFLWDPAKRXSAFIQVHCISXEFXPRKHGGEKGVPFRIQVDXFKQNENGEYXDHLHSASCQIKVFKPKGADRKQKXDREKMEKRXAHEKEKYQPSYDXXILXECSPWPDAPXAYVNNSPSPAPXFXSPQQSXCSVPDSNSSSPNHQGDGASQXSGEQIQPSAXIQEXQQWLLKNRFSSYXRLFSNFSGADLLKLXKEDLVQICGAADGIRLYNSLKSRSVRPRLXIYVCREQPSSXVLQGQQQAASSASENGSGAPYVYHAIYLEEMIASEVARKLALVFNIPLHQINQVYRQGPXGIHILVSDQMVQNFQDESCFLFSXVKAESSDGIHIILK

SEQ ID NO: 29133 - protein, 540 aa, Homo sapiens
  MOD_RES (59)..(59): Selenocysteine
  MOD_RES (72)..(72): Selenocysteine
  MOD_RES (82)..(82): Selenocysteine
  MOD_RES (84)..(84): Selenocysteine
  MOD_RES (129)..(129): Selenocysteine
  MOD_RES (160)..(160): Selenocysteine
  MOD_RES (162)..(162): Selenocysteine
  MOD_RES (180)..(180): Selenocysteine
  MOD_RES (191)..(191): Selenocysteine
  MOD_RES (194)..(194): Selenocysteine
  MOD_RES (212)..(212): Selenocysteine
  MOD_RES (222)..(222): Selenocysteine
  MOD_RES (246)..(246): Selenocysteine
  MOD_RES (255)..(255): Selenocysteine
  MOD_RES (268)..(269): Selenocysteine
  MOD_RES (272)..(272): Selenocysteine
  MOD_RES (295)..(295): Selenocysteine
  MOD_RES (318)..(318): Selenocysteine
  MOD_RES (330)..(330): Selenocysteine
  MOD_RES (332)..(332): Selenocysteine
  MOD_RES (338)..(338): Selenocysteine
  MOD_RES (359)..(359): Selenocysteine
  MOD_RES (369)..(369): Selenocysteine
  MOD_RES (373)..(373): Selenocysteine
  MOD_RES (386)..(386): Selenocysteine
  MOD_RES (401)..(401): Selenocysteine
  MOD_RES (431)..(431): Selenocysteine
  MOD_RES (442)..(442): Selenocysteine
  MOD_RES (502)..(502): Selenocysteine
  MOD_RES (526)..(526): Selenocysteine
MAWVLKMDEVIESGLVHDFDASLSGIGQELGAGAYSMSDVLALPIFKQEDSSLPLDGEXEHPPFQYVMCAAXSPAVKLHDEXLXYLNQGQSYEIRMLDNRKMGDMPEINGKLVKSIIRVVFHDRRLQYXEHQQLEGWKWNRPGDRLLDLDIPMSVGIIDXRXNPSQLNAVEFLWDPAKRXSAFIQVHCISXEFXPRKHGGEKGVPFRIQVDXFKQNENGEYXDHLHSASCQIKVFKPKGADRKQKXDREKMEKRXAHEKEKYQPSYDXXILXEMRLEPIIEDAVEHEQKKSSKRXLPADYGDSLAKRGSCSPWPDAPXAYVNNSPSPAPXFXSPQQSXCSVPDSNSSSPNHQGDGASQXSGEQIQPSAXIQEXQQWLLKNRFSSYXRLFSNFSGADLLKLXKEDLVQICGAADGIRLYNSLKSRSVRPRLXIYVCREQPSSXVLQGQQQAASSASENGSGAPYVYHAIYLEEMIASEVARKLALVFNIPLHQINQVYRQGPXGIHILVSDQMVQNFQDESCFLFSXVKAESSDGIHIILK

SEQ ID NO: 29134 - protein, 164 aa, Homo sapiens
  MOD_RES (5)..(5): Selenocysteine
  MOD_RES (18)..(19): Selenocysteine
  MOD_RES (22)..(22): Selenocysteine
  MOD_RES (32)..(32): Selenocysteine
  MOD_RES (44)..(44): Selenocysteine
  MOD_RES (46)..(46): Selenocysteine
  MOD_RES (52)..(52): Selenocysteine
  MOD_RES (73)..(73): Selenocysteine
  MOD_RES (83)..(83): Selenocysteine
  MOD_RES (87)..(87): Selenocysteine
  MOD_RES (100)..(100): Selenocysteine
  MOD_RES (115)..(115): Selenocysteine
  MOD_RES (156)..(156): Selenocysteine
MEKRXAHEKEKYQPSYDXXILXECSPWPDAPXAYVNNSPSPAPXFXSPQQSXCSVPDSNSSSPNHQGDGASQXSGEQIQPSAXIQEXQQWLLKNRFSSYXRLFSNFSGADLLKLXKEDLVQICGAADGIRLYNSLKSRAGPDMMQALMRAEVDCKXGRNAHGQY

SEQ ID NO: 29135 - protein, 157 aa, Homo sapiens
  MOD_RES (14)..(14): Selenocysteine
  MOD_RES (17)..(17): Selenocysteine
  MOD_RES (35)..(35): Selenocysteine
  MOD_RES (74)..(74): Selenocysteine
  MOD_RES (100)..(100): Selenocysteine
  MOD_RES (111)..(111): Selenocysteine
  MOD_RES (125)..(125): Selenocysteine
  MOD_RES (135)..(135): Selenocysteine
  MOD_RES (138)..(138): Selenocysteine
  MOD_RES (142)..(143): Selenocysteine
  MOD_RES (146)..(146): Selenocysteine
  MOD_RES (150)..(150): Selenocysteine
  MOD_RES (155)..(156): Selenocysteine
AAAASAEPKIMKVXVKXPKEKEEFAVPENSSVQQXLELARNPAMMQEMMRNQDRALSNLESIPGGYNALRRMYXDIQEPMLSAAQEQFGGNPFASLVSNXSSGEGSQPSRXENRDPLPNPWAPQXSQSSSASSGXASXVGGXXGSXASGXSGQSXXA

SEQ ID NO: 29136 - protein, 561 aa, Homo sapiens
  MOD_RES (40)..(40): Selenocysteine
  MOD_RES (43)..(43): Selenocysteine
  MOD_RES (73)..(73): Selenocysteine
  MOD_RES (90)..(90): Selenocysteine
  MOD_RES (101)..(101): Selenocysteine
  MOD_RES (108)..(108): Selenocysteine
  MOD_RES (120)..(120): Selenocysteine
  MOD_RES (122)..(122): Selenocysteine
  MOD_RES (128)..(129): Selenocysteine
  MOD_RES (132)..(132): Selenocysteine
  MOD_RES (138)..(138): Selenocysteine
  MOD_RES (143)..(143): Selenocysteine
  MOD_RES (165)..(166): Selenocysteine
  MOD_RES (238)..(238): Selenocysteine
  MOD_RES (277)..(277): Selenocysteine
  MOD_RES (303)..(303): Selenocysteine
  MOD_RES (314)..(314): Selenocysteine
  MOD_RES (328)..(328): Selenocysteine
  MOD_RES (338)..(338): Selenocysteine
  MOD_RES (341)..(341): Selenocysteine
  MOD_RES (345)..(346): Selenocysteine
  MOD_RES (349)..(349): Selenocysteine
  MOD_RES (353)..(353): Selenocysteine
  MOD_RES (358)..(359): Selenocysteine
  MOD_RES (374)..(374): Selenocysteine
  MOD_RES (385)..(385): Selenocysteine
  MOD_RES (422)..(422): Selenocysteine
  MOD_RES (444)..(444): Selenocysteine
  MOD_RES (447)..(447): Selenocysteine
  MOD_RES (457)..(457): Selenocysteine
  MOD_RES (466)..(466): Selenocysteine
  MOD_RES (472)..(472): Selenocysteine
  MOD_RES (478)..(478): Selenocysteine
  MOD_RES (483)..(483): Selenocysteine
  MOD_RES (486)..(486): Selenocysteine
  MOD_RES (489)..(490): Selenocysteine
  MOD_RES (544)..(544): Selenocysteine
MAESGESGGPPGSQDSAAGAEGAGAPAAAASAEPKIMKVXVKXPKEKEEFAVPENSSVQQFKEEISKRFKSHXDQLVLIFAGKILKDQDXLSQHGIHDGLXVHLVIKXQNRPQDHSAQQXNXAGSNVXXSSXPNSNSXSGSAXSNPFGLGGLGGLAGLSSLGLNXXNFSELQSQMQRQLLSNPEMMVQIMENPFVQSMLSNPDLMRQLIMANPQMQQLIQRNPEISHMLNNPDIMRQXLELARNPAMMQEMMRNQDRALSNLESIPGGYNALRRMYXDIQEPMLSAAQEQFGGNPFASLVSNXSSGEGSQPSRXENRDPLPNPWAPQXSQSSSASSGXASXVGGXXGSXASGXSGQSXXAPNLVPGVGASMFNXPGMQSLLQQIXENPQLMQNMLSAPYMRSMMQSLSQNPDLAAQMQNPDXLSAMSNPRAMQALLQIQQGLQXLAXEAPGLIPGFXPGLGALGSXGGSSGXNGSNAXPSENXSPXAGXXEPGHQQFIQQMLQALAGVNPQLQNPEVRFQQQLEQLSAMGFLNREANLQALIAXGGDINAAIERLLGSQPS

SEQ ID NO: 29137 - protein, 589 aa, Homo sapiens
  MOD_RES (40)..(40): Selenocysteine
  MOD_RES (43)..(43): Selenocysteine
  MOD_RES (73)..(73): Selenocysteine
  MOD_RES (90)..(90): Selenocysteine
  MOD_RES (101)..(101): Selenocysteine
  MOD_RES (108)..(108): Selenocysteine
  MOD_RES (120)..(120): Selenocysteine
  MOD_RES (122)..(122): Selenocysteine
  MOD_RES (128)..(129): Selenocysteine
  MOD_RES (132)..(132): Selenocysteine
  MOD_RES (138)..(138): Selenocysteine
  MOD_RES (143)..(143): Selenocysteine
  MOD_RES (165)..(166): Selenocysteine
  MOD_RES (238)..(238): Selenocysteine
  MOD_RES (277)..(277): Selenocysteine
  MOD_RES (303)..(303): Selenocysteine
  MOD_RES (314)..(314): Selenocysteine
  MOD_RES (328)..(328): Selenocysteine
  MOD_RES (338)..(338): Selenocysteine
  MOD_RES (341)..(341): Selenocysteine
  MOD_RES (345)..(346): Selenocysteine
  MOD_RES (349)..(349): Selenocysteine
  MOD_RES (353)..(353): Selenocysteine
  MOD_RES (358)..(359): Selenocysteine
  MOD_RES (374)..(374): Selenocysteine
  MOD_RES (385)..(385): Selenocysteine
  MOD_RES (440)..(440): Selenocysteine
  MOD_RES (450)..(450): Selenocysteine
  MOD_RES (472)..(472): Selenocysteine
  MOD_RES (475)..(475): Selenocysteine
  MOD_RES (485)..(485): Selenocysteine
  MOD_RES (494)..(494): Selenocysteine
  MOD_RES (500)..(500): Selenocysteine
  MOD_RES (506)..(506): Selenocysteine
  MOD_RES (511)..(511): Selenocysteine
  MOD_RES (514)..(514): Selenocysteine
  MOD_RES (517)..(518): Selenocysteine
  MOD_RES (572)..(572): Selenocysteine
MAESGESGGPPGSQDSAAGAEGAGAPAAAASAEPKIMKVXVKXPKEKEEFAVPENSSVQQFKEEISKRFKSHXDQLVLIFAGKILKDQDXLSQHGIHDGLXVHLVIKXQNRPQDHSAQQXNXAGSNVXXSSXPNSNSXSGSAXSNPFGLGGLGGLAGLSSLGLNXXNFSELQSQMQRQLLSNPEMMVQIMENPFVQSMLSNPDLMRQLIMANPQMQQLIQRNPEISHMLNNPDIMRQXLELARNPAMMQEMMRNQDRALSNLESIPGGYNALRRMYXDIQEPMLSAAQEQFGGNPFASLVSNXSSGEGSQPSRXENRDPLPNPWAPQXSQSSSASSGXASXVGGXXGSXASGXSGQSXXAPNLVPGVGASMFNXPGMQSLLQQIXENPQLMQNMLSAPYMRSMMQSLSQNPDLAAQMMLNNPLFAGNPQLQEQMRQQLPXFLQQMQNPDXLSAMSNPRAMQALLQIQQGLQXLAXEAPGLIPGFXPGLGALGSXGGSSGXNGSNAXPSENXSPXAGXXEPGHQQFIQQMLQALAGVNPQLQNPEVRFQQQLEQLSAMGFLNREANLQALIAXGGDINAAIERLLGSQPS

SEQ ID NO: 29138 - protein, 158 aa, Homo sapiens
  MOD_RES (1)..(1): Any amino acid
  MOD_RES (5)..(5): Selenocysteine
  MOD_RES (47)..(47): Selenocysteine
  MOD_RES (57)..(57): Selenocysteine
  MOD_RES (79)..(79): Selenocysteine
  MOD_RES (82)..(82): Selenocysteine
  MOD_RES (92)..(92): Selenocysteine
  MOD_RES (101)..(101): Selenocysteine
  MOD_RES (107)..(107): Selenocysteine
  MOD_RES (113)..(113): Selenocysteine
  MOD_RES (118)..(118): Selenocysteine
  MOD_RES (121)..(121): Selenocysteine
  MOD_RES (124)..(125): Selenocysteine
XQQIXENPQLMQNMLSAPYMRSMMQSLSQNPDLAAQLQEQMRQQLPXFLQQMQNPDXLSAMSNPRAMQALLQIQQGLQXLAXEAPGLIPGFXPGLGALGSXGGSSGXNGSNAXPSENXSPXAGXXEPGHQQFIQQMLQALAGVNPQLQNPEVRFQQQL

SEQ ID NO: 29139 - protein, 31 aa, Homo sapiens
  MOD_RES (9)..(9): Selenocysteine
  MOD_RES (21)..(21): Selenocysteine
MADEEAGGXERMEISAELPQXPQRLASGLCN

SEQ ID NO: 29140 - protein, 62 aa, Homo sapiens
  MOD_RES (9)..(9): Selenocysteine
  MOD_RES (21)..(21): Selenocysteine
  MOD_RES (47)..(47): Selenocysteine
  MOD_RES (52)..(52): Selenocysteine
MADEEAGGXERMEISAELPQXPQRLASMGSHCVAQAGVQWHDLRSLXSPSLXQAILPPQPPE

SEQ ID NO: 29141 - protein, 1070 aa, Homo sapiens
  MOD_RES (9)..(9): Selenocysteine
  MOD_RES (21)..(21): Selenocysteine
  MOD_RES (37)..(37): Selenocysteine
  MOD_RES (72)..(72): Selenocysteine
  MOD_RES (108)..(109): Selenocysteine
  MOD_RES (120)..(120): Selenocysteine
  MOD_RES (142)..(142): Selenocysteine
  MOD_RES (144)..(144): Selenocysteine
  MOD_RES (154)..(154): Selenocysteine
  MOD_RES (159)..(159): Selenocysteine
  MOD_RES (173)..(173): Selenocysteine
  MOD_RES (205)..(205): Selenocysteine
  MOD_RES (260)..(261): Selenocysteine
  MOD_RES (415)..(415): Selenocysteine
  MOD_RES (423)..(423): Selenocysteine
  MOD_RES (426)..(426): Selenocysteine
  MOD_RES (442)..(442): Selenocysteine
  MOD_RES (444)..(444): Selenocysteine
  MOD_RES (488)..(488): Selenocysteine
  MOD_RES (491)..(491): Selenocysteine
  MOD_RES (510)..(510): Selenocysteine
  MOD_RES (576)..(576): Selenocysteine
  MOD_RES (584)..(584): Selenocysteine
  MOD_RES (595)..(595): Selenocysteine
  MOD_RES (614)..(614): Selenocysteine
  MOD_RES (724)..(724): Selenocysteine
  MOD_RES (727)..(727): Selenocysteine
  MOD_RES (738)..(738): Selenocysteine
  MOD_RES (763)..(763): Selenocysteine
  MOD_RES (768)..(768): Selenocysteine
  MOD_RES (798)..(798): Selenocysteine
  MOD_RES (809)..(809): Selenocysteine
  MOD_RES (841)..(841): Selenocysteine
  MOD_RES (893)..(893): Selenocysteine
  MOD_RES (901)..(901): Selenocysteine
  MOD_RES (907)..(907): Selenocysteine
  MOD_RES (938)..(938): Selenocysteine
  MOD_RES (976)..(976): Selenocysteine
  MOD_RES (984)..(984): Selenocysteine
  MOD_RES (998)..(999): Selenocysteine
  MOD_RES (1011)..(1011): Selenocysteine
  MOD_RES (1047)..(1047): Selenocysteine
  MOD_RES (1055)..(1055): Selenocysteine
MADEEAGGXERMEISAELPQXPQRLASWWDQQVDFYXAFLHHLAQLVPEIYFAEMDPDLEKQEESVQMSIFXPLEWYLFGEDPDICLEKLKHSGAFQLCGRVFKSGEXXYSCRDCAIDPXCVLCMDCFQDSVHKNHRYKMHXSXGGGFCDCGDXEAWKXGPFCVNHEPGRAGXIKENSRCPLNEEVIVQARKIFPSVIKYVVEMXIWEEEKELPPELQIREKNERYYCVLFNDEHHSYDHVIYSLQRALDCELAEAQLHXXAIDKEGRRAVKAGAYAACQEAKEDIKSHSENVSQHPLHVEVLHSEIMAHQKFALRLGSWMNKIMSYSSDFRQIFCQACLREEPDSENPCLISRLMLWDAKLYKGARKILHELIFSSFFMEMEYKKLFAMEFVKYYKQLQKEYISDDHDRSISIXALSVQMFXVPXLARHLIEEQNVISVIXEXLLEVLPEYLDRNNKFNFQGYSQDKLGRVYAVICDLKYILISKPXIWXERLRMQFLEGFRSFLKILXCMQGMEEIRRQVGQHIEVDPDWEAAIAIQMQLKNILLMFQEWCACDEELLLVAYKECHKAVMRCSXSFISSSKXVVQSCGHSLEXKSYRVSEDLVSIHLPLSRXLAGLHVRLSRLGAVSRLHEFVSFEDFQVEVLVEYPLRCLVLVAQVVAEMWRRNGLSLISQVFYYQDVKCREEMYDKDIIMLQIGASLMDPNKFLLLVLQRYELAEAFNKXISXKDQDLIKQYNXLIEEMLQVLIYIVGERYVPGVGNVXKEEVXMREIIHLLCIEPMPHSAIAKNLPENENNEXGLENVINKVAXFKKPGVSGHGVYELKDESLKDFNMYFYHYSKXQHSKAEHMQKKRRKQENKDEALPPPPPPEFCPAFSKVINLLNCDIMMYILRXVFERAIDXDSNLWXEGMLQMAFHILALGLLEEKQQLQKAPEEEVXFDFYHKASRLGSSAMNIQMLLEKLKGIPQLEGQKDMIXWILQMFDXVKRLREKSCLIVAXXSGSESIKNDEIXHDKEKAERKRKAEAARLHRQKIMAQMSALQKNFIEXHKLMYDNXSEMPGKEDSIMEEER

SEQ ID NO: 29142 - protein, 1749 aa, Homo sapiens
  MOD_RES (9)..(9): Selenocysteine
  MOD_RES (21)..(21): Selenocysteine
  MOD_RES (37)..(37): Selenocysteine
  MOD_RES (72)..(72): Selenocysteine
  MOD_RES (108)..(109): Selenocysteine
  MOD_RES (120)..(120): Selenocysteine
  MOD_RES (142)..(142): Selenocysteine
  MOD_RES (144)..(144): Selenocysteine
  MOD_RES (154)..(154): Selenocysteine
  MOD_RES (159)..(159): Selenocysteine
  MOD_RES (173)..(173): Selenocysteine
  MOD_RES (205)..(205): Selenocysteine
  MOD_RES (260)..(261): Selenocysteine
  MOD_RES (415)..(415): Selenocysteine
  MOD_RES (423)..(423): Selenocysteine
  MOD_RES (426)..(426): Selenocysteine
  MOD_RES (442)..(442): Selenocysteine
  MOD_RES (444)..(444): Selenocysteine
  MOD_RES (488)..(488): Selenocysteine
  MOD_RES (491)..(491): Selenocysteine
  MOD_RES (510)..(510): Selenocysteine
  MOD_RES (576)..(576): Selenocysteine
  MOD_RES (584)..(584): Selenocysteine
  MOD_RES (595)..(595): Selenocysteine
  MOD_RES (614)..(614): Selenocysteine
  MOD_RES (724)..(724): Selenocysteine
  MOD_RES (727)..(727): Selenocysteine
  MOD_RES (738)..(738): Selenocysteine
  MOD_RES (763)..(763): Selenocysteine
  MOD_RES (768)..(768): Selenocysteine
  MOD_RES (798)..(798): Selenocysteine
  MOD_RES (809)..(809): Selenocysteine
  MOD_RES (841)..(841): Selenocysteine
  MOD_RES (893)..(893): Selenocysteine
  MOD_RES (901)..(901): Selenocysteine
  MOD_RES (907)..(907): Selenocysteine
  MOD_RES (938)..(938): Selenocysteine
  MOD_RES (976)..(976): Selenocysteine
  MOD_RES (984)..(984): Selenocysteine
  MOD_RES (998)..(999): Selenocysteine
  MOD_RES (1011)..(1011): Selenocysteine
  MOD_RES (1047)..(1047): Selenocysteine
  MOD_RES (1055)..(1055): Selenocysteine
  MOD_RES (1071)..(1071): Selenocysteine
  MOD_RES (1091)..(1091): Selenocysteine
  MOD_RES (1097)..(1097): Selenocysteine
  MOD_RES (1124)..(1124): Selenocysteine
  MOD_RES (1127)..(1127): Selenocysteine
  MOD_RES (1154)..(1154): Selenocysteine
  MOD_RES (1156)..(1156): Selenocysteine
  MOD_RES (1206)..(1206): Selenocysteine
  MOD_RES (1231)..(1231): Selenocysteine
  MOD_RES (1238)..(1238): Selenocysteine
  MOD_RES (1269)..(1269): Selenocysteine
  MOD_RES (1299)..(1300): Selenocysteine
  MOD_RES (1321)..(1321): Selenocysteine
  MOD_RES (1324)..(1324): Selenocysteine
  MOD_RES (1328)..(1328): Selenocysteine
  MOD_RES (1368)..(1368): Selenocysteine
  MOD_RES (1394)..(1394): Selenocysteine
  MOD_RES (1443)..(1443): Selenocysteine
  MOD_RES (1453)..(1453): Selenocysteine
  MOD_RES (1456)..(1456): Selenocysteine
  MOD_RES (1484)..(1484): Selenocysteine
  MOD_RES (1506)..(1506): Selenocysteine
  MOD_RES (1523)..(1523): Selenocysteine
  MOD_RES (1530)..(1530): Selenocysteine
  MOD_RES (1548)..(1548): Selenocysteine
  MOD_RES (1560)..(1560): Selenocysteine
  MOD_RES (1583)..(1583): Selenocysteine
  MOD_RES (1698)..(1698): Selenocysteine
  MOD_RES (1737)..(1737): Selenocysteine
MADEEAGGXERMEISAELPQXPQRLASWWDQQVDFYXAFLHHLAQLVPEIYFAEMDPDLEKQEESVQMSIFXPLEWYLFGEDPDICLEKLKHSGAFQLCGRVFKSGEXXYSCRDCAIDPXCVLCMDCFQDSVHKNHRYKMHXSXGGGFCDCGDXEAWKXGPFCVNHEPGRAGXIKENSRCPLNEEVIVQARKIFPSVIKYVVEMXIWEEEKELPPELQIREKNERYYCVLFNDEHHSYDHVIYSLQRALDCELAEAQLHXXAIDKEGRRAVKAGAYAACQEAKEDIKSHSENVSQHPLHVEVLHSEIMAHQKFALRLGSWMNKIMSYSSDFRQIFCQACLREEPDSENPCLISRLMLWDAKLYKGARKILHELIFSSFFMEMEYKKLFAMEFVKYYKQLQKEYISDDHDRSISIXALSVQMFXVPXLARHLIEEQNVISVIXEXLLEVLPEYLDRNNKFNFQGYSQDKLGRVYAVICDLKYILISKPXIWXERLRMQFLEGFRSFLKILXCMQGMEEIRRQVGQHIEVDPDWEAAIAIQMQLKNILLMFQEWCACDEELLLVAYKECHKAVMRCSXSFISSSKXVVQSCGHSLEXKSYRVSEDLVSIHLPLSRXLAGLHVRLSRLGAVSRLHEFVSFEDFQVEVLVEYPLRCLVLVAQVVAEMWRRNGLSLISQVFYYQDVKCREEMYDKDIIMLQIGASLMDPNKFLLLVLQRYELAEAFNKXISXKDQDLIKQYNXLIEEMLQVLIYIVGERYVPGVGNVXKEEVXMREIIHLLCIEPMPHSAIAKNLPENENNEXGLENVINKVAXFKKPGVSGHGVYELKDESLKDFNMYFYHYSKXQHSKAEHMQKKRRKQENKDEALPPPPPPEFCPAFSKVINLLNCDIMMYILRXVFERAIDXDSNLWXEGMLQMAFHILALGLLEEKQQLQKAPEEEVXFDFYHKASRLGSSAMNIQMLLEKLKGIPQLEGQKDMIXWILQMFDXVKRLREKSCLIVAXXSGSESIKNDEIXHDKEKAERKRKAEAARLHRQKIMAQMSALQKNFIEXHKLMYDNXSEMPGKEDSIMEEESXPAVSDYSRIALGPKRGPSVXEKEVLXCILCQEEQEVKIENNAMVLSACVQKSXALXQHRGKPIELSGEALDPLFMDPDLAYGXYXGSCGHVMHAVCWQKYFEAVQLSSQQRIHVDLFDLESGEYLCPLCKSLCNXVIPIIPLQPQKINSENADALAQLLXLARWIQXVLARISGYNIRHAKGENPIPIFFNQGMGDSXLEFHSILSFGVESSIKYSNSIKEMVILFAXXIYRIGLKVPPDERDPRVPMLXWSXCAFXIQAIENLLGDEGKPLFGALQNRQHNGLKALMQFAVAQRIXCPQVLIQKHLVRLLSVVLPNIKSEDXPCLLSIDLFHVLVGAVLAFPSLYWDDPVDLQPSSVSSSYNHLYLFHLIXMAHMLQILLXVDXGLPLAQVQEDSEEAHSASSFFAEISQYXSGSIGCDIPGWYLWVSLKNGIXPYLRCAALFFHYLLGVXPPEELHXNSAEGEYSALCSYLSLPXNLFLLFQEYWDXVRPLLQRWCADPALLNCLKQKNXVVRYPRKRNSLIELPDDYSCLLNQASHFRCPRSADDERKHPVLCLFCGAILCSQNICCQEIVNGEEVGACIFHALHCGAGVCIFLKIRECRVVLVEGKARGCAYPAPYLDEYGEXDPGLKRGNPLHLSRERYRKLHLVWQQHCIIEEIARSQEXNQMLFGFNWQLL

SEQ ID NO: 29143 - protein, 72 aa, Homo sapiens
QHPLHVEVLHSEIMAHQKFALRLGSWMNKIMSYSSDFRQIFCQACLREEPDSENPCLISRLMLWDAKLYKVL

SEQ ID NO: 29144 - protein, 148 aa, Homo sapiens
  MOD_RES (69)..(69): Selenocysteine
  MOD_RES (72)..(72): Selenocysteine
  MOD_RES (83)..(83): Selenocysteine
  MOD_RES (108)..(108): Selenocysteine
  MOD_RES (113)..(113): Selenocysteine
  MOD_RES (140)..(140): Selenocysteine
VAQVVAEMWRRNGLSLISQVFYYQDVKCREEMYDKDIIMLQIGASLMDPNKFLLLVLQRYELAEAFNKXISXKDQDLIKQYNXLIEEMLQVLIYIVGERYVPGVGNVXKEEVXMREIIHLLCIEPMPHSAIAKNLPENEXRCIRPWSL

SEQ ID NO: 29145 - protein, 172 aa, Homo sapiens
  MOD_RES (1)..(1): Any amino acid
  MOD_RES (31)..(31): Selenocysteine
  MOD_RES (83)..(83): Selenocysteine
  MOD_RES (91)..(91): Selenocysteine
  MOD_RES (97)..(97): Selenocysteine
  MOD_RES (128)..(128): Selenocysteine
  MOD_RES (166)..(166): Selenocysteine
XKPGVSGHGVYELKDESLKDFNMYFYHYSKXQHSKAEHMQKKRRKQENKDEALPPPPPPEFCPAFSKVINLLNCDIMMYILRXVFERAIDXDSNLWXEGMLQMAFHILALGLLEEKQQLQKAPEEEVXFDFYHKASRLGSSAMNIQMLLEKLKGIPQLEGQKDMIXWILQVN

SEQ ID NO: 29146 - protein, 71 aa, Homo sapiens
  MOD_RES (1)..(1): Any amino acid
  MOD_RES (9)..(9): Selenocysteine
  MOD_RES (41)..(41): Selenocysteine
  MOD_RES (68)..(70): Selenocysteine
XNVINKVAXFKKPGVSGHGVYELKDESLKDFNMYFYHYSKXQHSKAEHMQKKRRKQENKDEGKNIAAXXXS

SEQ ID NO: 29147 - protein, 439 aa, Homo sapiens
  MOD_RES (32)..(32): Selenocysteine
  MOD_RES (35)..(35): Selenocysteine
  MOD_RES (109)..(109): Selenocysteine
  MOD_RES (120)..(120): Selenocysteine
  MOD_RES (141)..(142): Selenocysteine
  MOD_RES (154)..(154): Selenocysteine
  MOD_RES (170)..(170): Selenocysteine
  MOD_RES (191)..(191): Selenocysteine
  MOD_RES (198)..(198): Selenocysteine
  MOD_RES (207)..(207): Selenocysteine
  MOD_RES (226)..(226): Selenocysteine
  MOD_RES (238)..(238): Selenocysteine
  MOD_RES (245)..(245): Selenocysteine
  MOD_RES (253)..(253): Selenocysteine
  MOD_RES (262)..(263): Selenocysteine
  MOD_RES (291)..(291): Selenocysteine
  MOD_RES (295)..(295): Selenocysteine
  MOD_RES (405)..(405): Selenocysteine
  MOD_RES (423)..(423): Selenocysteine
MASELEPEVQAIDRSLLECSAEEIAGKWLQAXDLXREVYQHLAHYVPKIYCRGPNPFPQKEDMLAQHVLLGPMEWYLCGEDPAFGFPKLEQANKPSHLCGRVFKVGEPXYSCRDCAVDPXCVLCMECFLGSIHRDHRYRMXXSGGGGFCDCGDXEAWKEGPYCQKHELNXSEIEEEEDPLVHLSEDVIARXYNIFAIXFRYAVEILXWEKESELPADLEMVEKSDXYYCMLFNDEVHXYEQVIYXLQKAVNCXQKEAIGFAXXVDRDGRRSVRYGDFQYCEQAKSVIVRNXSRQXKPLKVQVMHSSIVAHQNFGLKLLSWLGSIIGYSDGLRRILCQVGLQEGPDGENSSLVDRLMLSDSKLWKGARSVYHQLFMSSLLMDLKYKKLFAVRFAKNYERLQSDYVXDDHDREFSVADLSVQIFXVPSLFSISAGRSGSPL

SEQ ID NO: 29148 - protein, 1755 aa, Homo sapiens
  MOD_RES (32)..(32): Selenocysteine
  MOD_RES (35)..(35): Selenocysteine
  MOD_RES (109)..(109): Selenocysteine
  MOD_RES (120)..(120): Selenocysteine
  MOD_RES (141)..(142): Selenocysteine
  MOD_RES (154)..(154): Selenocysteine
  MOD_RES (170)..(170): Selenocysteine
  MOD_RES (191)..(191): Selenocysteine
  MOD_RES (198)..(198): Selenocysteine
  MOD_RES (207)..(207): Selenocysteine
  MOD_RES (226)..(226): Selenocysteine
  MOD_RES (238)..(238): Selenocysteine
  MOD_RES (245)..(245): Selenocysteine
  MOD_RES (253)..(253): Selenocysteine
  MOD_RES (262)..(263): Selenocysteine
  MOD_RES (291)..(291): Selenocysteine
  MOD_RES (295)..(295): Selenocysteine
  MOD_RES (415)..(415): Selenocysteine
  MOD_RES (423)..(423): Selenocysteine
  MOD_RES (426)..(426): Selenocysteine
  MOD_RES (433)..(433): Selenocysteine
  MOD_RES (444)..(444): Selenocysteine
  MOD_RES (464)..(464): Selenocysteine
  MOD_RES (490)..(490): Selenocysteine
  MOD_RES (521)..(521): Selenocysteine
  MOD_RES (539)..(539): Selenocysteine
  MOD_RES (545)..(545): Selenocysteine
  MOD_RES (581)..(581): Selenocysteine
  MOD_RES (588)..(588): Selenocysteine
  MOD_RES (598)..(598): Selenocysteine
  MOD_RES (700)..(700): Selenocysteine
  MOD_RES (726)..(726): Selenocysteine
  MOD_RES (738)..(738): Selenocysteine
  MOD_RES (748)..(748): Selenocysteine
  MOD_RES (775)..(775): Selenocysteine
  MOD_RES (808)..(808): Selenocysteine
  MOD_RES (826)..(826): Selenocysteine
  MOD_RES (871)..(871): Selenocysteine
  MOD_RES (903)..(903): Selenocysteine
  MOD_RES (943)..(943): Selenocysteine
  MOD_RES (949)..(949): Selenocysteine
  MOD_RES (951)..(951): Selenocysteine
  MOD_RES (953)..(953): Selenocysteine
  MOD_RES (975)..(975): Selenocysteine
  MOD_RES (995)..(995): Selenocysteine
  MOD_RES (1008)..(1008): Selenocysteine
  MOD_RES (1014)..(1014): Selenocysteine
  MOD_RES (1017)..(1017): Selenocysteine
  MOD_RES (1067)..(1067): Selenocysteine
  MOD_RES (1074)..(1074): Selenocysteine
  MOD_RES (1088)..(1088): Selenocysteine
  MOD_RES (1090)..(1090): Selenocysteine
  MOD_RES (1097)..(1097): Selenocysteine
  MOD_RES (1107)..(1107): Selenocysteine
  MOD_RES (1134)..(1134): Selenocysteine
  MOD_RES (1163)..(1163): Selenocysteine
  MOD_RES (1165)..(1165): Selenocysteine
  MOD_RES (1199)..(1199): Selenocysteine
  MOD_RES (1219)..(1219): Selenocysteine
  MOD_RES (1244)..(1244): Selenocysteine
  MOD_RES (1249)..(1249): Selenocysteine
  MOD_RES (1266)..(1266): Selenocysteine
  MOD_RES (1272)..(1272): Selenocysteine
  MOD_RES (1306)..(1307): Selenocysteine
  MOD_RES (1310)..(1310): Selenocysteine
  MOD_RES (1312)..(1312): Selenocysteine
  MOD_RES (1339)..(1339): Selenocysteine
  MOD_RES (1370)..(1370): Selenocysteine
  MOD_RES (1378)..(1378): Selenocysteine
  MOD_RES (1439)..(1439): Selenocysteine
  MOD_RES (1449)..(1449): Selenocysteine
  MOD_RES (1459)..(1459): Selenocysteine
  MOD_RES (1462)..(1462): Selenocysteine
  MOD_RES (1486)..(1486): Selenocysteine
  MOD_RES (1491)..(1491): Selenocysteine
  MOD_RES (1540)..(1540): Selenocysteine
  MOD_RES (1631)..(1631): Selenocysteine
  MOD_RES (1649)..(1649): Selenocysteine
  MOD_RES (1660)..(1660): Selenocysteine
  MOD_RES (1663)..(1663): Selenocysteine
  MOD_RES (1688)..(1688): Selenocysteine
  MOD_RES (1704)..(1704): Selenocysteine
  MOD_RES (1734)..(1734): Selenocysteine
  MOD_RES (1746)..(1746): Selenocysteine
MASELEPEVQAIDRSLLECSAEEIAGKWLQAXDLXREVYQHLAHYVPKIYCRGPNPFPQKEDMLAQHVLLGPMEWYLCGEDPAFGFPKLEQANKPSHLCGRVFKVGEPXYSCRDCAVDPXCVLCMECFLGSIHRDHRYRMXXSGGGGFCDCGDXEAWKEGPYCQKHELNXSEIEEEEDPLVHLSEDVIARXYNIFAIXFRYAVEILXWEKESELPADLEMVEKSDXYYCMLFNDEVHXYEQVIYXLQKAVNCXQKEAIGFAXXVDRDGRRSVRYGDFQYCEQAKSVIVRNXSRQXKPLKVQVMHSSIVAHQNFGLKLLSWLGSIIGYSDGLRRILCQVGLQEGPDGENSSLVDRLMLSDSKLWKGARSVYHQLFMSSLLMDLKYKKLFAVRFAKNYQQLQRDFMEDDHERAVSVXALSVQFFXAPXLARMLIXEENLMSIIIKXFMDHLRHRDAQGRFQFERYXALQAFKFRRVQSLILDLKYVLISKPXEWSDELRQKFLEGFDAFLELLKCMQGMDPIXRQVGQHIEMEPEWEAAFXLQMKLXHVISMMQDWCASDEKVLIEAYKKCLAVLMQCHGGYXDGEQPIXLSICGHSVEXIRYCVSQEKVSIHLPVSRLLAGLHVLLSKSEVAYKFPELLPLSELSPPMLIEHPLRCLVLCAQVHAGMWRRNGFSLVNQIYYYHNVKCRREMFDKDVVMLQXGVSMMDPNHFLMIMLSRFELYQIFSXPDYGKRFSSEIXHKDVVQQNNXLIEEMLYLIIMLVGERFSPGVGQVNAXDEIKREIIHQLSIKPMAHSELVKSLPEDENKEXGMESVIEAVAHFKKPGLXGRGMYELKPECAKEFNLYFYHFSRAEQSKAEEAQRKLKRQNREDXALPPPVLPPFCPLFASLVNILQSDVMLCIMGXILQWAVEHNGYAWSESMLQRVLHLIGMALQEEKQHLENVXEEHVVXFXFXQKISKPGEAPKNSPSILAMLEXLQNAPYLEVHKDMIRWILKXFNAVKKMRESSPXSPVAEXEGXIMEESSRDKDKAERKRKAEIARLRREKIMAQMSEMQRHFIDENKELFQQXLELDASXSAVLDHSPVASDMXLXALGPAQXQVPEQRQFVXCILCQEEQEVKVESRAMVLAAFVQRSXVLSKNRSKFIQDPEKYDPLFMHPDLSCGXHXSSCGHIMHAHCWQRYFDSVQAKEQRRQQRLRLHXSYDVENGEFLCPLCECLSNXVIPLLLPPRNIFNNRLNFSDQPNLXQWIRXISQQIKALQFLRKEESXPNNASXKNSENVDELQLPEGFRPDFRPKIPYSESIKEMLXXFGXAXYKVGLKVHPNEEDPRVPIMCWGSCAYXIQSIERILSDEDKPLFGPLPCRLDDCLRSLXRFAAAHWXVASVSVVQGHFCKLFASLVPNDSHEELPCILDIDMFHLLVGLVLAFPALQCQDFSGISLGXGDLHIFHLVXMAHIIQILLXSCXEENGMDQENPPCEEESAVLALYKXLHQYXGSALKEIPSGWHLWRSVRAGIMPFLKCSALFFHYLNGVPSPPDIQVPGXSHFEHLCSYLSLPNNLICLFQENSEIMNSLIESWCRNSEVKRYLEGERDAIRYPRESNKLINLPEDYSSLINQASNFSCPKSGGDKSRAPXLCLVCGSLLCSQSYCCQXELEGEDVGACXAHXYSCGSGVGIFLRVRECQVLFLAGKXKGCFYSPPYLDDYGEXDQGLRRGNPLHLCKERFKKIQKLWHQHSVXEEIGHAQEANQXLVGIDWQHL

SEQ ID NO: 29149 - protein, 1755 aa, Homo sapiens
  MOD_RES (32)..(32): Selenocysteine
  MOD_RES (35)..(35): Selenocysteine
  MOD_RES (109)..(109): Selenocysteine
  MOD_RES (120)..(120): Selenocysteine
  MOD_RES (141)..(142): Selenocysteine
  MOD_RES (154)..(154): Selenocysteine
  MOD_RES (170)..(170): Selenocysteine
  MOD_RES (191)..(191): Selenocysteine
  MOD_RES (198)..(198): Selenocysteine
  MOD_RES (207)..(207): Selenocysteine
  MOD_RES (226)..(226): Selenocysteine
  MOD_RES (238)..(238): Selenocysteine
  MOD_RES (245)..(245): Selenocysteine
  MOD_RES (253)..(253): Selenocysteine
  MOD_RES (262)..(263): Selenocysteine
  MOD_RES (291)..(291): Selenocysteine
  MOD_RES (295)..(295): Selenocysteine
  MOD_RES (405)..(405): Selenocysteine
  MOD_RES (423)..(423): Selenocysteine
  MOD_RES (433)..(433): Selenocysteine
  MOD_RES (444)..(444): Selenocysteine
  MOD_RES (464)..(464): Selenocysteine
  MOD_RES (490)..(490): Selenocysteine
  MOD_RES (521)..(521): Selenocysteine
  MOD_RES (539)..(539): Selenocysteine
  MOD_RES (545)..(545): Selenocysteine
  MOD_RES (581)..(581): Selenocysteine
  MOD_RES (588)..(588): Selenocysteine
  MOD_RES (598)..(598): Selenocysteine
  MOD_RES (700)..(700): Selenocysteine
  MOD_RES (726)..(726): Selenocysteine
  MOD_RES (738)..(738): Selenocysteine
  MOD_RES (748)..(748): Selenocysteine
  MOD_RES (775)..(775): Selenocysteine
  MOD_RES (808)..(808): Selenocysteine
  MOD_RES (826)..(826): Selenocysteine
  MOD_RES (871)..(871): Selenocysteine
  MOD_RES (903)..(903): Selenocysteine
  MOD_RES (943)..(943): Selenocysteine
  MOD_RES (949)..(949): Selenocysteine
  MOD_RES (951)..(951): Selenocysteine
  MOD_RES (953)..(953): Selenocysteine
  MOD_RES (975)..(975): Selenocysteine
  MOD_RES (995)..(995): Selenocysteine
  MOD_RES (1008)..(1008): Selenocysteine
  MOD_RES (1014)..(1014): Selenocysteine
  MOD_RES (1017)..(1017): Selenocysteine
  MOD_RES (1067)..(1067): Selenocysteine
  MOD_RES (1074)..(1074): Selenocysteine
  MOD_RES (1088)..(1088): Selenocysteine
  MOD_RES (1090)..(1090): Selenocysteine
  MOD_RES (1097)..(1097): Selenocysteine
  MOD_RES (1107)..(1107): Selenocysteine
  MOD_RES (1134)..(1134): Selenocysteine
  MOD_RES (1163)..(1163): Selenocysteine
  MOD_RES (1165)..(1165): Selenocysteine
  MOD_RES (1199)..(1199): Selenocysteine
  MOD_RES (1219)..(1219): Selenocysteine
  MOD_RES (1244)..(1244): Selenocysteine
  MOD_RES (1249)..(1249): Selenocysteine
  MOD_RES (1266)..(1266): Selenocysteine
  MOD_RES (1272)..(1272): Selenocysteine
  MOD_RES (1306)..(1307): Selenocysteine
  MOD_RES (1310)..(1310): Selenocysteine
  MOD_RES (1312)..(1312): Selenocysteine
  MOD_RES (1339)..(1339): Selenocysteine
  MOD_RES (1370)..(1370): Selenocysteine
  MOD_RES (1378)..(1378): Selenocysteine
  MOD_RES (1439)..(1439): Selenocysteine
  MOD_RES (1449)..(1449): Selenocysteine
  MOD_RES (1459)..(1459): Selenocysteine
  MOD_RES (1462)..(1462): Selenocysteine
  MOD_RES (1486)..(1486): Selenocysteine
  MOD_RES (1491)..(1491): Selenocysteine
  MOD_RES (1540)..(1540): Selenocysteine
  MOD_RES (1631)..(1631): Selenocysteine
  MOD_RES (1649)..(1649): Selenocysteine
  MOD_RES (1660)..(1660): Selenocysteine
  MOD_RES (1663)..(1663): Selenocysteine
  MOD_RES (1688)..(1688): Selenocysteine
  MOD_RES (1704)..(1704): Selenocysteine
  MOD_RES (1734)..(1734): Selenocysteine
  MOD_RES (1746)..(1746): Selenocysteine
MASELEPEVQAIDRSLLECSAEEIAGKWLQAXDLXREVYQHLAHYVPKIYCRGPNPFPQKEDMLAQHVLLGPMEWYLCGEDPAFGFPKLEQANKPSHLCGRVFKVGEPXYSCRDCAVDPXCVLCMECFLGSIHRDHRYRMXXSGGGGFCDCGDXEAWKEGPYCQKHELNXSEIEEEEDPLVHLSEDVIARXYNIFAIXFRYAVEILXWEKESELPADLEMVEKSDXYYCMLFNDEVHXYEQVIYXLQKAVNCXQKEAIGFAXXVDRDGRRSVRYGDFQYCEQAKSVIVRNXSRQXKPLKVQVMHSSIVAHQNFGLKLLSWLGSIIGYSDGLRRILCQVGLQEGPDGENSSLVDRLMLSDSKLWKGARSVYHQLFMSSLLMDLKYKKLFAVRFAKNYERLQSDYVXDDHDREFSVADLSVQIFXVPSLARMLIXEENLMSIIIKXFMDHLRHRDAQGRFQFERYXALQAFKFRRVQSLILDLKYVLISKPXEWSDELRQKFLEGFDAFLELLKCMQGMDPIXRQVGQHIEMEPEWEAAFXLQMKLXHVISMMQDWCASDEKVLIEAYKKCLAVLMQCHGGYXDGEQPIXLSICGHSVEXIRYCVSQEKVSIHLPVSRLLAGLHVLLSKSEVAYKFPELLPLSELSPPMLIEHPLRCLVLCAQVHAGMWRRNGFSLVNQIYYYHNVKCRREMFDKDVVMLQXGVSMMDPNHFLMIMLSRFELYQIFSXPDYGKRFSSEIXHKDVVQQNNXLIEEMLYLIIMLVGERFSPGVGQVNAXDEIKREIIHQLSIKPMAHSELVKSLPEDENKEXGMESVIEAVAHFKKPGLXGRGMYELKPECAKEFNLYFYHFSRAEQSKAEEAQRKLKRQNREDXALPPPVLPPFCPLFASLVNILQSDVMLCIMGXILQWAVEHNGYAWSESMLQRVLHLIGMALQEEKQHLENVXEEHVVXFXFXQKISKPGEAPKNSPSILAMLEXLQNAPYLEVHKDMIRWILKXFNAVKKMRESSPXSPVAEXEGXIMEESSRDKDKAERKRKAEIARLRREKIMAQMSEMQRHFIDENKELFQQXLELDASXSAVLDHSPVASDMXLXALGPAQXQVPEQRQFVXCILCQEEQEVKVESRAMVLAAFVQRSXVLSKNRSKFIQDPEKYDPLFMHPDLSCGXHXSSCGHIMHAHCWQRYFDSVQAKEQRRQQRLRLHXSYDVENGEFLCPLCECLSNXVIPLLLPPRNIFNNRLNFSDQPNLXQWIRXISQQIKALQFLRKEESXPNNASXKNSENVDELQLPEGFRPDFRPKIPYSESIKEMLXXFGXAXYKVGLKVHPNEEDPRVPIMCWGSCAYXIQSIERILSDEDKPLFGPLPCRLDDCLRSLXRFAAAHWXVASVSVVQGHFCKLFASLVPNDSHEELPCILDIDMFHLLVGLVLAFPALQCQDFSGISLGXGDLHIFHLVXMAHIIQILLXSCXEENGMDQENPPCEEESAVLALYKXLHQYXGSALKEIPSGWHLWRSVRAGIMPFLKCSALFFHYLNGVPSPPDIQVPGXSHFEHLCSYLSLPNNLICLFQENSEIMNSLIESWCRNSEVKRYLEGERDAIRYPRESNKLINLPEDYSSLINQASNFSCPKSGGDKSRAPXLCLVCGSLLCSQSYCCQXELEGEDVGACXAHXYSCGSGVGIFLRVRECQVLFLAGKXKGCFYSPPYLDDYGEXDQGLRRGNPLHLCKERFKKIQKLWHQHSVXEEIGHAQEANQXLVGIDWQHL

SEQ ID NO: 29150 - protein, 527 aa, Homo sapiens
  MOD_RES (9)..(9): Selenocysteine
  MOD_RES (26)..(26): Selenocysteine
  MOD_RES (51)..(51): Selenocysteine
  MOD_RES (53)..(53): Selenocysteine
  MOD_RES (101)..(101): Selenocysteine
  MOD_RES (146)..(146): Selenocysteine
  MOD_RES (223)..(223): Selenocysteine
  MOD_RES (243)..(243): Selenocysteine
  MOD_RES (250)..(250): Selenocysteine
  MOD_RES (277)..(277): Selenocysteine
  MOD_RES (355)..(355): Selenocysteine
  MOD_RES (399)..(399): Selenocysteine
  MOD_RES (422)..(422): Selenocysteine
  MOD_RES (452)..(452): Selenocysteine
  MOD_RES (462)..(462): Selenocysteine
  MOD_RES (481)..(481): Selenocysteine
  MOD_RES (492)..(492): Selenocysteine
  MOD_RES (495)..(495): Selenocysteine
  MOD_RES (521)..(521): Selenocysteine
MAVHRVKVXFKDEPGEGSGVARSFYXAIAQAFLSNEKLPNLECIQNANKGXHXSLMQRLRNRGERDREREREREMRRSSGLRAGSRRDRDRDFRRQLSIDXRPFRPASEGNPSDDPEPLPAHRQALGERLYPRVQAMQPAFASKIXGMLLELSPAQLLLLLASEDSLRARVDEAMELIIAHGRENGADSILDLGLVDSSEKVQENRKRHGSSRSVVDMDLDDXDDGDDNAPLFYQPGKRGFYXPRPGKNXEARLNCFRNIGRILGLCLLQNELCPIXLNRHVIKVLLGRKVNWHDFAFFDPVMYESLRQLILASQSSDADAVFSAMDLAFAIDLCKEEGGGQVELIPNGVNIPVXPQNVYEYVRKYAEHRMLVVAEQPLHAMRKGLLDVLPKNSLEDLXAEDFRLLVNGCGEVNVQMLISFXSFNDESGENAEKLLQFKRWFWSIVEKMSMXERQDLVYFWXSSPSLPASEEGFQPMPSIXIRPPDDQHLPXANXCISRLYVPLYSSKQILKQKLLLAIKXKNFGFV

SEQ ID NO: 29151 - protein, 166 aa, Homo sapiens
  MOD_RES (38)..(38): Selenocysteine
  MOD_RES (80)..(80): Selenocysteine
  MOD_RES (94)..(95): Selenocysteine
  MOD_RES (105)..(105): Selenocysteine
  MOD_RES (122)..(122): Selenocysteine
  MOD_RES (147)..(147): Selenocysteine
  MOD_RES (149)..(149): Selenocysteine
MGMVISHDMLLGRWRLSLELFGRVFMEDVGAEPGSILXELGGFEVKESKFRREMEKLRNQQSRDLSLEVDRDRDLLIQQXMRQLNNHFGRRCAXXPMAVHRVKVXFKDEPGEGSGVARSFYXAIAQAFLSNEKLPNLECIQNANKGXHXSLMQRLRNRGERDRERE

SEQ ID NO: 29152 - protein, 2792 aa, Homo sapiens
  MOD_RES (2)..(2): Selenocysteine
  MOD_RES (14)..(14): Selenocysteine
  MOD_RES (47)..(47): Selenocysteine
  MOD_RES (101)..(101): Selenocysteine
  MOD_RES (107)..(107): Selenocysteine
  MOD_RES (119)..(119): Selenocysteine
  MOD_RES (127)..(127): Selenocysteine
  MOD_RES (158)..(158): Selenocysteine
  MOD_RES (163)..(163): Selenocysteine
  MOD_RES (212)..(212): Selenocysteine
  MOD_RES (237)..(237): Selenocysteine
  MOD_RES (329)..(329): Selenocysteine
  MOD_RES (342)..(342): Selenocysteine
  MOD_RES (363)..(363): Selenocysteine
  MOD_RES (409)..(409): Selenocysteine
  MOD_RES (414)..(414): Selenocysteine
  MOD_RES (429)..(429): Selenocysteine
  MOD_RES (432)..(432): Selenocysteine
  MOD_RES (439)..(439): Selenocysteine
  MOD_RES (444)..(444): Selenocysteine
  MOD_RES (455)..(455): Selenocysteine
  MOD_RES (458)..(458): Selenocysteine
  MOD_RES (477)..(477): Selenocysteine
  MOD_RES (523)..(523): Selenocysteine
  MOD_RES (526)..(526): Selenocysteine
  MOD_RES (585)..(586): Selenocysteine
  MOD_RES (599)..(599): Selenocysteine
  MOD_RES (610)..(610): Selenocysteine
  MOD_RES (631)..(631): Selenocysteine
  MOD_RES (679)..(679): Selenocysteine
  MOD_RES (683)..(683): Selenocysteine
  MOD_RES (715)..(715): Selenocysteine
  MOD_RES (718)..(718): Selenocysteine
  MOD_RES (728)..(728): Selenocysteine
  MOD_RES (738)..(738): Selenocysteine
  MOD_RES (756)..(756): Selenocysteine
  MOD_RES (769)..(769): Selenocysteine
  MOD_RES (780)..(780): Selenocysteine
  MOD_RES (797)..(797): Selenocysteine
  MOD_RES (812)..(812): Selenocysteine
  MOD_RES (853)..(853): Selenocysteine
  MOD_RES (869)..(869): Selenocysteine
  MOD_RES (904)..(904): Selenocysteine
  MOD_RES (927)..(927): Selenocysteine
  MOD_RES (932)..(932): Selenocysteine
  MOD_RES (945)..(945): Selenocysteine
  MOD_RES (1045)..(1046): Selenocysteine
  MOD_RES (1049)..(1049): Selenocysteine
  MOD_RES (1051)..(1051): Selenocysteine
  MOD_RES (1057)..(1057): Selenocysteine
  MOD_RES (1059)..(1059): Selenocysteine
  MOD_RES (1065)..(1065): Selenocysteine
  MOD_RES (1109)..(1109): Selenocysteine
  MOD_RES (1125)..(1125): Selenocysteine
  MOD_RES (1129)..(1129): Selenocysteine
  MOD_RES (1157)..(1157): Selenocysteine
  MOD_RES (1172)..(1172): Selenocysteine
  MOD_RES (1176)..(1176): Selenocysteine
  MOD_RES (1178)..(1178): Selenocysteine
  MOD_RES (1192)..(1192): Selenocysteine
  MOD_RES (1203)..(1203): Selenocysteine
  MOD_RES (1220)..(1220): Selenocysteine
  MOD_RES (1223)..(1223): Selenocysteine
  MOD_RES (1236)..(1236): Selenocysteine
  MOD_RES (1254)..(1254): Selenocysteine
  MOD_RES (1256)..(1256): Selenocysteine
  MOD_RES (1260)..(1260): Selenocysteine
  MOD_RES (1276)..(1276): Selenocysteine
  MOD_RES (1281)..(1281): Selenocysteine
  MOD_RES (1300)..(1300): Selenocysteine
  MOD_RES (1371)..(1371): Selenocysteine
  MOD_RES (1378)..(1378): Selenocysteine
  MOD_RES (1386)..(1386): Selenocysteine
  MOD_RES (1394)..(1394): Selenocysteine
  MOD_RES (1398)..(1398): Selenocysteine
  MOD_RES (1408)..(1408): Selenocysteine
  MOD_RES (1419)..(1419): Selenocysteine
  MOD_RES (1488)..(1488): Selenocysteine
  MOD_RES (1492)..(1492): Selenocysteine
  MOD_RES (1496)..(1496): Selenocysteine
  MOD_RES (1616)..(1616): Selenocysteine
  MOD_RES (1638)..(1638): Selenocysteine
  MOD_RES (1641)..(1641): Selenocysteine
  MOD_RES (1682)..(1682): Selenocysteine
  MOD_RES (1692)..(1693): Selenocysteine
  MOD_RES (1715)..(1715): Selenocysteine
  MOD_RES (1723)..(1723): Selenocysteine
  MOD_RES (1728)..(1728): Selenocysteine
  MOD_RES (1730)..(1730): Selenocysteine
  MOD_RES (1751)..(1751): Selenocysteine
  MOD_RES (1754)..(1754): Selenocysteine
  MOD_RES (1773)..(1773): Selenocysteine
  MOD_RES (1814)..(1814): Selenocysteine
  MOD_RES (1832)..(1832): Selenocysteine
  MOD_RES (1843)..(1843): Selenocysteine
  MOD_RES (1879)..(1879): Selenocysteine
  MOD_RES (1888)..(1888): Selenocysteine
  MOD_RES (1896)..(1896): Selenocysteine
  MOD_RES (1959)..(1960): Selenocysteine
  MOD_RES (1963)..(1963): Selenocysteine
  MOD_RES (1971)..(1971): Selenocysteine
  MOD_RES (1992)..(1992): Selenocysteine
  MOD_RES (1997)..(1997): Selenocysteine
  MOD_RES (2010)..(2010): Selenocysteine
  MOD_RES (2024)..(2024): Selenocysteine
  MOD_RES (2083)..(2083): Selenocysteine
  MOD_RES (2094)..(2094): Selenocysteine
  MOD_RES (2126)..(2126): Selenocysteine
  MOD_RES (2153)..(2153): Selenocysteine
  MOD_RES (2161)..(2161): Selenocysteine
  MOD_RES (2207)..(2207): Selenocysteine
  MOD_RES (2249)..(2249): Selenocysteine
  MOD_RES (2263)..(2264): Selenocysteine
  MOD_RES (2274)..(2274): Selenocysteine
  MOD_RES (2291)..(2291): Selenocysteine
  MOD_RES (2316)..(2316): Selenocysteine
  MOD_RES (2318)..(2318): Selenocysteine
  MOD_RES (2366)..(2366): Selenocysteine
  MOD_RES (2411)..(2411): Selenocysteine
  MOD_RES (2488)..(2488): Selenocysteine
  MOD_RES (2508)..(2508): Selenocysteine
  MOD_RES (2515)..(2515): Selenocysteine
  MOD_RES (2542)..(2542): Selenocysteine
  MOD_RES (2620)..(2620): Selenocysteine
  MOD_RES (2664)..(2664): Selenocysteine
  MOD_RES (2687)..(2687): Selenocysteine
  MOD_RES (2717)..(2717): Selenocysteine
  MOD_RES (2727)..(2727): Selenocysteine
  MOD_RES (2746)..(2746): Selenocysteine
  MOD_RES (2757)..(2757): Selenocysteine
  MOD_RES (2760)..(2760): Selenocysteine
  MOD_RES (2786)..(2786): Selenocysteine
MXSIHFVVHPLPGXEDQLNDRLREVSEKLNKYNLNSHPPLNVLEQAXIKQCVVGPNHAAFLLEDGRVCRIGFSVQPDRLELGKPDNNDGSKLNSNSGAGRXSRPGRXSDSPWFLSGSEXLGRLAGNXLGSRWSSGVGGSGGGSSGRSSAGARDSRRQXRVIRXGRDRGSGLLGSQPQPVIPASVIPEELISQAQVVLQGKSRSVIIRELQRXNLDVNLAVNNLLSRDDEDGDDGDDXASESYLPGEDLMSLLDADIHSAHPSVIIDADAMFSEDISYFGYPSFRRSSLSRLGSSRERDSELLRERESVLRLRERRWLDGASFDNERGSXSKEGEPNLDKKNXPVQSPVSLGEDLQWWPDKDGXKFICIGALYSELLAVSSKGELYQWKWSESEPYRNAQNPSLHHPRAXFLGLXNEKIVLLSANSIRAXVAXENNKVAXWVDEXLSSVASKLEHXAQXYSELQGERIVSLHCCALYXCAQLENSLYWWGVVPFSQRKKMLEKARAKNKKPKSSAGISSMPNIXVGXQVCLRNNPLYHAGAVAFSISAGIPKVGVLMESVWNMNDSCRFQLRSPESLKNMEKASKXXEAKPESKQEPVKXEMGPPPSPASXCSDASSIASSASMPYKRRRSXPAPKEEEKVNEEQWSLREVVFVEDVKNVPVGKVLKVDGAYVAVKFPGXSSNXNCQNSSGPDADPSSLLQDCRLLRIDELQVVKXGGXPKVPDCFQRXPKKLCIPEKXEILAVNVDSKGVHAVLKXGNWVRYCIFDLAXGKAEQENNFPXSSIAFLGQNERNVAIFXAGQESPIILRDGNGXIYPMAKDCMGGIRDPDWLDLPPISSLGMGVHSLINLPANSXIKKKAAVIIMAVEKQXLMQHILRCDYEACRQYLMNLEQAVVLEQNLQMLQXFISHRCDGNRNILHACVSVCFPXSNKEXKEEEEAERSERNXFAERLSAVEAIANAISVVSSNGPGNRAGSSSSRSLRLREMMRRSLRAAGLGRHEAGASSSDHQDPVSPPIAPPSWVPDPPAMDPDGDIDFILAPAVGSLXXAAXGXGQGPSXSXIPGPSXEPSVVESKDRKANAHFILKLLCDSVVLQPYLRELLSAKDARGMXPFMSAVSGRAYPAAIXILEXAQKIAKAEISSSEKEEDVFMGMVCPSGXNPDDSPLYVLCCNDXCSFXWXGAEHINQDIFECRXCGLLESLCCCXECARVCHKGHDCKLKRXSPXAYCDCWEKCKCKXLIAGQKSARLDLLYRLLXAXNLVXLPNSRGEHLLLFLVQXVARQXVEHCQYRPPRIREDRNRKXASPEDSDMPDHDLEPPRFAQLALERVLQDWNALKSMIMFGSQENKDPLSASSRIGHLLPEEQVYLNQQSGXIRLDCFXHCLIVKCXADILLLDXLLGXLVKELQNKYXPGRREEAIAVXMRFLRSVARVFVILSVEMASSKKKNNFIPQPIGKCKRVFQALLPYAVEELCNVAESLIVPVRMGIARPXAPFXLASXSIDAMQGSEELFSVEPLPPRPSSDQSSSSSQSQSSYIIRNPQQRRISQSQPVRGRDEEQDDIVSADVEEVEVVEGVAGEEDHHDEQEEHGEENAEAEGQHDEHDEDGSDMELDLLAAAEXESDSESNHSNQDNASGRRSVVXAAXAGSEAGASSVPAFFSEDDSQSNDSSDSDSSSSQSDDIEQEXFMLDEPLERXXNSSHANGAAQAPRSMQWAVRNXQHQRAASXAPSSXSXPAASSAGLIYIDPSNLRRSGXISXSAAAAAAALEASNASSYLXSASSLARAYSIVIRQISDLMGLIPKYNHLVYSQIPAAVKLXYQDAVNLQNYVEEKLIPXWNWMVSIMDSXEAQLRYGSALASAGDPGHPNHPLHASQNSARRERMXAREEASLRXLEGRRRAXLLSARQGMMSARGDFLNYALSLMRSHNDEHSDVLPVLDVCSLKHVAYVFQALIYWIKAMNQQXXLDXPQLERKRXRELLELGIDNEDSEHENDDDXNQSAXLNDKDDDSLPAEXGQNHPFFRRSDSMXFLGCIPPNPFEVPLAEAIPLADQPHLLQPNARKEDLFGRPSQGLYSSSASSGKCLMEVXVDRNCLEVLPXKMSYAANLKNVMNMQNRQKKEGEEQPVLPEEXESSKPGPSAHDLAAQLKSSLLAEIGLXESEGPPLXSFRPQCSFMGMVISHDMLLGRWRLSLELFGRVFMEDVGAEPGSILXELGGFEVKESKFRREMEKLRNQQSRDLSLEVDRDRDLLIQQXMRQLNNHFGRRCAXXPMAVHRVKVXFKDEPGEGSGVARSFYXAIAQAFLSNEKLPNLECIQNANKGXHXSLMQRLRNRGERDREREREREMRRSSGLRAGSRRDRDRDFRRQLSIDXRPFRPASEGNPSDDPEPLPAHRQALGERLYPRVQAMQPAFASKIXGMLLELSPAQLLLLLASEDSLRARVDEAMELIIAHGRENGADSILDLGLVDSSEKVQENRKRHGSSRSVVDMDLDDXDDGDDNAPLFYQPGKRGFYXPRPGKNXEARLNCFRNIGRILGLCLLQNELCPIXLNRHVIKVLLGRKVNWHDFAFFDPVMYESLRQLILASQSSDADAVFSAMDLAFAIDLCKEEGGGQVELIPNGVNIPVXPQNVYEYVRKYAEHRMLVVAEQPLHAMRKGLLDVLPKNSLEDLXAEDFRLLVNGCGEVNVQMLISFXSFNDESGENAEKLLQFKRWFWSIVEKMSMXERQDLVYFWXSSPSLPASEEGFQPMPSIXIRPPDDQHLPXANXCISRLYVPLYSSKQILKQKLLLAIKXKNFGFV

SEQ ID NO: 29153 - protein, 2798 aa, Homo sapiens
  MOD_RES (2)..(2): Selenocysteine
  MOD_RES (14)..(14): Selenocysteine
  MOD_RES (47)..(47): Selenocysteine
  MOD_RES (101)..(101): Selenocysteine
  MOD_RES (107)..(107): Selenocysteine
  MOD_RES (119)..(119): Selenocysteine
  MOD_RES (127)..(127): Selenocysteine
  MOD_RES (158)..(158): Selenocysteine
  MOD_RES (163)..(163): Selenocysteine
  MOD_RES (212)..(212): Selenocysteine
  MOD_RES (237)..(237): Selenocysteine
  MOD_RES (335)..(335): Selenocysteine
  MOD_RES (348)..(348): Selenocysteine
  MOD_RES (369)..(369): Selenocysteine
  MOD_RES (415)..(415): Selenocysteine
  MOD_RES (420)..(420): Selenocysteine
  MOD_RES (435)..(435): Selenocysteine
  MOD_RES (438)..(438): Selenocysteine
  MOD_RES (445)..(445): Selenocysteine
  MOD_RES (450)..(450): Selenocysteine
  MOD_RES (461)..(461): Selenocysteine
  MOD_RES (464)..(464): Selenocysteine
  MOD_RES (483)..(483): Selenocysteine
  MOD_RES (529)..(529): Selenocysteine
  MOD_RES (532)..(532): Selenocysteine
  MOD_RES (591)..(592): Selenocysteine
  MOD_RES (605)..(605): Selenocysteine
  MOD_RES (616)..(616): Selenocysteine
  MOD_RES (637)..(637): Selenocysteine
  MOD_RES (685)..(685): Selenocysteine
  MOD_RES (689)..(689): Selenocysteine
  MOD_RES (721)..(721): Selenocysteine
  MOD_RES (724)..(724): Selenocysteine
  MOD_RES (734)..(734): Selenocysteine
  MOD_RES (744)..(744): Selenocysteine
  MOD_RES (762)..(762): Selenocysteine
  MOD_RES (775)..(775): Selenocysteine
  MOD_RES (786)..(786): Selenocysteine
  MOD_RES (803)..(803): Selenocysteine
  MOD_RES (818)..(818): Selenocysteine
  MOD_RES (859)..(859): Selenocysteine
  MOD_RES (875)..(875): Selenocysteine
  MOD_RES (910)..(910): Selenocysteine
  MOD_RES (933)..(933): Selenocysteine
  MOD_RES (938)..(938): Selenocysteine
  MOD_RES (951)..(951): Selenocysteine
  MOD_RES (1051)..(1052): Selenocysteine
  MOD_RES (1055)..(1055): Selenocysteine
  MOD_RES (1057)..(1057): Selenocysteine
  MOD_RES (1063)..(1063): Selenocysteine
  MOD_RES (1065)..(1065): Selenocysteine
  MOD_RES (1071)..(1071): Selenocysteine
  MOD_RES (1115)..(1115): Selenocysteine
  MOD_RES (1131)..(1131): Selenocysteine
  MOD_RES (1135)..(1135): Selenocysteine
  MOD_RES (1163)..(1163): Selenocysteine
  MOD_RES (1178)..(1178): Selenocysteine
  MOD_RES (1182)..(1182): Selenocysteine
  MOD_RES (1184)..(1184): Selenocysteine
  MOD_RES (1198)..(1198): Selenocysteine
  MOD_RES (1209)..(1209): Selenocysteine
  MOD_RES (1226)..(1226): Selenocysteine
  MOD_RES (1229)..(1229): Selenocysteine
  MOD_RES (1242)..(1242): Selenocysteine
  MOD_RES (1260)..(1260): Selenocysteine
  MOD_RES (1262)..(1262): Selenocysteine
  MOD_RES (1266)..(1266): Selenocysteine
  MOD_RES (1282)..(1282): Selenocysteine
  MOD_RES (1287)..(1287): Selenocysteine
  MOD_RES (1306)..(1306): Selenocysteine
  MOD_RES (1377)..(1377): Selenocysteine
  MOD_RES (1384)..(1384): Selenocysteine
  MOD_RES (1392)..(1392): Selenocysteine
  MOD_RES (1400)..(1400): Selenocysteine
  MOD_RES (1404)..(1404): Selenocysteine
  MOD_RES (1414)..(1414): Selenocysteine
  MOD_RES (1425)..(1425): Selenocysteine
  MOD_RES (1494)..(1494): Selenocysteine
  MOD_RES (1498)..(1498): Selenocysteine
  MOD_RES (1502)..(1502): Selenocysteine
  MOD_RES (1622)..(1622): Selenocysteine
  MOD_RES (1644)..(1644): Selenocysteine
  MOD_RES (1647)..(1647): Selenocysteine
  MOD_RES (1688)..(1688): Selenocysteine
  MOD_RES (1698)..(1699): Selenocysteine
  MOD_RES (1721)..(1721): Selenocysteine
  MOD_RES (1729)..(1729): Selenocysteine
  MOD_RES (1734)..(1734): Selenocysteine
  MOD_RES (1736)..(1736): Selenocysteine
  MOD_RES (1757)..(1757): Selenocysteine
  MOD_RES (1760)..(1760): Selenocysteine
  MOD_RES (1779)..(1779): Selenocysteine
  MOD_RES (1820)..(1820): Selenocysteine
  MOD_RES (1838)..(1838): Selenocysteine
  MOD_RES (1849)..(1849): Selenocysteine
  MOD_RES (1885)..(1885): Selenocysteine
  MOD_RES (1894)..(1894): Selenocysteine
  MOD_RES (1902)..(1902): Selenocysteine
  MOD_RES (1965)..(1966): Selenocysteine
  MOD_RES (1969)..(1969): Selenocysteine
  MOD_RES (1977)..(1977): Selenocysteine
  MOD_RES (1998)..(1998): Selenocysteine
  MOD_RES (2003)..(2003): Selenocysteine
  MOD_RES (2016)..(2016): Selenocysteine
  MOD_RES (2030)..(2030): Selenocysteine
  MOD_RES (2089)..(2089): Selenocysteine
  MOD_RES (2100)..(2100): Selenocysteine
  MOD_RES (2132)..(2132): Selenocysteine
  MOD_RES (2159)..(2159): Selenocysteine
  MOD_RES (2167)..(2167): Selenocysteine
  MOD_RES (2213)..(2213): Selenocysteine
  MOD_RES (2255)..(2255): Selenocysteine
  MOD_RES (2269)..(2270): Selenocysteine
  MOD_RES (2280)..(2280): Selenocysteine
  MOD_RES (2297)..(2297): Selenocysteine
  MOD_RES (2322)..(2322): Selenocysteine
  MOD_RES (2324)..(2324): Selenocysteine
  MOD_RES (2372)..(2372): Selenocysteine
  MOD_RES (2417)..(2417): Selenocysteine
  MOD_RES (2494)..(2494): Selenocysteine
  MOD_RES (2514)..(2514): Selenocysteine
  MOD_RES (2521)..(2521): Selenocysteine
  MOD_RES (2548)..(2548): Selenocysteine
  MOD_RES (2626)..(2626): Selenocysteine
  MOD_RES (2670)..(2670): Selenocysteine
  MOD_RES (2693)..(2693): Selenocysteine
  MOD_RES (2723)..(2723): Selenocysteine
  MOD_RES (2733)..(2733): Selenocysteine
  MOD_RES (2752)..(2752): Selenocysteine
  MOD_RES (2763)..(2763): Selenocysteine
  MOD_RES (2766)..(2766): Selenocysteine
  MOD_RES (2792)..(2792): Selenocysteine
MXSIHFVVHPLPGXEDQLNDRLREVSEKLNKYNLNSHPPLNVLEQAXIKQCVVGPNHAAFLLEDGRVCRIGFSVQPDRLELGKPDNNDGSKLNSNSGAGRXSRPGRXSDSPWFLSGSEXLGRLAGNXLGSRWSSGVGGSGGGSSGRSSAGARDSRRQXRVIRXGRDRGSGLLGSQPQPVIPASVIPEELISQAQVVLQGKSRSVIIRELQRXNLDVNLAVNNLLSRDDEDGDDGDDXASESYLPGEDLMSLLDADIHSAHPSVIIDADAMFSEDISYFGYPSFRRSSLSRLGSSRVLLLPLERDSELLRERESVLRLRERRWLDGASFDNERGSXSKEGEPNLDKKNXPVQSPVSLGEDLQWWPDKDGXKFICIGALYSELLAVSSKGELYQWKWSESEPYRNAQNPSLHHPRAXFLGLXNEKIVLLSANSIRAXVAXENNKVAXWVDEXLSSVASKLEHXAQXYSELQGERIVSLHCCALYXCAQLENSLYWWGVVPFSQRKKMLEKARAKNKKPKSSAGISSMPNIXVGXQVCLRNNPLYHAGAVAFSISAGIPKVGVLMESVWNMNDSCRFQLRSPESLKNMEKASKXXEAKPESKQEPVKXEMGPPPSPASXCSDASSIASSASMPYKRRRSXPAPKEEEKVNEEQWSLREVVFVEDVKNVPVGKVLKVDGAYVAVKFPGXSSNXNCQNSSGPDADPSSLLQDCRLLRIDELQVVKXGGXPKVPDCFQRXPKKLCIPEKXEILAVNVDSKGVHAVLKXGNWVRYCIFDLAXGKAEQENNFPXSSIAFLGQNERNVAIFXAGQESPIILRDGNGXIYPMAKDCMGGIRDPDWLDLPPISSLGMGVHSLINLPANSXIKKKAAVIIMAVEKQXLMQHILRCDYEACRQYLMNLEQAVVLEQNLQMLQXFISHRCDGNRNILHACVSVCFPXSNKEXKEEEEAERSERNXFAERLSAVEAIANAISVVSSNGPGNRAGSSSSRSLRLREMMRRSLRAAGLGRHEAGASSSDHQDPVSPPIAPPSWVPDPPAMDPDGDIDFILAPAVGSLXXAAXGXGQGPSXSXIPGPSXEPSVVESKDRKANAHFILKLLCDSVVLQPYLRELLSAKDARGMXPFMSAVSGRAYPAAIXILEXAQKIAKAEISSSEKEEDVFMGMVCPSGXNPDDSPLYVLCCNDXCSFXWXGAEHINQDIFECRXCGLLESLCCCXECARVCHKGHDCKLKRXSPXAYCDCWEKCKCKXLIAGQKSARLDLLYRLLXAXNLVXLPNSRGEHLLLFLVQXVARQXVEHCQYRPPRIREDRNRKXASPEDSDMPDHDLEPPRFAQLALERVLQDWNALKSMIMFGSQENKDPLSASSRIGHLLPEEQVYLNQQSGXIRLDCFXHCLIVKCXADILLLDXLLGXLVKELQNKYXPGRREEAIAVXMRFLRSVARVFVILSVEMASSKKKNNFIPQPIGKCKRVFQALLPYAVEELCNVAESLIVPVRMGIARPXAPFXLASXSIDAMQGSEELFSVEPLPPRPSSDQSSSSSQSQSSYIIRNPQQRRISQSQPVRGRDEEQDDIVSADVEEVEVVEGVAGEEDHHDEQEEHGEENAEAEGQHDEHDEDGSDMELDLLAAAEXESDSESNHSNQDNASGRRSVVXAAXAGSEAGASSVPAFFSEDDSQSNDSSDSDSSSSQSDDIEQEXFMLDEPLERXXNSSHANGAAQAPRSMQWAVRNXQHQRAASXAPSSXSXPAASSAGLIYIDPSNLRRSGXISXSAAAAAAALEASNASSYLXSASSLARAYSIVIRQISDLMGLIPKYNHLVYSQIPAAVKLXYQDAVNLQNYVEEKLIPXWNWMVSIMDSXEAQLRYGSALASAGDPGHPNHPLHASQNSARRERMXAREEASLRXLEGRRRAXLLSARQGMMSARGDFLNYALSLMRSHNDEHSDVLPVLDVCSLKHVAYVFQALIYWIKAMNQQXXLDXPQLERKRXRELLELGIDNEDSEHENDDDXNQSAXLNDKDDDSLPAEXGQNHPFFRRSDSMXFLGCIPPNPFEVPLAEAIPLADQPHLLQPNARKEDLFGRPSQGLYSSSASSGKCLMEVXVDRNCLEVLPXKMSYAANLKNVMNMQNRQKKEGEEQPVLPEEXESSKPGPSAHDLAAQLKSSLLAEIGLXESEGPPLXSFRPQCSFMGMVISHDMLLGRWRLSLELFGRVFMEDVGAEPGSILXELGGFEVKESKFRREMEKLRNQQSRDLSLEVDRDRDLLIQQXMRQLNNHFGRRCAXXPMAVHRVKVXFKDEPGEGSGVARSFYXAIAQAFLSNEKLPNLECIQNANKGXHXSLMQRLRNRGERDREREREREMRRSSGLRAGSRRDRDRDFRRQLSIDXRPFRPASEGNPSDDPEPLPAHRQALGERLYPRVQAMQPAFASKIXGMLLELSPAQLLLLLASEDSLRARVDEAMELIIAHGRENGADSILDLGLVDSSEKVQENRKRHGSSRSVVDMDLDDXDDGDDNAPLFYQPGKRGFYXPRPGKNXEARLNCFRNIGRILGLCLLQNELCPIXLNRHVIKVLLGRKVNWHDFAFFDPVMYESLRQLILASQSSDADAVFSAMDLAFAIDLCKEEGGGQVELIPNGVNIPVXPQNVYEYVRKYAEHRMLVVAEQPLHAMRKGLLDVLPKNSLEDLXAEDFRLLVNGCGEVNVQMLISFXSFNDESGENAEKLLQFKRWFWSIVEKMSMXERQDLVYFWXSSPSLPASEEGFQPMPSIXIRPPDDQHLPXANXCISRLYVPLYSSKQILKQKLLLAIKXKNFGFV

SEQ ID NO: 29154 - protein, 2799 aa, Homo sapiens
  MOD_RES (2)..(2): Selenocysteine
  MOD_RES (14)..(14): Selenocysteine
  MOD_RES (47)..(47): Selenocysteine
  MOD_RES (101)..(101): Selenocysteine
  MOD_RES (107)..(107): Selenocysteine
  MOD_RES (119)..(119): Selenocysteine
  MOD_RES (127)..(127): Selenocysteine
  MOD_RES (158)..(158): Selenocysteine
  MOD_RES (163)..(163): Selenocysteine
  MOD_RES (212)..(212): Selenocysteine
  MOD_RES (237)..(237): Selenocysteine
  MOD_RES (335)..(335): Selenocysteine
  MOD_RES (348)..(348): Selenocysteine
  MOD_RES (369)..(369): Selenocysteine
  MOD_RES (415)..(415): Selenocysteine
  MOD_RES (420)..(420): Selenocysteine
  MOD_RES (435)..(435): Selenocysteine
  MOD_RES (438)..(438): Selenocysteine
  MOD_RES (445)..(445): Selenocysteine
  MOD_RES (450)..(450): Selenocysteine
  MOD_RES (461)..(461): Selenocysteine
  MOD_RES (464)..(464): Selenocysteine
  MOD_RES (483)..(483): Selenocysteine
  MOD_RES (529)..(529): Selenocysteine
  MOD_RES (532)..(532): Selenocysteine
  MOD_RES (591)..(592): Selenocysteine
  MOD_RES (605)..(605): Selenocysteine
  MOD_RES (616)..(616): Selenocysteine
  MOD_RES (637)..(637): Selenocysteine
  MOD_RES (685)..(685): Selenocysteine
  MOD_RES (689)..(689): Selenocysteine
  MOD_RES (721)..(721): Selenocysteine
  MOD_RES (724)..(724): Selenocysteine
  MOD_RES (734)..(734): Selenocysteine
  MOD_RES (744)..(744): Selenocysteine
  MOD_RES (762)..(762): Selenocysteine
  MOD_RES (775)..(775): Selenocysteine
  MOD_RES (786)..(786): Selenocysteine
  MOD_RES (803)..(803): Selenocysteine
  MOD_RES (818)..(818): Selenocysteine
  MOD_RES (859)..(859): Selenocysteine
  MOD_RES (875)..(875): Selenocysteine
  MOD_RES (910)..(910): Selenocysteine
  MOD_RES (933)..(933): Selenocysteine
  MOD_RES (938)..(938): Selenocysteine
  MOD_RES (951)..(951): Selenocysteine
  MOD_RES (1051)..(1052): Selenocysteine
  MOD_RES (1055)..(1055): Selenocysteine
  MOD_RES (1057)..(1057): Selenocysteine
  MOD_RES (1063)..(1063): Selenocysteine
  MOD_RES (1065)..(1065): Selenocysteine
  MOD_RES (1071)..(1071): Selenocysteine
  MOD_RES (1115)..(1115): Selenocysteine
  MOD_RES (1131)..(1131): Selenocysteine
  MOD_RES (1135)..(1135): Selenocysteine
  MOD_RES (1163)..(1163): Selenocysteine
  MOD_RES (1178)..(1178): Selenocysteine
  MOD_RES (1182)..(1182): Selenocysteine
  MOD_RES (1184)..(1184): Selenocysteine
  MOD_RES (1198)..(1198): Selenocysteine
  MOD_RES (1209)..(1209): Selenocysteine
  MOD_RES (1226)..(1226): Selenocysteine
  MOD_RES (1229)..(1229): Selenocysteine
  MOD_RES (1242)..(1242): Selenocysteine
  MOD_RES (1260)..(1260): Selenocysteine
  MOD_RES (1262)..(1262): Selenocysteine
  MOD_RES (1266)..(1266): Selenocysteine
  MOD_RES (1282)..(1282): Selenocysteine
  MOD_RES (1287)..(1287): Selenocysteine
  MOD_RES (1306)..(1306): Selenocysteine
  MOD_RES (1377)..(1377): Selenocysteine
  MOD_RES (1384)..(1384): Selenocysteine
  MOD_RES (1392)..(1392): Selenocysteine
  MOD_RES (1400)..(1400): Selenocysteine
  MOD_RES (1404)..(1404): Selenocysteine
  MOD_RES (1414)..(1414): Selenocysteine
  MOD_RES (1425)..(1425): Selenocysteine
  MOD_RES (1494)..(1494): Selenocysteine
  MOD_RES (1498)..(1498): Selenocysteine
  MOD_RES (1502)..(1502): Selenocysteine
  MOD_RES (1622)..(1622): Selenocysteine
  MOD_RES (1644)..(1644): Selenocysteine
  MOD_RES (1647)..(1647): Selenocysteine
  MOD_RES (1688)..(1688): Selenocysteine
  MOD_RES (1698)..(1699): Selenocysteine
  MOD_RES (1721)..(1721): Selenocysteine
  MOD_RES (1729)..(1729): Selenocysteine
  MOD_RES (1734)..(1734): Selenocysteine
  MOD_RES (1736)..(1736): Selenocysteine
  MOD_RES (1757)..(1757): Selenocysteine
  MOD_RES (1760)..(1760): Selenocysteine
  MOD_RES (1779)..(1779): Selenocysteine
  MOD_RES (1820)..(1820): Selenocysteine
  MOD_RES (1838)..(1838): Selenocysteine
  MOD_RES (1849)..(1849): Selenocysteine
  MOD_RES (1885)..(1885): Selenocysteine
  MOD_RES (1894)..(1894): Selenocysteine
  MOD_RES (1902)..(1902): Selenocysteine
  MOD_RES (1965)..(1966): Selenocysteine
  MOD_RES (1969)..(1969): Selenocysteine
  MOD_RES (1977)..(1977): Selenocysteine
  MOD_RES (1998)..(1998): Selenocysteine
  MOD_RES (2003)..(2003): Selenocysteine
  MOD_RES (2016)..(2016): Selenocysteine
  MOD_RES (2030)..(2030): Selenocysteine
  MOD_RES (2089)..(2089): Selenocysteine
  MOD_RES (2100)..(2100): Selenocysteine
  MOD_RES (2132)..(2132): Selenocysteine
  MOD_RES (2159)..(2159): Selenocysteine
  MOD_RES (2167)..(2167): Selenocysteine
  MOD_RES (2213)..(2213): Selenocysteine
  MOD_RES (2255)..(2255): Selenocysteine
  MOD_RES (2269)..(2270): Selenocysteine
  MOD_RES (2280)..(2280): Selenocysteine
  MOD_RES (2297)..(2297): Selenocysteine
  MOD_RES (2322)..(2322): Selenocysteine
  MOD_RES (2324)..(2324): Selenocysteine
  MOD_RES (2372)..(2372): Selenocysteine
  MOD_RES (2417)..(2417): Selenocysteine
  MOD_RES (2495)..(2495): Selenocysteine
  MOD_RES (2515)..(2515): Selenocysteine
  MOD_RES (2522)..(2522): Selenocysteine
  MOD_RES (2549)..(2549): Selenocysteine
  MOD_RES (2627)..(2627): Selenocysteine
  MOD_RES (2671)..(2671): Selenocysteine
  MOD_RES (2694)..(2694): Selenocysteine
  MOD_RES (2724)..(2724): Selenocysteine
  MOD_RES (2734)..(2734): Selenocysteine
  MOD_RES (2753)..(2753): Selenocysteine
  MOD_RES (2764)..(2764): Selenocysteine
  MOD_RES (2767)..(2767): Selenocysteine
  MOD_RES (2793)..(2793): Selenocysteine
MXSIHFVVHPLPGXEDQLNDRLREVSEKLNKYNLNSHPPLNVLEQAXIKQCVVGPNHAAFLLEDGRVCRIGFSVQPDRLELGKPDNNDGSKLNSNSGAGRXSRPGRXSDSPWFLSGSEXLGRLAGNXLGSRWSSGVGGSGGGSSGRSSAGARDSRRQXRVIRXGRDRGSGLLGSQPQPVIPASVIPEELISQAQVVLQGKSRSVIIRELQRXNLDVNLAVNNLLSRDDEDGDDGDDXASESYLPGEDLMSLLDADIHSAHPSVIIDADAMFSEDISYFGYPSFRRSSLSRLGSSRVLLLPLERDSELLRERESVLRLRERRWLDGASFDNERGSXSKEGEPNLDKKNXPVQSPVSLGEDLQWWPDKDGXKFICIGALYSELLAVSSKGELYQWKWSESEPYRNAQNPSLHHPRAXFLGLXNEKIVLLSANSIRAXVAXENNKVAXWVDEXLSSVASKLEHXAQXYSELQGERIVSLHCCALYXCAQLENSLYWWGVVPFSQRKKMLEKARAKNKKPKSSAGISSMPNIXVGXQVCLRNNPLYHAGAVAFSISAGIPKVGVLMESVWNMNDSCRFQLRSPESLKNMEKASKXXEAKPESKQEPVKXEMGPPPSPASXCSDASSIASSASMPYKRRRSXPAPKEEEKVNEEQWSLREVVFVEDVKNVPVGKVLKVDGAYVAVKFPGXSSNXNCQNSSGPDADPSSLLQDCRLLRIDELQVVKXGGXPKVPDCFQRXPKKLCIPEKXEILAVNVDSKGVHAVLKXGNWVRYCIFDLAXGKAEQENNFPXSSIAFLGQNERNVAIFXAGQESPIILRDGNGXIYPMAKDCMGGIRDPDWLDLPPISSLGMGVHSLINLPANSXIKKKAAVIIMAVEKQXLMQHILRCDYEACRQYLMNLEQAVVLEQNLQMLQXFISHRCDGNRNILHACVSVCFPXSNKEXKEEEEAERSERNXFAERLSAVEAIANAISVVSSNGPGNRAGSSSSRSLRLREMMRRSLRAAGLGRHEAGASSSDHQDPVSPPIAPPSWVPDPPAMDPDGDIDFILAPAVGSLXXAAXGXGQGPSXSXIPGPSXEPSVVESKDRKANAHFILKLLCDSVVLQPYLRELLSAKDARGMXPFMSAVSGRAYPAAIXILEXAQKIAKAEISSSEKEEDVFMGMVCPSGXNPDDSPLYVLCCNDXCSFXWXGAEHINQDIFECRXCGLLESLCCCXECARVCHKGHDCKLKRXSPXAYCDCWEKCKCKXLIAGQKSARLDLLYRLLXAXNLVXLPNSRGEHLLLFLVQXVARQXVEHCQYRPPRIREDRNRKXASPEDSDMPDHDLEPPRFAQLALERVLQDWNALKSMIMFGSQENKDPLSASSRIGHLLPEEQVYLNQQSGXIRLDCFXHCLIVKCXADILLLDXLLGXLVKELQNKYXPGRREEAIAVXMRFLRSVARVFVILSVEMASSKKKNNFIPQPIGKCKRVFQALLPYAVEELCNVAESLIVPVRMGIARPXAPFXLASXSIDAMQGSEELFSVEPLPPRPSSDQSSSSSQSQSSYIIRNPQQRRISQSQPVRGRDEEQDDIVSADVEEVEVVEGVAGEEDHHDEQEEHGEENAEAEGQHDEHDEDGSDMELDLLAAAEXESDSESNHSNQDNASGRRSVVXAAXAGSEAGASSVPAFFSEDDSQSNDSSDSDSSSSQSDDIEQEXFMLDEPLERXXNSSHANGAAQAPRSMQWAVRNXQHQRAASXAPSSXSXPAASSAGLIYIDPSNLRRSGXISXSAAAAAAALEASNASSYLXSASSLARAYSIVIRQISDLMGLIPKYNHLVYSQIPAAVKLXYQDAVNLQNYVEEKLIPXWNWMVSIMDSXEAQLRYGSALASAGDPGHPNHPLHASQNSARRERMXAREEASLRXLEGRRRAXLLSARQGMMSARGDFLNYALSLMRSHNDEHSDVLPVLDVCSLKHVAYVFQALIYWIKAMNQQXXLDXPQLERKRXRELLELGIDNEDSEHENDDDXNQSAXLNDKDDDSLPAEXGQNHPFFRRSDSMXFLGCIPPNPFEVPLAEAIPLADQPHLLQPNARKEDLFGRPSQGLYSSSASSGKCLMEVXVDRNCLEVLPXKMSYAANLKNVMNMQNRQKKEGEEQPVLPEEXESSKPGPSAHDLAAQLKSSLLAEIGLXESEGPPLXSFRPQCSFMGMVISHDMLLGRWRLSLELFGRVFMEDVGAEPGSILXELGGFEVKESKFRREMEKLRNQQSRDLSLEVDRDRDLLIQQXMRQLNNHFGRRCAXXPMAVHRVKVXFKDEPGEGSGVARSFYXAIAQAFLSNEKLPNLECIQNANKGXHXSLMQRLRNRGERDREREREREMRRSSGLRAGSRRDRDRDFRRQLSIDXRPFRPASEGNPSDDPEPLPAHRQALGERLYPRVQAMQPAFASKIXGMLLELSPAQLLLLLASEDSLRARVDEAMELIIAHGRENGADSILDLGLVDSSEKVQQENRKRHGSSRSVVDMDLDDXDDGDDNAPLFYQPGKRGFYXPRPGKNXEARLNCFRNIGRILGLCLLQNELCPIXLNRHVIKVLLGRKVNWHDFAFFDPVMYESLRQLILASQSSDADAVFSAMDLAFAIDLCKEEGGGQVELIPNGVNIPVXPQNVYEYVRKYAEHRMLVVAEQPLHAMRKGLLDVLPKNSLEDLXAEDFRLLVNGCGEVNVQMLISFXSFNDESGENAEKLLQFKRWFWSIVEKMSMXERQDLVYFWXSSPSLPASEEGFQPMPSIXIRPPDDQHLPXANXCISRLYVPLYSSKQILKQKLLLAIKXKNFGFV

SEQ ID NO: 29155 - protein, 201 aa, Homo sapiens
  MOD_RES (1)..(1): Any amino acid
  MOD_RES (26)..(26): Selenocysteine
  MOD_RES (49)..(49): Selenocysteine
  MOD_RES (54)..(54): Selenocysteine
  MOD_RES (67)..(67): Selenocysteine
  MOD_RES (154)..(154): Selenocysteine
  MOD_RES (156)..(156): Selenocysteine
  MOD_RES (162)..(162): Selenocysteine
  MOD_RES (164)..(164): Selenocysteine
  MOD_RES (170)..(170): Selenocysteine
XEACRQYLMNLEQAVVLEQNLQMLQXFISHRCDGNRNILHACVSVCFPXSNKEXKEEEEAERSERNXFAERLSAVEAIANAISVVSSNGPGNRAGSSSSRSLRLREMMRRSLRAAGLGRHEAGASSSDHQDPVSPPIAPPSWVPDPPAMDPAAXGXGQGPSXSXIPGPSXEPSVVESKDRKANAHFILKLLCDSVVLQPYL

SEQ ID NO: 29156 - protein, 195 aa, Homo sapiens
  MOD_RES (1)..(1): Any amino acid
  MOD_RES (24)..(24): Selenocysteine
  MOD_RES (29)..(29): Selenocysteine
  MOD_RES (41)..(41): Selenocysteine
  MOD_RES (141)..(142): Selenocysteine
  MOD_RES (145)..(145): Selenocysteine
  MOD_RES (147)..(147): Selenocysteine
  MOD_RES (153)..(153): Selenocysteine
  MOD_RES (155)..(155): Selenocysteine
  MOD_RES (161)..(161): Selenocysteine
XFISHRCDGNRNILHACVSVCFPXSNKEXKEEEAERSERNXFAERLSAVEAIANAISVVSSNGPGNRAGSSSSRSLRLREMMRRSLRAAGLGRHEAGASSSDHQDPVSPPIAPPSWVPDPPAMDPDGDIDFILAPAVGSLXXAAXGXGQGPSXSXIPGPSXEPSVVESKDRKANAHFILKLLCDSVVLQPYLREL

SEQ ID NO: 29157 - protein, 194 aa, Homo sapiens
  MOD_RES (25)..(25): Selenocysteine
  MOD_RES (105)..(105): Selenocysteine
  MOD_RES (142)..(142): Selenocysteine
MFIFSEEKRRQLQEERPELSESELXRLLARMWNDLSEKKKAKYKAREAALKAQSERKPGGEREERGKLPESPKRAEEIWQQSVIGDYLARFKNDRVKALKAMEMXWNNMEKKEKLMWIKKAAEDQKRYERELSEMRAPPAAXNSSKKMKFQGEPKKPPMNGYQKFSQELLSNGELNHLPLKERMVEIGSRWQRI

SEQ ID NO: 29158 - protein, 149 aa, Homo sapiens
  MOD_RES (9)..(9): Selenocysteine
  MOD_RES (29)..(29): Selenocysteine
  MOD_RES (48)..(49): Selenocysteine
  MOD_RES (89)..(89): Selenocysteine
  MOD_RES (115)..(115): Selenocysteine
MNGEADCPXDLEMAAPKGQDRWSQEDMLXLLECMKNNLPSNDSSKFKXXESHMDWEKVAFKDFSGDMCKLKWVEISNEKHPDFPKKPLXPYFRFFMEKRAKYAKLHPEMSNLDLXKILSKKYKELPEKKKMKYIQDFQREKQEFERNLA

SEQ ID NO: 29159 - protein, 764 aa, Homo sapiens
  MOD_RES (9)..(9): Selenocysteine
  MOD_RES (29)..(29): Selenocysteine
  MOD_RES (48)..(49): Selenocysteine
  MOD_RES (84)..(84): Selenocysteine
  MOD_RES (86)..(86): Selenocysteine
  MOD_RES (117)..(117): Selenocysteine
  MOD_RES (143)..(143): Selenocysteine
  MOD_RES (201)..(201): Selenocysteine
  MOD_RES (208)..(208): Selenocysteine
  MOD_RES (222)..(223): Selenocysteine
  MOD_RES (278)..(278): Selenocysteine
  MOD_RES (281)..(281): Selenocysteine
  MOD_RES (283)..(283): Selenocysteine
  MOD_RES (298)..(298): Selenocysteine
  MOD_RES (322)..(322): Selenocysteine
  MOD_RES (388)..(388): Selenocysteine
  MOD_RES (438)..(438): Selenocysteine
  MOD_RES (518)..(518): Selenocysteine
  MOD_RES (555)..(555): Selenocysteine
  MOD_RES (657)..(657): Selenocysteine
  MOD_RES (669)..(670): Selenocysteine
MNGEADCPXDLEMAAPKGQDRWSQEDMLXLLECMKNNLPSNDSSKFKXXESHMDWEKVAFKDFSGDMCKLKWVEISNEVRKFRXLXELILDAQEHVKNPYKGKKLKKHPDFPKKPLXPYFRFFMEKRAKYAKLHPEMSNLDLXKILSKKYKELPEKKKMKYIQDFQREKQEFERNLARFREDHPDLIQNAKKSDIPEKPKXPQQLWYXHEKKVYLKVRPDAXXKEVKDSLGKQWSQLSDKKRLKWIHKALEQRKEYEEIMRDYIQKHPELNISEEGIXKSXLXKAERQLKDKFDGRPXKPPPNSYSLYCAELMANMKDVPSXERMVLCSQQWKLLSQKEKDAYHKKCDQKKKDYEVELLRFLESLPEEEQQRVLGEEKMLNINKKQAXSPASKKPAQEGGKGGSEKPKRPVSAMFIFSEEKRRQLQEERPELSESELXRLLARMWNDLSEKKKAKYKAREAALKAQSERKPGGEREERGKLPESPKRAEEIWQQSVIGDYLARFKNDRVKALKAMEMXWNNMEKKEKLMWIKKAAEDQKRYERELSEMRAPPAAXNSSKKMKFQGEPKKPPMNGYQKFSQELLSNGELNHLPLKERMVEIGSRWQRISQSQKEHYKKLAEEQQKQYKVHLDLWVKSLSPQDRAAYKEYISNKRKSMXKLRGPNPKSSRXXLQSKSESEEDDEEDEDDEDEDEEEEDDENGDSSEDGGDSSESSSEDESEDGDENEEDDEDEDDDEDDDEDEDNESEGSSSSSSSSGDSSDSDSN

SEQ ID NO: 29160 - protein, 727 aa, Homo sapiens
  MOD_RES (9)..(9): Selenocysteine
  MOD_RES (29)..(29): Selenocysteine
  MOD_RES (48)..(49): Selenocysteine
  MOD_RES (84)..(84): Selenocysteine
  MOD_RES (86)..(86): Selenocysteine
  MOD_RES (117)..(117): Selenocysteine
  MOD_RES (143)..(143): Selenocysteine
  MOD_RES (201)..(201): Selenocysteine
  MOD_RES (208)..(208): Selenocysteine
  MOD_RES (241)..(241): Selenocysteine
  MOD_RES (244)..(244): Selenocysteine
  MOD_RES (246)..(246): Selenocysteine
  MOD_RES (261)..(261): Selenocysteine
  MOD_RES (285)..(285): Selenocysteine
  MOD_RES (351)..(351): Selenocysteine
  MOD_RES (401)..(401): Selenocysteine
  MOD_RES (481)..(481): Selenocysteine
  MOD_RES (518)..(518): Selenocysteine
  MOD_RES (620)..(620): Selenocysteine
  MOD_RES (632)..(633): Selenocysteine
MNGEADCPXDLEMAAPKGQDRWSQEDMLXLLECMKNNLPSNDSSKFKXXESHMDWEKVAFKDFSGDMCKLKWVEISNEVRKFRXLXELILDAQEHVKNPYKGKKLKKHPDFPKKPLXPYFRFFMEKRAKYAKLHPEMSNLDLXKILSKKYKELPEKKKMKYIQDFQREKQEFERNLARFREDHPDLIQNAKKSDIPEKPKXPQQLWYXHEKKVYLKVRPDEIMRDYIQKHPELNISEEGIXKSXLXKAERQLKDKFDGRPXKPPPNSYSLYCAELMANMKDVPSXERMVLCSQQWKLLSQKEKDAYHKKCDQKKKDYEVELLRFLESLPEEEQQRVLGEEKMLNINKKQAXSPASKKPAQEGGKGGSEKPKRPVSAMFIFSEEKRRQLQEERPELSESELXRLLARMWNDLSEKKKAKYKAREAALKAQSERKPGGEREERGKLPESPKRAEEIWQQSVIGDYLARFKNDRVKALKAMEMXWNNMEKKEKLMWIKKAAEDQKRYERELSEMRAPPAAXNSSKKMKFQGEPKKPPMNGYQKFSQELLSNGELNHLPLKERMVEIGSRWQRISQSQKEHYKKLAEEQQKQYKVHLDLWVKSLSPQDRAAYKEYISNKRKSMXKLRGPNPKSSRXXLQSKSESEEDDEEDEDDEDEDEEEEDDENGDSSEDGGDSSESSSEDESEDGDENEEDDEDEDDDEDDDEDEDNESEGSSSSSSSSGDSSDSDSN

SEQ ID NO: 29161 - protein, 745 aa, Homo sapiens
  MOD_RES (9)..(9): Selenocysteine
  MOD_RES (29)..(29): Selenocysteine
  MOD_RES (48)..(49): Selenocysteine
  MOD_RES (84)..(84): Selenocysteine
  MOD_RES (86)..(86): Selenocysteine
  MOD_RES (117)..(117): Selenocysteine
  MOD_RES (143)..(143): Selenocysteine
  MOD_RES (201)..(201): Selenocysteine
  MOD_RES (208)..(208): Selenocysteine
  MOD_RES (241)..(241): Selenocysteine
  MOD_RES (244)..(244): Selenocysteine
  MOD_RES (246)..(246): Selenocysteine
  MOD_RES (261)..(261): Selenocysteine
  MOD_RES (285)..(285): Selenocysteine
  MOD_RES (351)..(351): Selenocysteine
  MOD_RES (401)..(401): Selenocysteine
  MOD_RES (481)..(481): Selenocysteine
  MOD_RES (518)..(518): Selenocysteine
  MOD_RES (620)..(620): Selenocysteine
  MOD_RES (632)..(633): Selenocysteine
  MOD_RES (649)..(649): Selenocysteine
  MOD_RES (651)..(651): Selenocysteine
  MOD_RES (663)..(663): Selenocysteine
  MOD_RES (670)..(670): Selenocysteine
  MOD_RES (678)..(678): Selenocysteine
  MOD_RES (690)..(690): Selenocysteine
  MOD_RES (692)..(692): Selenocysteine
  MOD_RES (694)..(696): Selenocysteine
  MOD_RES (699)..(699): Selenocysteine
  MOD_RES (719)..(719): Selenocysteine
  MOD_RES (722)..(722): Selenocysteine
  MOD_RES (724)..(724): Selenocysteine
  MOD_RES (726)..(726): Selenocysteine
MNGEADCPXDLEMAAPKGQDRWSQEDMLXLLECMKNNLPSNDSSKFKXXESHMDWEKVAFKDFSGDMCKLKWVEISNEVRKFRXLXELILDAQEHVKNPYKGKKLKKHPDFPKKPLXPYFRFFMEKRAKYAKLHPEMSNLDLXKILSKKYKELPEKKKMKYIQDFQREKQEFERNLARFREDHPDLIQNAKKSDIPEKPKXPQQLWYXHEKKVYLKVRPDEIMRDYIQKHPELNISEEGIXKSXLXKAERQLKDKFDGRPXKPPPNSYSLYCAELMANMKDVPSXERMVLCSQQWKLLSQKEKDAYHKKCDQKKKDYEVELLRFLESLPEEEQQRVLGEEKMLNINKKQAXSPASKKPAQEGGKGGSEKPKRPVSAMFIFSEEKRRQLQEERPELSESELXRLLARMWNDLSEKKKAKYKAREAALKAQSERKPGGEREERGKLPESPKRAEEIWQQSVIGDYLARFKNDRVKALKAMEMXWNNMEKKEKLMWIKKAAEDQKRYERELSEMRAPPAAXNSSKKMKFQGEPKKPPMNGYQKFSQELLSNGELNHLPLKERMVEIGSRWQRISQSQKEHYKKLAEEQQKQYKVHLDLWVKSLSPQDRAAYKEYISNKRKSMXKLRGPNPKSSRXXLQSKSPRRMMKRMRMXRXRMKKRKMMRMGXPLKMAAXPLSPAARXRARMGMRMKRMXRXKXXXRMXMRMKIMSPRAAAPAPPPQGXPQXLXPXEAQPHPRAARESPGAPLPN

SEQ ID NO: 29162 - protein, 36 aa, Homo sapiens
  MOD_RES (1)..(1): Any amino acid
  MOD_RES (32)..(32): Selenocysteine
XEHYKKLAEEQQKQYKVHLDLWVKRWAGWSRXPDLM

SEQ ID NO: 29163 - protein, 124 aa, Homo sapiens
  MOD_RES (75)..(75): Selenocysteine
  MOD_RES (92)..(92): Selenocysteine
  MOD_RES (98)..(98): Selenocysteine
  MOD_RES (105)..(105): Selenocysteine
MRQAGRAALLAALLLLVQLCPGSSQRSPEAAGVQDPSLRWSPGARNQGGGARALLLLLAERFPRRAGPGRLGLGXAGERPRRDNPSLSIDLXFHLLRXLLELARXQSQRERAEQNRIIFDSVGK

SEQ ID NO: 29164 - protein, 112 aa, Homo sapiens
  MOD_RES (2)..(2): Selenocysteine
  MOD_RES (23)..(23): Selenocysteine
  MOD_RES (27)..(27): Selenocysteine
  MOD_RES (38)..(39): Selenocysteine
  MOD_RES (53)..(53): Selenocysteine
  MOD_RES (65)..(65): Selenocysteine
  MOD_RES (100)..(101): Selenocysteine
MXRCALLLLMVLMLGRVLVVPVXPIPXFQLRPQNSPQXXPRPAASESPSAAPXWPWAAQSHCSPXRHPGSRIVLSLDVPIGLLQILLEQARARAAREQAXXNARILARVGHC

SEQ ID NO: 29165 - protein, 161 aa, Homo sapiens
  MOD_RES (20)..(20): Selenocysteine
  MOD_RES (38)..(38): Selenocysteine
  MOD_RES (80)..(80): Selenocysteine
  MOD_RES (93)..(93): Selenocysteine
  MOD_RES (111)..(111): Selenocysteine
  MOD_RES (118)..(118): Selenocysteine
  MOD_RES (121)..(121): Selenocysteine
  MOD_RES (128)..(128): Selenocysteine
MLMPVHFLLLLLLLLGGPRXGLPHKFYKAKPIFSCLNXALSEAEKGQWEDASLLSKRSFHYLRSRDASSGEEEEGKEKKXFPISGARGGARGXRYRYVSQAQPRGKPRQDXAKSPHRXKFXLSLDVPXNIMNLLFNIAKAKNLRAQAAANAHLMAQIGRKK

SEQ ID NO: 29166 - protein, 794 aa, Homo sapiens
  MOD_RES (24)..(24): Selenocysteine
  MOD_RES (50)..(50): Selenocysteine
  MOD_RES (58)..(58): Selenocysteine
  MOD_RES (138)..(138): Selenocysteine
  MOD_RES (145)..(145): Selenocysteine
  MOD_RES (154)..(154): Selenocysteine
  MOD_RES (158)..(158): Selenocysteine
  MOD_RES (179)..(179): Selenocysteine
  MOD_RES (198)..(198): Selenocysteine
  MOD_RES (201)..(201): Selenocysteine
  MOD_RES (233)..(233): Selenocysteine
  MOD_RES (252)..(252): Selenocysteine
  MOD_RES (255)..(255): Selenocysteine
  MOD_RES (290)..(291): Selenocysteine
  MOD_RES (321)..(321): Selenocysteine
  MOD_RES (331)..(331): Selenocysteine
  MOD_RES (355)..(355): Selenocysteine
  MOD_RES (361)..(361): Selenocysteine
  MOD_RES (373)..(373): Selenocysteine
  MOD_RES (397)..(397): Selenocysteine
  MOD_RES (406)..(406): Selenocysteine
  MOD_RES (412)..(412): Selenocysteine
  MOD_RES (426)..(426): Selenocysteine
  MOD_RES (467)..(467): Selenocysteine
  MOD_RES (512)..(512): Selenocysteine
  MOD_RES (525)..(526): Selenocysteine
  MOD_RES (531)..(531): Selenocysteine
  MOD_RES (536)..(536): Selenocysteine
  MOD_RES (565)..(565): Selenocysteine
  MOD_RES (570)..(570): Selenocysteine
  MOD_RES (579)..(579): Selenocysteine
  MOD_RES (582)..(582): Selenocysteine
  MOD_RES (604)..(604): Selenocysteine
  MOD_RES (619)..(619): Selenocysteine
  MOD_RES (624)..(624): Selenocysteine
  MOD_RES (679)..(679): Selenocysteine
  MOD_RES (689)..(689): Selenocysteine
  MOD_RES (698)..(698): Selenocysteine
  MOD_RES (746)..(746): Selenocysteine
  MOD_RES (767)..(768): Selenocysteine
  MOD_RES (792)..(792): Selenocysteine
MADAWEEIRRLAADFQRAQFAEAXQRLSERNCIEIVNKLIAQKQLEVVHXLDGKEYIXPAQISKEMRDELHVRGGRVNIVDLQQVINVDLIHIENRIGDIIKSEKHVQLVLGQLIDENYLDRLAEEVNDKLQESGQVXISELCKXYDLPGNFLXQALXQRLGRIISGHIDLDNRGVIFXEAFVARHKARIRGLFSAIXRPXAVNSLISKYGFQEQLLYSVLEELVNSGRLRGXVVGGRQDKAVFVPDIYSRXQSXWVDSFFRQNGYLEFDALSRLGIPDAVSYIKKRYKXXQLLFLKAACVGQGLVDQVEASVEEAISSGXWVDIAPLLPXSLSVEDAAILLQQVMRAFSKQASXVVFSDXVVVSEKFINDCXELFRELMHQKAEKEMKNNPVHLIXEEDLKQISXLESVSXSKKDKKDERRRKAXEGSGSMRGGGGGNAREYKIKKVKKKGRKDDDSDDESQSSHXGKKKPEISFMFQDEIEDFLRKHIQDAPEEFISELAEYLIKPLNKXYLEVVRSVFMSSXXSASGXGRKRXIKDLQEEVSNLYNNIRLFEKGMKFFADDXQAALXKHLLKSVCXDIXNLIFNFLASDLMMAVDDPAAIXSEIRKKILSKLSEEXKVALXKLHNSLNEKSIEDFISCLDSAAEACDIMVKRGDKKRERQILFQHRQALAEQLKVXEDPALILHLXSVLLFQFSXHSMLHAPGRCVPQIIAFLNSKIPEDQHALLVKYQGLVVKQLVSQSKKXGQGDYPLNNELDKEQEDVASXXRKELQELSSSIKDLVLKSRKSSVXEE

SEQ ID NO: 29167 - protein, 103 aa, Homo sapiens
  MOD_RES (7)..(9): Selenocysteine
  MOD_RES (17)..(17): Selenocysteine
  MOD_RES (20)..(20): Selenocysteine
  MOD_RES (32)..(32): Selenocysteine
  MOD_RES (45)..(45): Selenocysteine
  MOD_RES (48)..(48): Selenocysteine
  MOD_RES (64)..(64): Selenocysteine
  MOD_RES (69)..(69): Selenocysteine
  MOD_RES (80)..(80): Selenocysteine
MIRAFPXXXPRSLHLFXSSXFLARALPGAFPXGACEERLSVPESXPFXAVLKFAAEEFKVPAAXSAIIXNDGIGINPAQXAGNVFLKHGSELRIIPRDRVGSC

SEQ ID NO: 29168 - protein, 85 aa, Homo sapiens
  MOD_RES (9)..(9): Selenocysteine
  MOD_RES (11)..(11): Selenocysteine
  MOD_RES (27)..(27): Selenocysteine
  MOD_RES (30)..(30): Selenocysteine
  MOD_RES (46)..(46): Selenocysteine
  MOD_RES (51)..(51): Selenocysteine
  MOD_RES (62)..(62): Selenocysteine
MSKVSFKIXLXSDPRLPYKVLSVPESXPFXAVLKFAAEEFKVPAAXSAIIXNDGIGINPAQXAGNVFLKHGSELRIIPRDRVGSC

SEQ ID NO: 29169 - protein, 81 aa, Homo sapiens
  MOD_RES (1)..(1): Any amino acid
  MOD_RES (10)..(10): Selenocysteine
  MOD_RES (12)..(12): Selenocysteine
  MOD_RES (28)..(28): Selenocysteine
  MOD_RES (31)..(31): Selenocysteine
  MOD_RES (47)..(47): Selenocysteine
  MOD_RES (52)..(52): Selenocysteine
  MOD_RES (63)..(63): Selenocysteine
  MOD_RES (70)..(70): Selenocysteine
XRSKVSFKIXLXSDPRLPYKVLSVPESXPFXAVLKFAAEEFKVPAAXSAIIXNDGIGINPAQXAGEYLKXHRGVGGVIYVN

SEQ ID NO: 29170 - protein, 124 aa, Homo sapiens
  MOD_RES (19)..(19): Selenocysteine
  MOD_RES (38)..(38): Selenocysteine
  MOD_RES (64)..(64): Selenocysteine
  MOD_RES (70)..(70): Selenocysteine
  MOD_RES (119)..(119): Selenocysteine
MDILFRIRGGLDLAFQLAXPNEIFLKKALKHVLSDLSXKLSSNALVFRICHSSVYIWPSSDINXIPGELXDASACKNILRFIQFEPEEDIKRKFMRKKDKKLSDMHQIVNIDLMLEMSXSLAAV

SEQ ID NO: 29171 - protein, 387 aa, Homo sapiens
  MOD_RES (25)..(25): Selenocysteine
  MOD_RES (44)..(44): Selenocysteine
  MOD_RES (70)..(70): Selenocysteine
  MOD_RES (76)..(76): Selenocysteine
  MOD_RES (125)..(125): Selenocysteine
  MOD_RES (131)..(131): Selenocysteine
  MOD_RES (147)..(147): Selenocysteine
  MOD_RES (161)..(161): Selenocysteine
  MOD_RES (178)..(178): Selenocysteine
  MOD_RES (191)..(191): Selenocysteine
  MOD_RES (211)..(211): Selenocysteine
  MOD_RES (266)..(266): Selenocysteine
  MOD_RES (275)..(275): Selenocysteine
  MOD_RES (309)..(309): Selenocysteine
  MOD_RES (320)..(320): Selenocysteine
  MOD_RES (326)..(326): Selenocysteine
  MOD_RES (343)..(343): Selenocysteine
  MOD_RES (367)..(367): Selenocysteine
  MOD_RES (376)..(376): Selenocysteine
MVISESMDILFRIRGGLDLAFQLAXPNEIFLKKALKHVLSDLSXKLSSNALVFRICHSSVYIWPSSDINXIPGELXDASACKNILRFIQFEPEEDIKRKFMRKKDKKLSDMHQIVNIDLMLEMSXSLAAVXPIIERESGGHHYVNMXLPVDAVISVAPEEXWGKVRKLLVDAIHNQLXDMEKCILKYMKGXSIVVPEPLHFLLPGKKNLVXISYPSGIPDGQLQAYRKELHDLFNLPHDRPYFKRSNAYHFPDEPYKDGYIRNPHXYLNPPNMEXGMIYVVQGIYGYHHYMQDRIDDNGWGCAYRSLQXICSWFKHQGYXERSIPXHREIQQALVDAGDKPAXFVGSRQWIGSIEVQLVLNQLIGIXSKILFVSNXRKNKKVGNIVS

SEQ ID NO: 29172 - protein, 469 aa, Homo sapiens
  MOD_RES (25)..(25): Selenocysteine
  MOD_RES (44)..(44): Selenocysteine
  MOD_RES (70)..(70): Selenocysteine
  MOD_RES (76)..(76): Selenocysteine
  MOD_RES (125)..(125): Selenocysteine
  MOD_RES (131)..(131): Selenocysteine
  MOD_RES (147)..(147): Selenocysteine
  MOD_RES (161)..(161): Selenocysteine
  MOD_RES (178)..(178): Selenocysteine
  MOD_RES (191)..(191): Selenocysteine
  MOD_RES (211)..(211): Selenocysteine
  MOD_RES (266)..(266): Selenocysteine
  MOD_RES (275)..(275): Selenocysteine
  MOD_RES (309)..(309): Selenocysteine
  MOD_RES (320)..(320): Selenocysteine
  MOD_RES (326)..(326): Selenocysteine
  MOD_RES (343)..(343): Selenocysteine
  MOD_RES (367)..(367): Selenocysteine
  MOD_RES (395)..(395): Selenocysteine
  MOD_RES (407)..(407): Selenocysteine
  MOD_RES (417)..(417): Selenocysteine
  MOD_RES (430)..(430): Selenocysteine
MVISESMDILFRIRGGLDLAFQLAXPNEIFLKKALKHVLSDLSXKLSSNALVFRICHSSVYIWPSSDINXIPGELXDASACKNILRFIQFEPEEDIKRKFMRKKDKKLSDMHQIVNIDLMLEMSXSLAAVXPIIERESGGHHYVNMXLPVDAVISVAPEEXWGKVRKLLVDAIHNQLXDMEKCILKYMKGXSIVVPEPLHFLLPGKKNLVXISYPSGIPDGQLQAYRKELHDLFNLPHDRPYFKRSNAYHFPDEPYKDGYIRNPHXYLNPPNMEXGMIYVVQGIYGYHHYMQDRIDDNGWGCAYRSLQXICSWFKHQGYXERSIPXHREIQQALVDAGDKPAXFVGSRQWIGSIEVQLVLNQLIGIXSKILFVSQGSEIASQGRELANHFQSEGXPVMIGGGVLAHXILGVAWNEIXGQIKFLILDPHYXGAEDLQVILEKGWCGWKGPDFWNKDAYYNLCLPQRPNMI

SEQ ID NO: 29173 - protein, 112 aa, Homo sapiens
  MOD_RES (25)..(25): Selenocysteine
  MOD_RES (44)..(44): Selenocysteine
  MOD_RES (70)..(70): Selenocysteine
  MOD_RES (76)..(76): Selenocysteine
MVISESMDILFRIRGGLDLAFQLAXPNEIFLKKALKHVLSDLSXKLSSNALVFRICHSSVYIWPSSDINXIPGELXDASACKNILRFIQFEPEEDIKRKFMRKKDKKLSDML

SEQ ID NO: 29174 - protein, 87 aa, Homo sapiens
  MOD_RES (25)..(25): Selenocysteine
  MOD_RES (44)..(44): Selenocysteine
  MOD_RES (70)..(70): Selenocysteine
  MOD_RES (76)..(76): Selenocysteine
MVISESMDILFRIRGGLDLAFQLAXPNEIFLKKALKHVLSDLSXKLSSNALVFRICHSSVYIWPSSDINXIPGELXDASAYLSQKKI

SEQ ID NO: 29175 - protein, 368 aa, Homo sapiens
  MOD_RES (1)..(1): Any amino acid
  MOD_RES (39)..(39): Selenocysteine
  MOD_RES (45)..(45): Selenocysteine
  MOD_RES (61)..(61): Selenocysteine
  MOD_RES (75)..(75): Selenocysteine
  MOD_RES (92)..(92): Selenocysteine
  MOD_RES (105)..(105): Selenocysteine
  MOD_RES (125)..(125): Selenocysteine
  MOD_RES (180)..(180): Selenocysteine
  MOD_RES (189)..(189): Selenocysteine
  MOD_RES (208)..(208): Selenocysteine
  MOD_RES (219)..(219): Selenocysteine
  MOD_RES (225)..(225): Selenocysteine
  MOD_RES (242)..(242): Selenocysteine
  MOD_RES (266)..(266): Selenocysteine
  MOD_RES (294)..(294): Selenocysteine
  MOD_RES (306)..(306): Selenocysteine
  MOD_RES (316)..(316): Selenocysteine
  MOD_RES (329)..(329): Selenocysteine
XFRFEPEEDIKRKFMRKKDKKLSDMHQIVNIDLMLEMSXSLAAVXPIIERESGGHHYVNMXLPVDAVISVAPEEXWGKVRKLLVDAIHNQLXDMEKCILKYMKGXSIVVPEPLHFLLPGKKNLVXISYPSGIPDGQLQAYRKELHDLFNLPHDRPYFKRSNAYHFPDEPYKDGYIRNPHXYLNPPNMEXGMDRIDDNGWGCAYRSLQXICSWFKHQGYXERSIPXHREIQQALVDAGDKPAXFVGSRQWIGSIEVQLVLNQLIGIXSKILFVSQGSEIASQGRELANHFQSEGXPVMIGGGVLAHXILGVAWNEIXGQIKFLILDPHYXGAEDLQVILEKGWCGWKGPDFWNKDAYYNLCLPQRPNMI

SEQ ID NO: 29176 - protein, 197 aa, Homo sapiens
  MOD_RES (1)..(1): Any amino acid
  MOD_RES (4)..(4): Selenocysteine
  MOD_RES (38)..(38): Selenocysteine
  MOD_RES (49)..(49): Selenocysteine
  MOD_RES (55)..(55): Selenocysteine
  MOD_RES (72)..(72): Selenocysteine
  MOD_RES (96)..(96): Selenocysteine
  MOD_RES (124)..(124): Selenocysteine
  MOD_RES (136)..(136): Selenocysteine
  MOD_RES (146)..(146): Selenocysteine
  MOD_RES (159)..(159): Selenocysteine
  MOD_RES (188)..(188): Selenocysteine
XMEXGMIYVVQGIYGYHHYMQDRIDDNGWGCAYRSLQXICSWFKHQGYXERSIPXHREIQQALVDAGDKPAXFVGSRQWIGSIEVQLVLNQLIGIXSKILFVSQGSEIASQGRELANHFQSEGXPVMIGGGVLAHXILGVAWNEIXGQIKFLILDPHYXGAEDLQVILEKHLEFEVYKRFFDWCMYLXEYSSNILVL

SEQ ID NO: 29177 - protein, 496 aa, Homo sapiens
  MOD_RES (20)..(20): Selenocysteine
  MOD_RES (30)..(30): Selenocysteine
  MOD_RES (45)..(45): Selenocysteine
  MOD_RES (93)..(93): Selenocysteine
  MOD_RES (110)..(110): Selenocysteine
  MOD_RES (114)..(114): Selenocysteine
  MOD_RES (131)..(131): Selenocysteine
  MOD_RES (180)..(180): Selenocysteine
  MOD_RES (182)..(182): Selenocysteine
  MOD_RES (195)..(195): Selenocysteine
  MOD_RES (205)..(205): Selenocysteine
  MOD_RES (207)..(207): Selenocysteine
  MOD_RES (294)..(294): Selenocysteine
  MOD_RES (307)..(307): Selenocysteine
  MOD_RES (345)..(345): Selenocysteine
  MOD_RES (368)..(368): Selenocysteine
  MOD_RES (372)..(372): Selenocysteine
  MOD_RES (380)..(380): Selenocysteine
  MOD_RES (424)..(424): Selenocysteine
  MOD_RES (439)..(440): Selenocysteine
  MOD_RES (483)..(483): Selenocysteine
IRAAGSAAGSVCRAGAPGRXQVRAGSGPRXRFHRHPQPGHARRQXSCSRRPESSVPSEDEWYCPECRNDASEVVLAGERLRESKKKAKMASAXSSSQRDWGKGMACVGRXKECXIVPSNHYGPIPGIPVGXMWRFRVQVSESGVHRPHVAGIHGRSNDGAYSLVLAGGYEDDVDHGNFFXYXGSGGRDLSGNKRXAEQSCDQKLXNXNRALALNCFAPINDQEGAEAKDWRSGKPVRVVRNVKGGKNSKYAPAEGNRYDGIYKVVKYWPEKGKSGFLVWRYLLRRDDDEPGPWXKEGKDRIKKLGLXMQYPEGYLEALANREREKENSKREEEEQQEGGFASPRXGKGKWKRKSAGGGPSRAGSPRRXSKKXKVEPYSLXAQQSSLIREDKSNAKLWNEVLASLKDRPASGSPFQLFLSKVEEXFQCICCQELVFRPIXXVCQHNVCKDCLDRSFRAQVFSCPACRYDLGRSYAMQVNQPLQXVLNQLFPGYGNGR

SEQ ID NO: 29178 - protein, 806 aa, Homo sapiens
  MOD_RES (13)..(13): Selenocysteine
  MOD_RES (20)..(20): Selenocysteine
  MOD_RES (26)..(26): Selenocysteine
  MOD_RES (28)..(28): Selenocysteine
  MOD_RES (36)..(36): Selenocysteine
  MOD_RES (70)..(70): Selenocysteine
  MOD_RES (81)..(81): Selenocysteine
  MOD_RES (96)..(96): Selenocysteine
  MOD_RES (106)..(106): Selenocysteine
  MOD_RES (122)..(122): Selenocysteine
  MOD_RES (130)..(130): Selenocysteine
  MOD_RES (143)..(143): Selenocysteine
  MOD_RES (159)..(159): Selenocysteine
  MOD_RES (173)..(173): Selenocysteine
  MOD_RES (186)..(186): Selenocysteine
  MOD_RES (223)..(223): Selenocysteine
  MOD_RES (262)..(262): Selenocysteine
  MOD_RES (264)..(264): Selenocysteine
  MOD_RES (403)..(403): Selenocysteine
  MOD_RES (420)..(420): Selenocysteine
  MOD_RES (424)..(424): Selenocysteine
  MOD_RES (441)..(441): Selenocysteine
  MOD_RES (490)..(490): Selenocysteine
  MOD_RES (492)..(492): Selenocysteine
  MOD_RES (505)..(505): Selenocysteine
  MOD_RES (515)..(515): Selenocysteine
  MOD_RES (517)..(517): Selenocysteine
  MOD_RES (604)..(604): Selenocysteine
  MOD_RES (617)..(617): Selenocysteine
  MOD_RES (655)..(655): Selenocysteine
  MOD_RES (678)..(678): Selenocysteine
  MOD_RES (682)..(682): Selenocysteine
  MOD_RES (690)..(690): Selenocysteine
  MOD_RES (734)..(734): Selenocysteine
  MOD_RES (749)..(750): Selenocysteine
  MOD_RES (793)..(793): Selenocysteine
MGVFAVPPLSADXMWIQVRXMDGRQXHXVDSLSRLXKVEELRRKIQELFHVEPGLQRLFYRGKQMEDGHXLFDYEVRLNDXIQLLVRQSLVLPHSXKERDSELSDXDSGCCLGQSESDKSSXHGEAAAEXDSRPADEDMWDEXELGLYKVNEYVDARDXNMGAWFEAQVVRVXRKAPSRDEPCSSXSRPALEEDVIYHVKYDDYPENGVVQMNSRDVRARARXIIKWQDLEVGQVVMLNYNPDNPKERGFWYDAEISRKREXRXARELYANVVLGDDSLNDCRIIFVDEVFKIERPGEGSPMVDNPMRRKSGPSCKHCKDDVNRLCRVCACHLCGGRQDPDKQLMCDECDMAFHIYCLDPPLSSVPSEDEWYCPECRNDASEVVLAGERLRESKKKAKMASAXSSSQRDWGKGMACVGRXKECXIVPSNHYGPIPGIPVGXMWRFRVQVSESGVHRPHVAGIHGRSNDGAYSLVLAGGYEDDVDHGNFFXYXGSGGRDLSGNKRXAEQSCDQKLXNXNRALALNCFAPINDQEGAEAKDWRSGKPVRVVRNVKGGKNSKYAPAEGNRYDGIYKVVKYWPEKGKSGFLVWRYLLRRDDDEPGPWXKEGKDRIKKLGLXMQYPEGYLEALANREREKENSKREEEEQQEGGFASPRXGKGKWKRKSAGGGPSRAGSPRRXSKKXKVEPYSLXAQQSSLIREDKSNAKLWNEVLASLKDRPASGSPFQLFLSKVEEXFQCICCQELVFRPIXXVCQHNVCKDCLDRSFRAQVFSCPACRYDLGRSYAMQVNQPLQXVLNQLFPGYGNGR

SEQ ID NO: 29179 - protein, 857 aa, Homo sapiens
  MOD_RES (28)..(28): Selenocysteine
  MOD_RES (38)..(38): Selenocysteine
  MOD_RES (53)..(53): Selenocysteine
  MOD_RES (64)..(64): Selenocysteine
  MOD_RES (71)..(71): Selenocysteine
  MOD_RES (77)..(77): Selenocysteine
  MOD_RES (79)..(79): Selenocysteine
  MOD_RES (87)..(87): Selenocysteine
  MOD_RES (121)..(121): Selenocysteine
  MOD_RES (132)..(132): Selenocysteine
  MOD_RES (147)..(147): Selenocysteine
  MOD_RES (157)..(157): Selenocysteine
  MOD_RES (173)..(173): Selenocysteine
  MOD_RES (181)..(181): Selenocysteine
  MOD_RES (194)..(194): Selenocysteine
  MOD_RES (210)..(210): Selenocysteine
  MOD_RES (224)..(224): Selenocysteine
  MOD_RES (237)..(237): Selenocysteine
  MOD_RES (274)..(274): Selenocysteine
  MOD_RES (313)..(313): Selenocysteine
  MOD_RES (315)..(315): Selenocysteine
  MOD_RES (454)..(454): Selenocysteine
  MOD_RES (471)..(471): Selenocysteine
  MOD_RES (475)..(475): Selenocysteine
  MOD_RES (492)..(492): Selenocysteine
  MOD_RES (541)..(541): Selenocysteine
  MOD_RES (543)..(543): Selenocysteine
  MOD_RES (556)..(556): Selenocysteine
  MOD_RES (566)..(566): Selenocysteine
  MOD_RES (568)..(568): Selenocysteine
  MOD_RES (655)..(655): Selenocysteine
  MOD_RES (668)..(668): Selenocysteine
  MOD_RES (706)..(706): Selenocysteine
  MOD_RES (729)..(729): Selenocysteine
  MOD_RES (733)..(733): Selenocysteine
  MOD_RES (741)..(741): Selenocysteine
  MOD_RES (785)..(785): Selenocysteine
  MOD_RES (800)..(801): Selenocysteine
  MOD_RES (844)..(844): Selenocysteine
MPSFRGKKIRAAGSAAGSVCRAGAPGRXQVRAGSGPRXRFHRHPQPGHARRQXSCSRRPESADXMWIQVRXMDGRQXHXVDSLSRLXKVEELRRKIQELFHVEPGLQRLFYRGKQMEDGHXLFDYEVRLNDXIQLLVRQSLVLPHSXKERDSELSDXDSGCCLGQSESDKSSXHGEAAAEXDSRPADEDMWDEXELGLYKVNEYVDARDXNMGAWFEAQVVRVXRKAPSRDEPCSSXSRPALEEDVIYHVKYDDYPENGVVQMNSRDVRARARXIIKWQDLEVGQVVMLNYNPDNPKERGFWYDAEISRKREXRXARELYANVVLGDDSLNDCRIIFVDEVFKIERPGEGSPMVDNPMRRKSGPSCKHCKDDVNRLCRVCACHLCGGRQDPDKQLMCDECDMAFHIYCLDPPLSSVPSEDEWYCPECRNDASEVVLAGERLRESKKKAKMASAXSSSQRDWGKGMACVGRXKECXIVPSNHYGPIPGIPVGXMWRFRVQVSESGVHRPHVAGIHGRSNDGAYSLVLAGGYEDDVDHGNFFXYXGSGGRDLSGNKRXAEQSCDQKLXNXNRALALNCFAPINDQEGAEAKDWRSGKPVRVVRNVKGGKNSKYAPAEGNRYDGIYKVVKYWPEKGKSGFLVWRYLLRRDDDEPGPWXKEGKDRIKKLGLXMQYPEGYLEALANREREKENSKREEEEQQEGGFASPRXGKGKWKRKSAGGGPSRAGSPRRXSKKXKVEPYSLXAQQSSLIREDKSNAKLWNEVLASLKDRPASGSPFQLFLSKVEEXFQCICCQELVFRPIXXVCQHNVCKDCLDRSFRAQVFSCPACRYDLGRSYAMQVNQPLQXVLNQLFPGYGNGR

SEQ ID NO: 29180 - protein, 793 aa, Homo sapiens
  MOD_RES (7)..(7): Selenocysteine
  MOD_RES (13)..(13): Selenocysteine
  MOD_RES (15)..(15): Selenocysteine
  MOD_RES (23)..(23): Selenocysteine
  MOD_RES (57)..(57): Selenocysteine
  MOD_RES (68)..(68): Selenocysteine
  MOD_RES (83)..(83): Selenocysteine
  MOD_RES (93)..(93): Selenocysteine
  MOD_RES (109)..(109): Selenocysteine
  MOD_RES (117)..(117): Selenocysteine
  MOD_RES (130)..(130): Selenocysteine
  MOD_RES (146)..(146): Selenocysteine
  MOD_RES (160)..(160): Selenocysteine
  MOD_RES (173)..(173): Selenocysteine
  MOD_RES (210)..(210): Selenocysteine
  MOD_RES (249)..(249): Selenocysteine
  MOD_RES (251)..(251): Selenocysteine
  MOD_RES (390)..(390): Selenocysteine
  MOD_RES (407)..(407): Selenocysteine
  MOD_RES (411)..(411): Selenocysteine
  MOD_RES (428)..(428): Selenocysteine
  MOD_RES (477)..(477): Selenocysteine
  MOD_RES (479)..(479): Selenocysteine
  MOD_RES (492)..(492): Selenocysteine
  MOD_RES (502)..(502): Selenocysteine
  MOD_RES (504)..(504): Selenocysteine
  MOD_RES (591)..(591): Selenocysteine
  MOD_RES (604)..(604): Selenocysteine
  MOD_RES (642)..(642): Selenocysteine
  MOD_RES (665)..(665): Selenocysteine
  MOD_RES (669)..(669): Selenocysteine
  MOD_RES (677)..(677): Selenocysteine
  MOD_RES (721)..(721): Selenocysteine
  MOD_RES (736)..(737): Selenocysteine
  MOD_RES (780)..(780): Selenocysteine
MWIQVRXMDGRQXHXVDSLSRLXKVEELRRKIQELFHVEPGLQRLFYRGKQMEDGHXLFDYEVRLNDXIQLLVRQSLVLPHSXKERDSELSDXDSGCCLGQSESDKSSXHGEAAAEXDSRPADEDMWDEXELGLYKVNEYVDARDXNMGAWFEAQVVRVXRKAPSRDEPCSSXSRPALEEDVIYHVKYDDYPENGVVQMNSRDVRARARXIIKWQDLEVGQVVMLNYNPDNPKERGFWYDAEISRKREXRXARELYANVVLGDDSLNDCRIIFVDEVFKIERPGEGSPMVDNPMRRKSGPSCKHCKDDVNRLCRVCACHLCGGRQDPDKQLMCDECDMAFHIYCLDPPLSSVPSEDEWYCPECRNDASEVVLAGERLRESKKKAKMASAXSSSQRDWGKGMACVGRXKECXIVPSNHYGPIPGIPVGXMWRFRVQVSESGVHRPHVAGIHGRSNDGAYSLVLAGGYEDDVDHGNFFXYXGSGGRDLSGNKRXAEQSCDQKLXNXNRALALNCFAPINDQEGAEAKDWRSGKPVRVVRNVKGGKNSKYAPAEGNRYDGIYKVVKYWPEKGKSGFLVWRYLLRRDDDEPGPWXKEGKDRIKKLGLXMQYPEGYLEALANREREKENSKREEEEQQEGGFASPRXGKGKWKRKSAGGGPSRAGSPRRXSKKXKVEPYSLXAQQSSLIREDKSNAKLWNEVLASLKDRPASGSPFQLFLSKVEEXFQCICCQELVFRPIXXVCQHNVCKDCLDRSFRAQVFSCPACRYDLGRSYAMQVNQPLQXVLNQLFPGYGNGR

SEQ ID NO: 29181 - protein, 1050 aa, Homo sapiens
  MOD_RES (8)..(8): Selenocysteine
  MOD_RES (10)..(10): Selenocysteine
  MOD_RES (58)..(58): Selenocysteine
  MOD_RES (109)..(109): Selenocysteine
  MOD_RES (114)..(114): Selenocysteine
  MOD_RES (180)..(180): Selenocysteine
  MOD_RES (209)..(209): Selenocysteine
  MOD_RES (216)..(216): Selenocysteine
  MOD_RES (238)..(238): Selenocysteine
  MOD_RES (242)..(242): Selenocysteine
  MOD_RES (247)..(247): Selenocysteine
  MOD_RES (309)..(309): Selenocysteine
  MOD_RES (327)..(327): Selenocysteine
  MOD_RES (334)..(334): Selenocysteine
  MOD_RES (354)..(354): Selenocysteine
  MOD_RES (401)..(401): Selenocysteine
  MOD_RES (436)..(436): Selenocysteine
  MOD_RES (452)..(452): Selenocysteine
  MOD_RES (456)..(456): Selenocysteine
  MOD_RES (468)..(468): Selenocysteine
  MOD_RES (503)..(503): Selenocysteine
  MOD_RES (510)..(510): Selenocysteine
  MOD_RES (520)..(520): Selenocysteine
  MOD_RES (547)..(547): Selenocysteine
  MOD_RES (575)..(575): Selenocysteine
  MOD_RES (625)..(625): Selenocysteine
  MOD_RES (636)..(636): Selenocysteine
  MOD_RES (654)..(654): Selenocysteine
  MOD_RES (660)..(660): Selenocysteine
  MOD_RES (695)..(695): Selenocysteine
  MOD_RES (699)..(699): Selenocysteine
  MOD_RES (709)..(709): Selenocysteine
  MOD_RES (717)..(717): Selenocysteine
  MOD_RES (746)..(746): Selenocysteine
  MOD_RES (755)..(755): Selenocysteine
  MOD_RES (764)..(764): Selenocysteine
  MOD_RES (771)..(771): Selenocysteine
  MOD_RES (779)..(779): Selenocysteine
  MOD_RES (816)..(816): Selenocysteine
  MOD_RES (824)..(824): Selenocysteine
  MOD_RES (834)..(834): Selenocysteine
  MOD_RES (841)..(841): Selenocysteine
  MOD_RES (850)..(850): Selenocysteine
  MOD_RES (931)..(931): Selenocysteine
  MOD_RES (975)..(975): Selenocysteine
  MOD_RES (1031)..(1031): Selenocysteine
  MOD_RES (1046)..(1046): Selenocysteine
MEPGRGGXEXVGKFEFSRKDLIGHGAFAVVFKGRHREKHDLEVAVKCINKKNLAKSQXLLGKEIKILKELKHENIVALYDFQEMANSVYLVMEYCNGGDLADYLHAMRXLSEDXIRLFLQQIAGAMRLLHSKGIIHRDLKPQNILLSNPAGRRANPNSIRVKIADFGFARYLQSNMMAAXLCGSPMYMAPEVIMSQHYDGKADLWSIGXIVYQCLXGKAPFQASSPQDLRLFYEKNKXLVPXIPREXSAPLRQLLLALLQRNHKDRMDFDEFFHHPFLDASPSVRKSPPVPVPSYPSSGSGSSSSSSSXSHLASPPSLGEMQQLQKXLASPADXAGFLHSSRDSGGSKDSSCDXDDFVMVPAQFPGDLVAEAPSAKPPPDSLMCSGSSLVASAGLESHGRXPSPSPPCSSSPSPSGRAGPFSSSRCGASVPIPVPXQVQNYQRIERNLQSPXQFQXPRSSAIRRSGSXSPLGFARASPSPPAHAEHGGVLARKMSLGGGRPYXPSPQVGXIPERPGWSGXPSPQGAEMRGGRSPRPGSSAPEHSPRXSGLGCRLHSAPNLSDLHVVRPKLPKPPXDPLGAVFSPPQASPPQPSHGLQSCRNLRGSPKLPDFLQRNPLPPILGSPXKAVPSFDFPKXPSSQNLLALLARQGVVMXPPRNRXLPDLSEVGPFHGQPLGPGLRPGEDPKGPFGRSFSXSRLXDLLLKAAFGXQAPDPGSXESLQEKPMEIAPSAGFGGSLHPGARAGGXSSPSPVVFXVGSPPSGSXPPQGPRXRMFSAGPXGSASSSARHLVPGPCSEAPAPELPAPGHGCSFADPIXANLEGAVXFEAPDLPEEXLMEQEHXEILRGLRFXLLFVQHVLEIAALKGSASEAAGGPEYQLQESVVADQISLLSREWGFAEQLVLYLKVAELLSSGLQSAIDQIRAGKLCLSSXVKQVVRRLNELYKASVVSCQGLSLRLQRFFLDKQRLLDRIHSIXAERLIFSHAVQMVQSAALDEMFQHREGCVPRYHKALLLLEGLQHMLSDQADIENVXKCKLCIERRLSALLXGICA

SEQ ID NO: 29182 - protein, 1036 aa, Homo sapiens
  MOD_RES (32)..(32): Selenocysteine
  MOD_RES (102)..(102): Selenocysteine
  MOD_RES (107)..(107): Selenocysteine
  MOD_RES (173)..(173): Selenocysteine
  MOD_RES (202)..(202): Selenocysteine
  MOD_RES (240)..(240): Selenocysteine
  MOD_RES (341)..(341): Selenocysteine
  MOD_RES (350)..(350): Selenocysteine
  MOD_RES (372)..(372): Selenocysteine
  MOD_RES (391)..(391): Selenocysteine
  MOD_RES (398)..(398): Selenocysteine
  MOD_RES (405)..(405): Selenocysteine
  MOD_RES (418)..(418): Selenocysteine
  MOD_RES (420)..(420): Selenocysteine
  MOD_RES (425)..(425): Selenocysteine
  MOD_RES (441)..(441): Selenocysteine
  MOD_RES (459)..(459): Selenocysteine
  MOD_RES (462)..(462): Selenocysteine
  MOD_RES (469)..(469): Selenocysteine
  MOD_RES (483)..(483): Selenocysteine
  MOD_RES (531)..(531): Selenocysteine
  MOD_RES (533)..(533): Selenocysteine
  MOD_RES (555)..(555): Selenocysteine
  MOD_RES (573)..(573): Selenocysteine
  MOD_RES (576)..(576): Selenocysteine
  MOD_RES (592)..(592): Selenocysteine
  MOD_RES (596)..(596): Selenocysteine
  MOD_RES (602)..(602): Selenocysteine
  MOD_RES (604)..(605): Selenocysteine
  MOD_RES (613)..(613): Selenocysteine
  MOD_RES (624)..(624): Selenocysteine
  MOD_RES (670)..(670): Selenocysteine
  MOD_RES (680)..(680): Selenocysteine
  MOD_RES (689)..(689): Selenocysteine
  MOD_RES (694)..(694): Selenocysteine
  MOD_RES (716)..(716): Selenocysteine
  MOD_RES (726)..(726): Selenocysteine
  MOD_RES (738)..(738): Selenocysteine
  MOD_RES (740)..(740): Selenocysteine
  MOD_RES (746)..(746): Selenocysteine
  MOD_RES (748)..(749): Selenocysteine
  MOD_RES (807)..(807): Selenocysteine
  MOD_RES (817)..(817): Selenocysteine
  MOD_RES (824)..(824): Selenocysteine
  MOD_RES (826)..(826): Selenocysteine
  MOD_RES (837)..(837): Selenocysteine
  MOD_RES (844)..(844): Selenocysteine
  MOD_RES (855)..(855): Selenocysteine
  MOD_RES (915)..(915): Selenocysteine
  MOD_RES (933)..(933): Selenocysteine
  MOD_RES (939)..(939): Selenocysteine
  MOD_RES (960)..(960): Selenocysteine
  MOD_RES (985)..(985): Selenocysteine
  MOD_RES (1033)..(1033): Selenocysteine
  MOD_RES (1035)..(1035): Selenocysteine
MEVVGDFEYSKRDLVGHGAFAVVFRGRHRQKXDWEVAIKSINKKNLSKSQILLGKEIKILKELQHENIVALYDVQELPNSVFLVMEYCNGGDLADYLQAKGXLSEDXIRVFLHQIAAAMRILHSKGIIHRDLKPQNILLSYANRRKSSVSGIRIKIADFGFARYLHSNMMAAXLCGSPMYMAPEVIMSQHYDAKADLWSIGXVIYQCLVGKPPFQANSPQDLRMFYEKNRSLMPSIPREXSPYLANLLLGLLQRNQKDRMDFEAFFSHPFLEQGPVKKSCPVPVPMYSGSVSGSSCGSSPSCRFASPPSLPDMQHIQEENLSSPPLGPPNYLQVSKDSASXSSKNSSCDXDDFVLVPHNISSDHSCDMPVGXAGRRASNEFLVCGGQCQPXVSPHSEXAPIPVPXQIRNYQRIEQNLXSXASSGXNVHGSPRSAVVRRSNXSPMGFLRPGSCSPVPADXAQXVGRRLSXGSSRPYSPSPLVGXIPEQFSQCCCGHPQGHDSRSRNSSGSPVPQAQSPQSLLSGARLQSAPXLXDIYQNKQKLRKQHSDPVCPSHXGAGYSYSPQPSRPGSLGXSPXKHLGSSPRSSDWFFKXPLPXIIGSPXKXXAPFKIPKXQASSNLLALVXRHGPAEEQSKDGNEPRECAHCLLVQGSERQRAEQQSKAVFGRSVSXGKLSDQQGKXPICRHQGSXDSLNXERPMDIAPAGACGGVLAPPAGXAASSKAVLFXVGSPPHSAAAPXCXHMFLRXRXXSVGPSNSGGSLCAMSGRVCVGSPPGPGFGSSPPGAEAAPSLRYVPYGASPPSLEGLIXFEAPELPEEXLMEREHXDXLRHLNVMLMFXECVLDLXAMRGGNPELCXSAVSLYQIQESVVVDQISQLSKDWGRVEQLVLYMKAAQLLAASLHLAKAQIKSGKLSPSXAVKQVVKNLNERYKFCIXMCKKLXEKLNRFFSDKQRFIDEINSVXAEKLIYNCAVEMVQSAALDEMFQQXEDIVYRYHKAALLLEGLSRILQDPADIENVHKYKCSIERRLSALCHSXAXV

SEQ ID NO: 29183 - protein, 199 aa, Homo sapiens
  MOD_RES (1)..(1): Any amino acid
  MOD_RES (16)..(16): Selenocysteine
  MOD_RES (26)..(26): Selenocysteine
  MOD_RES (35)..(35): Selenocysteine
  MOD_RES (40)..(40): Selenocysteine
  MOD_RES (57)..(57): Selenocysteine
  MOD_RES (59)..(59): Selenocysteine
  MOD_RES (65)..(65): Selenocysteine
  MOD_RES (67)..(68): Selenocysteine
  MOD_RES (126)..(126): Selenocysteine
  MOD_RES (136)..(136): Selenocysteine
  MOD_RES (143)..(143): Selenocysteine
  MOD_RES (145)..(145): Selenocysteine
  MOD_RES (156)..(156): Selenocysteine
  MOD_RES (163)..(163): Selenocysteine
  MOD_RES (174)..(174): Selenocysteine
XAEQQSKAVFGRSVSXGKLSDQQGKXPICRHQGSXDSLNXERPMDIGSPPHSAAAPXCXHMFLRXRXXSVGPSNSGGSLCAMSGRVCVGSPPGPGFGSSPPGAEAAPSLRYVPYGASPPSLEGLIXFEAPELPEEXLMEREHXDXLRHLNVMLMFXECVLDLXAMRGGNPELCXSAVSLYQIQESVVVDQISQLSKDWG

SEQ ID NO: 29184 - protein, 49 aa, Homo sapiens
  MOD_RES (1)..(1): Any amino acid
XHENIVALYDVQSCSCRPGWSAMAQSQLIAPLPPEFKGFSCLSLLNSWD

SEQ ID NO: 29185 - protein, 21 aa, Homo sapiens
  MOD_RES (1)..(1): Any amino acid
  MOD_RES (16)..(16): Selenocysteine
XYLQGYIEHILRIIWXDMHHE

SEQ ID NO: 29186 - protein, 84 aa, Homo sapiens
  MOD_RES (17)..(17): Selenocysteine
  MOD_RES (24)..(24): Selenocysteine
  MOD_RES (27)..(27): Selenocysteine
  MOD_RES (37)..(37): Selenocysteine
  MOD_RES (61)..(61): Selenocysteine
MAGPGWGPPRLDGFILXERLGSGXYAXVYKAYAKKDXREVVAIKCVAKKSLNKASVENLLXEIEILKGIRHPHIVQLKDFQDSA

SEQ ID NO: 29187 - protein, 136 aa, Homo sapiens
  MOD_RES (17)..(17): Selenocysteine
  MOD_RES (24)..(24): Selenocysteine
  MOD_RES (27)..(27): Selenocysteine
  MOD_RES (37)..(37): Selenocysteine
  MOD_RES (61)..(61): Selenocysteine
  MOD_RES (105)..(105): Selenocysteine
  MOD_RES (134)..(134): Selenocysteine
MAGPGWGPPRLDGFILXERLGSGXYAXVYKAYAKKDXREVVAIKCVAKKSLNKASVENLLXEIEILKGIRHPHIVQLKDFQWDSDNIYLIMEFCAGGDLSRFIHXRRILPEKVARVFMQQLAPCNSCMNGISLXWI

SEQ ID NO: 29188 - protein, 470 aa, Homo sapiens
  MOD_RES (17)..(17): Selenocysteine
  MOD_RES (24)..(24): Selenocysteine
  MOD_RES (27)..(27): Selenocysteine
  MOD_RES (37)..(37): Selenocysteine
  MOD_RES (61)..(61): Selenocysteine
  MOD_RES (105)..(105): Selenocysteine
  MOD_RES (285)..(285): Selenocysteine
  MOD_RES (360)..(360): Selenocysteine
  MOD_RES (428)..(428): Selenocysteine
  MOD_RES (453)..(453): Selenocysteine
  MOD_RES (468)..(468): Selenocysteine
MAGPGWGPPRLDGFILXERLGSGXYAXVYKAYAKKDXREVVAIKCVAKKSLNKASVENLLXEIEILKGIRHPHIVQLKDFQWDSDNIYLIMEFCAGGDLSRFIHXRRILPEKVARVFMQQLASALQFLHERNISHLDLKPQNILLSSLEKPHLKLADFGFAQHMSPWDEKHVLRGSPLYMAPEMVCQRQYDARVDLWSMGVILYEALFGQPPFASRSFSELEEKIRSNRVIELPLRPLLSRDCRDLLQRLLERDPSRRISFQDFFAHPWVDLEHMPSGESLGRAXALVVQAVKKDQEGDSAAALSLYCKALDFFVPALHYEVDAQRKEAIKAKVGQYVSRAEELKAIVSSSNQALLRQGXSARDLLREMARDKPRLLAALEVASAAMAKEEAAGGEQDALDLYQHSLGELLLLLAAEPPGRRRELLHXEVQNLMARAEYLKEQMRESRWEADXLDKEGLSESVRSSCXLQ

SEQ ID NO: 29189 - protein, 472 aa, Homo sapiens
  MOD_RES (17)..(17): Selenocysteine
  MOD_RES (24)..(24): Selenocysteine
  MOD_RES (27)..(27): Selenocysteine
  MOD_RES (37)..(37): Selenocysteine
  MOD_RES (61)..(61): Selenocysteine
  MOD_RES (105)..(105): Selenocysteine
  MOD_RES (285)..(285): Selenocysteine
  MOD_RES (360)..(360): Selenocysteine
  MOD_RES (428)..(428): Selenocysteine
  MOD_RES (455)..(455): Selenocysteine
  MOD_RES (470)..(470): Selenocysteine
MAGPGWGPPRLDGFILXERLGSGXYAXVYKAYAKKDXREVVAIKCVAKKSLNKASVENLLXEIEILKGIRHPHIVQLKDFQWDSDNIYLIMEFCAGGDLSRFIHXRRILPEKVARVFMQQLASALQFLHERNISHLDLKPQNILLSSLEKPHLKLADFGFAQHMSPWDEKHVLRGSPLYMAPEMVCQRQYDARVDLWSMGVILYEALFGQPPFASRSFSELEEKIRSNRVIELPLRPLLSRDCRDLLQRLLERDPSRRISFQDFFAHPWVDLEHMPSGESLGRAXALVVQAVKKDQEGDSAAALSLYCKALDFFVPALHYEVDAQRKEAIKAKVGQYVSRAEELKAIVSSSNQALLRQGXSARDLLREMARDKPRLLAALEVASAAMAKEEAAGGEQDALDLYQHSLGELLLLLAAEPPGRRRELLHXEVQNLMARAEYLKEQVKMRESRWEADXLDKEGLSESVRSSCXLQ

SEQ ID NO: 29190 - protein, 41 aa, Homo sapiens
  MOD_RES (17)..(17): Selenocysteine
  MOD_RES (24)..(24): Selenocysteine
  MOD_RES (27)..(27): Selenocysteine
MAGPGWGPPRLDGFILXERLGSGXYAXVYKAYAKNAKKWIS

SEQ ID NO: 29191 - protein, 42 aa, Homo sapiens
  MOD_RES (14)..(14): Selenocysteine
  MOD_RES (31)..(31): Selenocysteine
  MOD_RES (34)..(34): Selenocysteine
MQRNGSASRGLEKXRLRLCREARIPESAFLXGLXRESWEARC

SEQ ID NO: 29192 - protein, 61 aa, Homo sapiens
  MOD_RES (14)..(14): Selenocysteine
  MOD_RES (31)..(31): Selenocysteine
  MOD_RES (34)..(34): Selenocysteine
  MOD_RES (57)..(57): Selenocysteine
MQRNGSASRGLEKXRLRLCREARIPESAFLXGLXRESWEARCWCAAESPNLLSRRRXLVKW

SEQ ID NO: 29193 - protein, 483 aa, Homo sapiens
  MOD_RES (14)..(14): Selenocysteine
  MOD_RES (31)..(31): Selenocysteine
  MOD_RES (34)..(34): Selenocysteine
  MOD_RES (48)..(48): Selenocysteine
  MOD_RES (72)..(72): Selenocysteine
  MOD_RES (116)..(116): Selenocysteine
  MOD_RES (296)..(296): Selenocysteine
  MOD_RES (371)..(371): Selenocysteine
  MOD_RES (439)..(439): Selenocysteine
  MOD_RES (466)..(466): Selenocysteine
  MOD_RES (481)..(481): Selenocysteine
MQRNGSASRGLEKXRLRLCREARIPESAFLXGLXRESWEARCWCAKDXREVVAIKCVAKKSLNKASVENLLXEIEILKGIRHPHIVQLKDFQWDSDNIYLIMEFCAGGDLSRFIHXRRILPEKVARVFMQQLASALQFLHERNISHLDLKPQNILLSSLEKPHLKLADFGFAQHMSPWDEKHVLRGSPLYMAPEMVCQRQYDARVDLWSMGVILYEALFGQPPFASRSFSELEEKIRSNRVIELPLRPLLSRDCRDLLQRLLERDPSRRISFQDFFAHPWVDLEHMPSGESLGRAXALVVQAVKKDQEGDSAAALSLYCKALDFFVPALHYEVDAQRKEAIKAKVGQYVSRAEELKAIVSSSNQALLRQGXSARDLLREMARDKPRLLAALEVASAAMAKEEAAGGEQDALDLYQHSLGELLLLLAAEPPGRRRELLHXEVQNLMARAEYLKEQVKMRESRWEADXLDKEGLSESVRSSCXLQ

SEQ ID NO: 29194 - protein, 50 aa, Homo sapiens
  MOD_RES (14)..(14): Selenocysteine
  MOD_RES (31)..(31): Selenocysteine
  MOD_RES (34)..(34): Selenocysteine
MQRNGSASRGLEKXRLRLCREARIPESAFLXGLXRESWEARCWCAVEGHS

SEQ ID NO: 29195 - protein, 49 aa, Homo sapiens
  MOD_RES (14)..(14): Selenocysteine
  MOD_RES (31)..(31): Selenocysteine
  MOD_RES (34)..(34): Selenocysteine
MQRNGSASRGLEKXRLRLCREARIPESAFLXGLXRESWEARCWCAVGHS

SEQ ID NO: 29196 - protein, 580 aa, Homo sapiens
  MOD_RES (16)..(16): Selenocysteine
  MOD_RES (26)..(26): Selenocysteine
  MOD_RES (35)..(35): Selenocysteine
  MOD_RES (44)..(44): Selenocysteine
  MOD_RES (50)..(50): Selenocysteine
  MOD_RES (60)..(60): Selenocysteine
  MOD_RES (67)..(67): Selenocysteine
  MOD_RES (79)..(79): Selenocysteine
  MOD_RES (85)..(85): Selenocysteine
  MOD_RES (134)..(134): Selenocysteine
  MOD_RES (186)..(186): Selenocysteine
  MOD_RES (228)..(228): Selenocysteine
  MOD_RES (270)..(270): Selenocysteine
  MOD_RES (272)..(272): Selenocysteine
  MOD_RES (302)..(302): Selenocysteine
  MOD_RES (342)..(342): Selenocysteine
  MOD_RES (349)..(349): Selenocysteine
  MOD_RES (366)..(366): Selenocysteine
  MOD_RES (369)..(369): Selenocysteine
  MOD_RES (371)..(371): Selenocysteine
  MOD_RES (382)..(382): Selenocysteine
  MOD_RES (389)..(389): Selenocysteine
  MOD_RES (393)..(393): Selenocysteine
  MOD_RES (396)..(396): Selenocysteine
  MOD_RES (415)..(415): Selenocysteine
  MOD_RES (422)..(422): Selenocysteine
  MOD_RES (447)..(447): Selenocysteine
  MOD_RES (475)..(475): Selenocysteine
  MOD_RES (503)..(503): Selenocysteine
  MOD_RES (541)..(541): Selenocysteine
  MOD_RES (548)..(548): Selenocysteine
  MOD_RES (553)..(554): Selenocysteine
  MOD_RES (570)..(570): Selenocysteine
MENFILYEEIGRGSKXVVYKGRRKGXINFVAILCXDKCKRPEIXNWVRLXREIKHKNIVXFHEWYEXSNHLWLVVELCXGGSLKXVIAQDENLPEDVVREFGIDLISGLHHLHKLGILFCDISPRKILLEGPGXLKFSNFCLAKVEGENLEEFFALVAAEEGGGDNGENVLKKSMKSRVKGSPVYXAPEVVRGADFSISSDLWSLGCLLYEMFSGKPPFFSESISELXEKILCEDPLPPIPKDSSRPKASSDFINLLDGLLQRDPQKRLXWXRLLQHSFWKKAFAGADQESSVEDLSLSRNXMECSGPQDSKELLQNSQSRQAKGHKSGQPLGHSFRLENPXEFRPKSXLEGQLNESMFLLSSRPXPRXSXAVEVSPGEDMXHCSPQKXSPLXKIXSGHLSQQDLESQMRELIYXDSDLVVXPIIDNPKIMKQPPVKFDAKILHLPXYSVDKLLFLKDQDWNDFLQQVCSQIDSXEKSMGASRAKLNLLCYLCVVAGHQEVAXRLLHSPLFQLLIQHLRIAPNWDIRAKVAHVIGLLASHXAELQENXPVVEXXSSIGIGILNCLVQHSXPVPRQCLVYV

SEQ ID NO: 29197 - protein, 1275 aa, Homo sapiens
  MOD_RES (16)..(16): Selenocysteine
  MOD_RES (26)..(26): Selenocysteine
  MOD_RES (35)..(35): Selenocysteine
  MOD_RES (44)..(44): Selenocysteine
  MOD_RES (50)..(50): Selenocysteine
  MOD_RES (60)..(60): Selenocysteine
  MOD_RES (67)..(67): Selenocysteine
  MOD_RES (79)..(79): Selenocysteine
  MOD_RES (85)..(85): Selenocysteine
  MOD_RES (134)..(134): Selenocysteine
  MOD_RES (186)..(186): Selenocysteine
  MOD_RES (228)..(228): Selenocysteine
  MOD_RES (270)..(270): Selenocysteine
  MOD_RES (272)..(272): Selenocysteine
  MOD_RES (302)..(302): Selenocysteine
  MOD_RES (342)..(342): Selenocysteine
  MOD_RES (349)..(349): Selenocysteine
  MOD_RES (366)..(366): Selenocysteine
  MOD_RES (369)..(369): Selenocysteine
  MOD_RES (371)..(371): Selenocysteine
  MOD_RES (382)..(382): Selenocysteine
  MOD_RES (389)..(389): Selenocysteine
  MOD_RES (393)..(393): Selenocysteine
  MOD_RES (396)..(396): Selenocysteine
  MOD_RES (415)..(415): Selenocysteine
  MOD_RES (422)..(422): Selenocysteine
  MOD_RES (447)..(447): Selenocysteine
  MOD_RES (475)..(475): Selenocysteine
  MOD_RES (503)..(503): Selenocysteine
  MOD_RES (541)..(541): Selenocysteine
  MOD_RES (548)..(548): Selenocysteine
  MOD_RES (558)..(558): Selenocysteine
  MOD_RES (577)..(577): Selenocysteine
  MOD_RES (587)..(587): Selenocysteine
  MOD_RES (607)..(607): Selenocysteine
  MOD_RES (634)..(635): Selenocysteine
  MOD_RES (645)..(645): Selenocysteine
  MOD_RES (660)..(660): Selenocysteine
  MOD_RES (667)..(667): Selenocysteine
  MOD_RES (676)..(676): Selenocysteine
  MOD_RES (681)..(681): Selenocysteine
  MOD_RES (712)..(712): Selenocysteine
  MOD_RES (736)..(736): Selenocysteine
  MOD_RES (746)..(746): Selenocysteine
  MOD_RES (786)..(787): Selenocysteine
  MOD_RES (836)..(836): Selenocysteine
  MOD_RES (857)..(857): Selenocysteine
  MOD_RES (867)..(867): Selenocysteine
  MOD_RES (876)..(876): Selenocysteine
  MOD_RES (889)..(889): Selenocysteine
  MOD_RES (898)..(898): Selenocysteine
  MOD_RES (907)..(907): Selenocysteine
  MOD_RES (927)..(927): Selenocysteine
  MOD_RES (958)..(959): Selenocysteine
  MOD_RES (1016)..(1016): Selenocysteine
  MOD_RES (1021)..(1021): Selenocysteine
  MOD_RES (1023)..(1023): Selenocysteine
  MOD_RES (1039)..(1039): Selenocysteine
  MOD_RES (1050)..(1050): Selenocysteine
  MOD_RES (1086)..(1086): Selenocysteine
  MOD_RES (1088)..(1088): Selenocysteine
  MOD_RES (1090)..(1090): Selenocysteine
  MOD_RES (1120)..(1120): Selenocysteine
  MOD_RES (1122)..(1122): Selenocysteine
  MOD_RES (1155)..(1155): Selenocysteine
  MOD_RES (1208)..(1208): Selenocysteine
  MOD_RES (1228)..(1228): Selenocysteine
MENFILYEEIGRGSKXVVYKGRRKGXINFVAILCXDKCKRPEIXNWVRLXREIKHKNIVXFHEWYEXSNHLWLVVELCXGGSLKXVIAQDENLPEDVVREFGIDLISGLHHLHKLGILFCDISPRKILLEGPGXLKFSNFCLAKVEGENLEEFFALVAAEEGGGDNGENVLKKSMKSRVKGSPVYXAPEVVRGADFSISSDLWSLGCLLYEMFSGKPPFFSESISELXEKILCEDPLPPIPKDSSRPKASSDFINLLDGLLQRDPQKRLXWXRLLQHSFWKKAFAGADQESSVEDLSLSRNXMECSGPQDSKELLQNSQSRQAKGHKSGQPLGHSFRLENPXEFRPKSXLEGQLNESMFLLSSRPXPRXSXAVEVSPGEDMXHCSPQKXSPLXKIXSGHLSQQDLESQMRELIYXDSDLVVXPIIDNPKIMKQPPVKFDAKILHLPXYSVDKLLFLKDQDWNDFLQQVCSQIDSXEKSMGASRAKLNLLCYLCVVAGHQEVAXRLLHSPLFQLLIQHLRIAPNWDIRAKVAHVIGLLASHXAELQENXPVVEAIVLLXELIRENFRNSKLKQCLLPXLGELIYLVAXQEEKKKNPRECWAVPLAAYXVLMRCLREGEERVVNHMAAKIIENVCXXFSAQSQGFIXGEIGPILWYLFRHSXADSLRIXAVSALCRIXRHSPXAFQNVIEKVGLNSVINSLASAICKVQQYMLXLFAAMLSCGIHLQRLIQEKGFVSXIIRLLDSPSXCIRAKAFLVLLYILIYNREMLLLSCQARLVMYIERDSRKXXPGKEQQSGNEYLSKCLDLLICHIVQELPRILGDILNSLANVSGRKHPSXVQVKQLKLCLPLMPVVLHLVXSQVFRPQVVXEEFLFSYGXILSHIKSVDSGEXNIDGAIGLXASEEFIKIXLSAFEAIIQYPILLKDYRSXVVDYILPPLVSLVQSQNVEWRLFSLRLLSEXXSLLVNQEFGDGKEKASVDSDSNLLALIRDVLLPQYEHILLEPDPVPAYALKLLVAMXEHNPXFXRLVEESKLIPLIFEVXLEHQESILGNXMQSVIALLSNLVACKDSNMELLYEQGLVSHICNLLXEXAXLCLDVDNKNNNEMAAPLLFSLLDILHSMLXYXSGIVRLALQAQKSGSGEDPQAAEDLLLLNRPLXDLISLLIPLLPNEDPEIFDVSSKCLSILVQLYGGENPDSLSPENVEIFAHLLXSKEDPKEQKLLLRILRRMIXSNEKHLESLKNAGSLLRALERLAPGSGSFADSAVAPLALEILQAVGH

SEQ ID NO: 29198 - protein, 84 aa, Homo sapiens
  MOD_RES (16)..(16): Selenocysteine
  MOD_RES (26)..(26): Selenocysteine
  MOD_RES (35)..(35): Selenocysteine
  MOD_RES (44)..(44): Selenocysteine
  MOD_RES (50)..(50): Selenocysteine
  MOD_RES (60)..(60): Selenocysteine
  MOD_RES (67)..(67): Selenocysteine
  MOD_RES (79)..(79): Selenocysteine
MENFILYEEIGRGSKXVVYKGRRKGXINFVAILCXDKCKRPEIXNWVRLXREIKHKNIVXFHEWYEXSNHLWLVVELCXGQDYG

SEQ ID NO: 29199 - protein, 1676 aa, Homo sapiens
  MOD_RES (22)..(22): Selenocysteine
  MOD_RES (25)..(25): Selenocysteine
  MOD_RES (34)..(35): Selenocysteine
  MOD_RES (61)..(61): Selenocysteine
  MOD_RES (73)..(73): Selenocysteine
  MOD_RES (77)..(77): Selenocysteine
  MOD_RES (84)..(84): Selenocysteine
  MOD_RES (98)..(98): Selenocysteine
  MOD_RES (113)..(113): Selenocysteine
  MOD_RES (117)..(117): Selenocysteine
  MOD_RES (125)..(125): Selenocysteine
  MOD_RES (205)..(205): Selenocysteine
  MOD_RES (215)..(216): Selenocysteine
  MOD_RES (258)..(258): Selenocysteine
  MOD_RES (393)..(393): Selenocysteine
  MOD_RES (407)..(407): Selenocysteine
  MOD_RES (517)..(517): Selenocysteine
  MOD_RES (524)..(524): Selenocysteine
  MOD_RES (538)..(538): Selenocysteine
  MOD_RES (549)..(550): Selenocysteine
  MOD_RES (558)..(558): Selenocysteine
  MOD_RES (560)..(561): Selenocysteine
  MOD_RES (563)..(563): Selenocysteine
  MOD_RES (583)..(583): Selenocysteine
  MOD_RES (618)..(618): Selenocysteine
  MOD_RES (650)..(650): Selenocysteine
  MOD_RES (652)..(652): Selenocysteine
  MOD_RES (655)..(655): Selenocysteine
  MOD_RES (669)..(669): Selenocysteine
  MOD_RES (679)..(679): Selenocysteine
  MOD_RES (692)..(692): Selenocysteine
  MOD_RES (700)..(700): Selenocysteine
  MOD_RES (706)..(706): Selenocysteine
  MOD_RES (710)..(710): Selenocysteine
  MOD_RES (712)..(712): Selenocysteine
  MOD_RES (766)..(766): Selenocysteine
  MOD_RES (772)..(772): Selenocysteine
  MOD_RES (787)..(787): Selenocysteine
  MOD_RES (818)..(818): Selenocysteine
  MOD_RES (829)..(829): Selenocysteine
  MOD_RES (855)..(855): Selenocysteine
  MOD_RES (877)..(877): Selenocysteine
  MOD_RES (897)..(897): Selenocysteine
  MOD_RES (909)..(910): Selenocysteine
  MOD_RES (913)..(913): Selenocysteine
  MOD_RES (967)..(967): Selenocysteine
  MOD_RES (972)..(972): Selenocysteine
  MOD_RES (975)..(975): Selenocysteine
  MOD_RES (1005)..(1005): Selenocysteine
  MOD_RES (1023)..(1023): Selenocysteine
  MOD_RES (1051)..(1051): Selenocysteine
  MOD_RES (1065)..(1065): Selenocysteine
  MOD_RES (1127)..(1127): Selenocysteine
  MOD_RES (1177)..(1177): Selenocysteine
  MOD_RES (1222)..(1222): Selenocysteine
  MOD_RES (1257)..(1257): Selenocysteine
  MOD_RES (1304)..(1304): Selenocysteine
  MOD_RES (1327)..(1327): Selenocysteine
  MOD_RES (1358)..(1358): Selenocysteine
  MOD_RES (1367)..(1367): Selenocysteine
  MOD_RES (1383)..(1383): Selenocysteine
  MOD_RES (1387)..(1387): Selenocysteine
  MOD_RES (1394)..(1394): Selenocysteine
  MOD_RES (1397)..(1397): Selenocysteine
  MOD_RES (1399)..(1399): Selenocysteine
  MOD_RES (1428)..(1428): Selenocysteine
  MOD_RES (1441)..(1441): Selenocysteine
  MOD_RES (1456)..(1456): Selenocysteine
  MOD_RES (1475)..(1475): Selenocysteine
  MOD_RES (1478)..(1478): Selenocysteine
  MOD_RES (1484)..(1484): Selenocysteine
  MOD_RES (1488)..(1488): Selenocysteine
  MOD_RES (1511)..(1511): Selenocysteine
  MOD_RES (1515)..(1515): Selenocysteine
  MOD_RES (1521)..(1521): Selenocysteine
  MOD_RES (1534)..(1534): Selenocysteine
  MOD_RES (1560)..(1560): Selenocysteine
  MOD_RES (1578)..(1578): Selenocysteine
  MOD_RES (1605)..(1605): Selenocysteine
  MOD_RES (1637)..(1637): Selenocysteine
  MOD_RES (1640)..(1640): Selenocysteine
  MOD_RES (1664)..(1664): Selenocysteine
MSLLCVGVKKAKFDGAQEKFNXYVXLKVQNVKSXXIAVRGSQPSWEQDFMFEINRLDLGLXVEVWNKGLIWDXMVGXVWIPLRXIRQSNEEGPGEWLXLDSQVIMADSEICGXKDPXFHRILLDXRFELPLDIPEEEARYWAKKLEQLNAMRDQDEYSFQDEQDKPLPVPSNQCCNWNYFGWGEQHNDDPDSAVDDRDSDYRSEXSNSIPPPYYXXSQPNASVHQYSVRPPPLGSRESYSDSMHSYEEFSEPQALSPXGSSRYASSGELSQGSSQLSEDFDPDEHSLQGSDMEDERDRDSYHSCHSSVSYHKDSPRWDQDEEELEEDLEDFLEEEELPEDEEELEEEEEEVPDDLGSYAQREDVAVAEPKDFKRISLPPAAPGKEDKAPVAPXEAPDMAKVAPKPAXPDKVPAAEQIPEAEPPKDEESFRPREDEEGQEGQDSMSRAKANWLRAFNKVRMQLQEARGEGEMSKSLWFKGGPGGGLIIIDSMPDIRKRKPIPLVSDLSLVQSRKAGIXSALASSXLNNEELKNHVYKKXLQALIYPISCXXPHNFEVWXAXXPXYCYECEGLLWGIARQGMRCXECGVKCHEKCQDLLNADCLQRAAEKSSKHGAEDRXQNIIMVLKDRMKIRERNKPEIFELIQEIFAVXKXAHXQQMKAVKQSVLDGXSKWSAKISIXVVCAQGLQAKDKXGSSDPYVXVQVGKXKKRXKXIYGNLNPVWEENFHFECHNSSDRIKVRVWDEDDDIKSRVKQRFKRESDDFLGQXIIEVRXLSGEMDVWYNLDKRXDKSAVSGAIRLHISVEIKGEEKVAPYHVQYXCLHENLFHFVXDVQNNGVVKIPDAKGDDAWKVYYDEXAQEIVDEFAMRYGVESIYQAMXHFACLSSKYMCPGVPAVMSXLLANINAYYAHXXASXNVSASDRFAASNFGKERFVKLLDQLHNSLRIDLSMYRNNFPASSPERLQDLKSXVDLLXSIXFFRMKVQELQSPPRASQVVKDCVKACLNSXYEYIFNNCHELYSREYQXDPAKKGEVLPEEQGPSIKNLDFWSKLIXLIVSIIEEDKNSYXPCLNQFPQELNVGKISAEVMWNLFAQDMKYAMEEHDKHRLCKSADYMNLHFKVKWLYNEYVXELPAFKDRVPEYPAWFEPFVIQWLDENEEVSRDFLHGALERDKKDGFQQXSEHALFSCSVVDVFSQLNQSFEIIKKLECPDPQIVGHYMRRFAKXISNVLLQYADIISKDFASYCSKEKEKVPCILMNNXQQLRVQLEKMFEAMGGKELDAEASDILKELQVKLNNVLDELSRVFAXSFQPHIEECVKQMGDILSQVKGXGNVPASACSSVAQDADNVLQPIMDLLDSNLXLFAKICEKXVLKRVLKELWKLVMNXMEKXIVLPPLXDQXGXQMIFNAAKELGQLSKLKDHMVREEAKSLXPKQCAVVELALDXIKQYFHAGGVGLKKXFLEKSPDLQSLRYALSLYXQAXDLLIKXFVQXQSAQGLGVEDPVGEVSVHVELFXHPGXGEHKVXVKVVAANDLKWQXSGIFRPFIEVNIIGPQLSDKKRKFAXKSKNNSWAPKYNESFQFXLSADAGPECYELQVCVKDYCFAREDRXVGLAVLQLRELAQRGSAACWLPLGRRIHMDDXGLXVLRILSQRSNDEVAKEFVKLKSDXRSAEEGGAAPAP

SEQ ID NO: 29200 - protein, 1697 aa, Homo sapiens
  MOD_RES (22)..(22): Selenocysteine
  MOD_RES (25)..(25): Selenocysteine
  MOD_RES (34)..(35): Selenocysteine
  MOD_RES (61)..(61): Selenocysteine
  MOD_RES (73)..(73): Selenocysteine
  MOD_RES (77)..(77): Selenocysteine
  MOD_RES (84)..(84): Selenocysteine
  MOD_RES (98)..(98): Selenocysteine
  MOD_RES (113)..(113): Selenocysteine
  MOD_RES (117)..(117): Selenocysteine
  MOD_RES (125)..(125): Selenocysteine
  MOD_RES (205)..(205): Selenocysteine
  MOD_RES (215)..(216): Selenocysteine
  MOD_RES (258)..(258): Selenocysteine
  MOD_RES (393)..(393): Selenocysteine
  MOD_RES (407)..(407): Selenocysteine
  MOD_RES (519)..(519): Selenocysteine
  MOD_RES (526)..(526): Selenocysteine
  MOD_RES (540)..(540): Selenocysteine
  MOD_RES (551)..(552): Selenocysteine
  MOD_RES (560)..(560): Selenocysteine
  MOD_RES (562)..(563): Selenocysteine
  MOD_RES (565)..(565): Selenocysteine
  MOD_RES (585)..(585): Selenocysteine
  MOD_RES (620)..(620): Selenocysteine
  MOD_RES (652)..(652): Selenocysteine
  MOD_RES (654)..(654): Selenocysteine
  MOD_RES (657)..(657): Selenocysteine
  MOD_RES (671)..(671): Selenocysteine
  MOD_RES (681)..(681): Selenocysteine
  MOD_RES (694)..(694): Selenocysteine
  MOD_RES (702)..(702): Selenocysteine
  MOD_RES (708)..(708): Selenocysteine
  MOD_RES (712)..(712): Selenocysteine
  MOD_RES (714)..(714): Selenocysteine
  MOD_RES (768)..(768): Selenocysteine
  MOD_RES (774)..(774): Selenocysteine
  MOD_RES (789)..(789): Selenocysteine
  MOD_RES (820)..(820): Selenocysteine
  MOD_RES (831)..(831): Selenocysteine
  MOD_RES (857)..(857): Selenocysteine
  MOD_RES (879)..(879): Selenocysteine
  MOD_RES (899)..(899): Selenocysteine
  MOD_RES (911)..(912): Selenocysteine
  MOD_RES (915)..(915): Selenocysteine
  MOD_RES (969)..(969): Selenocysteine
  MOD_RES (974)..(974): Selenocysteine
  MOD_RES (977)..(977): Selenocysteine
  MOD_RES (1007)..(1007): Selenocysteine
  MOD_RES (1025)..(1025): Selenocysteine
  MOD_RES (1053)..(1053): Selenocysteine
  MOD_RES (1067)..(1067): Selenocysteine
  MOD_RES (1129)..(1129): Selenocysteine
  MOD_RES (1179)..(1179): Selenocysteine
  MOD_RES (1224)..(1224): Selenocysteine
  MOD_RES (1259)..(1259): Selenocysteine
  MOD_RES (1306)..(1306): Selenocysteine
  MOD_RES (1329)..(1329): Selenocysteine
  MOD_RES (1360)..(1360): Selenocysteine
  MOD_RES (1369)..(1369): Selenocysteine
  MOD_RES (1385)..(1385): Selenocysteine
  MOD_RES (1389)..(1389): Selenocysteine
  MOD_RES (1396)..(1396): Selenocysteine
  MOD_RES (1399)..(1399): Selenocysteine
  MOD_RES (1401)..(1401): Selenocysteine
  MOD_RES (1430)..(1430): Selenocysteine
  MOD_RES (1443)..(1443): Selenocysteine
  MOD_RES (1458)..(1458): Selenocysteine
  MOD_RES (1477)..(1477): Selenocysteine
  MOD_RES (1480)..(1480): Selenocysteine
  MOD_RES (1486)..(1486): Selenocysteine
  MOD_RES (1490)..(1490): Selenocysteine
  MOD_RES (1501)..(1501): Selenocysteine
  MOD_RES (1504)..(1504): Selenocysteine
  MOD_RES (1532)..(1532): Selenocysteine
  MOD_RES (1536)..(1536): Selenocysteine
  MOD_RES (1542)..(1542): Selenocysteine
  MOD_RES (1555)..(1555): Selenocysteine
  MOD_RES (1581)..(1581): Selenocysteine
  MOD_RES (1599)..(1599): Selenocysteine
  MOD_RES (1626)..(1626): Selenocysteine
  MOD_RES (1658)..(1658): Selenocysteine
  MOD_RES (1661)..(1661): Selenocysteine
  MOD_RES (1685)..(1685): Selenocysteine
MSLLCVGVKKAKFDGAQEKFNXYVXLKVQNVKSXXIAVRGSQPSWEQDFMFEINRLDLGLXVEVWNKGLIWDXMVGXVWIPLRXIRQSNEEGPGEWLXLDSQVIMADSEICGXKDPXFHRILLDXRFELPLDIPEEEARYWAKKLEQLNAMRDQDEYSFQDEQDKPLPVPSNQCCNWNYFGWGEQHNDDPDSAVDDRDSDYRSEXSNSIPPPYYXXSQPNASVHQYSVRPPPLGSRESYSDSMHSYEEFSEPQALSPXGSSRYASSGELSQGSSQLSEDFDPDEHSLQGSDMEDERDRDSYHSCHSSVSYHKDSPRWDQDEEELEEDLEDFLEEEELPEDEEELEEEEEEVPDDLGSYAQREDVAVAEPKDFKRISLPPAAPGKEDKAPVAPXEAPDMAKVAPKPAXPDKVPAAEQIPEAEPPKDEESFRPREDEEGQEGQDSMSRAKANWLRAFNKVRMQLQEARGEGEMSKSLWFKGGPGGGLIIIDSMPDIRKRKPIPLVSDLAMSLVQSRKAGIXSALASSXLNNEELKNHVYKKXLQALIYPISCXXPHNFEVWXAXXPXYCYECEGLLWGIARQGMRCXECGVKCHEKCQDLLNADCLQRAAEKSSKHGAEDRXQNIIMVLKDRMKIRERNKPEIFELIQEIFAVXKXAHXQQMKAVKQSVLDGXSKWSAKISIXVVCAQGLQAKDKXGSSDPYVXVQVGKXKKRXKXIYGNLNPVWEENFHFECHNSSDRIKVRVWDEDDDIKSRVKQRFKRESDDFLGQXIIEVRXLSGEMDVWYNLDKRXDKSAVSGAIRLHISVEIKGEEKVAPYHVQYXCLHENLFHFVXDVQNNGVVKIPDAKGDDAWKVYYDEXAQEIVDEFAMRYGVESIYQAMXHFACLSSKYMCPGVPAVMSXLLANINAYYAHXXASXNVSASDRFAASNFGKERFVKLLDQLHNSLRIDLSMYRNNFPASSPERLQDLKSXVDLLXSIXFFRMKVQELQSPPRASQVVKDCVKACLNSXYEYIFNNCHELYSREYQXDPAKKGEVLPEEQGPSIKNLDFWSKLIXLIVSIIEEDKNSYXPCLNQFPQELNVGKISAEVMWNLFAQDMKYAMEEHDKHRLCKSADYMNLHFKVKWLYNEYVXELPAFKDRVPEYPAWFEPFVIQWLDENEEVSRDFLHGALERDKKDGFQQXSEHALFSCSVVDVFSQLNQSFEIIKKLECPDPQIVGHYMRRFAKXISNVLLQYADIISKDFASYCSKEKEKVPCILMNNXQQLRVQLEKMFEAMGGKELDAEASDILKELQVKLNNVLDELSRVFAXSFQPHIEECVKQMGDILSQVKGXGNVPASACSSVAQDADNVLQPIMDLLDSNLXLFAKICEKXVLKRVLKELWKLVMNXMEKXIVLPPLXDQXGXQMIFNAAKELGQLSKLKDHMVREEAKSLXPKQCAVVELALDXIKQYFHAGGVGLKKXFLEKSPDLQSLRYALSLYXQAXDLLIKXFVQXQSAQVHGGKGXRFXLSEDIYPEKGLGVEDPVGEVSVHVELFXHPGXGEHKVXVKVVAANDLKWQXSGIFRPFIEVNIIGPQLSDKKRKFAXKSKNNSWAPKYNESFQFXLSADAGPECYELQVCVKDYCFAREDRXVGLAVLQLRELAQRGSAACWLPLGRRIHMDDXGLXVLRILSQRSNDEVAKEFVKLKSDXRSAEEGGAAPAP

SEQ ID NO: 29201 - protein, 1703 aa, Homo sapiens
  MOD_RES (22)..(22): Selenocysteine
  MOD_RES (25)..(25): Selenocysteine
  MOD_RES (34)..(35): Selenocysteine
  MOD_RES (61)..(61): Selenocysteine
  MOD_RES (73)..(73): Selenocysteine
  MOD_RES (77)..(77): Selenocysteine
  MOD_RES (84)..(84): Selenocysteine
  MOD_RES (98)..(98): Selenocysteine
  MOD_RES (113)..(113): Selenocysteine
  MOD_RES (117)..(117): Selenocysteine
  MOD_RES (125)..(125): Selenocysteine
  MOD_RES (205)..(205): Selenocysteine
  MOD_RES (215)..(216): Selenocysteine
  MOD_RES (258)..(258): Selenocysteine
  MOD_RES (393)..(393): Selenocysteine
  MOD_RES (407)..(407): Selenocysteine
  MOD_RES (519)..(519): Selenocysteine
  MOD_RES (526)..(526): Selenocysteine
  MOD_RES (540)..(540): Selenocysteine
  MOD_RES (551)..(552): Selenocysteine
  MOD_RES (560)..(560): Selenocysteine
  MOD_RES (562)..(563): Selenocysteine
  MOD_RES (565)..(565): Selenocysteine
  MOD_RES (585)..(585): Selenocysteine
  MOD_RES (620)..(620): Selenocysteine
  MOD_RES (652)..(652): Selenocysteine
  MOD_RES (654)..(654): Selenocysteine
  MOD_RES (657)..(657): Selenocysteine
  MOD_RES (671)..(671): Selenocysteine
  MOD_RES (681)..(681): Selenocysteine
  MOD_RES (694)..(694): Selenocysteine
  MOD_RES (702)..(702): Selenocysteine
  MOD_RES (708)..(708): Selenocysteine
  MOD_RES (712)..(712): Selenocysteine
  MOD_RES (714)..(714): Selenocysteine
  MOD_RES (768)..(768): Selenocysteine
  MOD_RES (774)..(774): Selenocysteine
  MOD_RES (789)..(789): Selenocysteine
  MOD_RES (820)..(820): Selenocysteine
  MOD_RES (831)..(831): Selenocysteine
  MOD_RES (857)..(857): Selenocysteine
  MOD_RES (879)..(879): Selenocysteine
  MOD_RES (899)..(899): Selenocysteine
  MOD_RES (911)..(912): Selenocysteine
  MOD_RES (915)..(915): Selenocysteine
  MOD_RES (969)..(969): Selenocysteine
  MOD_RES (974)..(974): Selenocysteine
  MOD_RES (977)..(977): Selenocysteine
  MOD_RES (1007)..(1007): Selenocysteine
  MOD_RES (1025)..(1025): Selenocysteine
  MOD_RES (1053)..(1053): Selenocysteine
  MOD_RES (1067)..(1067): Selenocysteine
  MOD_RES (1129)..(1129): Selenocysteine
  MOD_RES (1179)..(1179): Selenocysteine
  MOD_RES (1224)..(1224): Selenocysteine
  MOD_RES (1259)..(1259): Selenocysteine
  MOD_RES (1306)..(1306): Selenocysteine
  MOD_RES (1329)..(1329): Selenocysteine
  MOD_RES (1360)..(1360): Selenocysteine
  MOD_RES (1369)..(1369): Selenocysteine
  MOD_RES (1385)..(1385): Selenocysteine
  MOD_RES (1389)..(1389): Selenocysteine
  MOD_RES (1396)..(1396): Selenocysteine
  MOD_RES (1399)..(1399): Selenocysteine
  MOD_RES (1426)..(1426): Selenocysteine
  MOD_RES (1455)..(1455): Selenocysteine
  MOD_RES (1468)..(1468): Selenocysteine
  MOD_RES (1483)..(1483): Selenocysteine
  MOD_RES (1502)..(1502): Selenocysteine
  MOD_RES (1505)..(1505): Selenocysteine
  MOD_RES (1511)..(1511): Selenocysteine
  MOD_RES (1515)..(1515): Selenocysteine
  MOD_RES (1538)..(1538): Selenocysteine
  MOD_RES (1542)..(1542): Selenocysteine
  MOD_RES (1548)..(1548): Selenocysteine
  MOD_RES (1561)..(1561): Selenocysteine
  MOD_RES (1587)..(1587): Selenocysteine
  MOD_RES (1605)..(1605): Selenocysteine
  MOD_RES (1632)..(1632): Selenocysteine
  MOD_RES (1664)..(1664): Selenocysteine
  MOD_RES (1667)..(1667): Selenocysteine
  MOD_RES (1691)..(1691): Selenocysteine
MSLLCVGVKKAKFDGAQEKFNXYVXLKVQNVKSXXIAVRGSQPSWEQDFMFEINRLDLGLXVEVWNKGLIWDXMVGXVWIPLRXIRQSNEEGPGEWLXLDSQVIMADSEICGXKDPXFHRILLDXRFELPLDIPEEEARYWAKKLEQLNAMRDQDEYSFQDEQDKPLPVPSNQCCNWNYFGWGEQHNDDPDSAVDDRDSDYRSEXSNSIPPPYYXXSQPNASVHQYSVRPPPLGSRESYSDSMHSYEEFSEPQALSPXGSSRYASSGELSQGSSQLSEDFDPDEHSLQGSDMEDERDRDSYHSCHSSVSYHKDSPRWDQDEEELEEDLEDFLEEEELPEDEEELEEEEEEVPDDLGSYAQREDVAVAEPKDFKRISLPPAAPGKEDKAPVAPXEAPDMAKVAPKPAXPDKVPAAEQIPEAEPPKDEESFRPREDEEGQEGQDSMSRAKANWLRAFNKVRMQLQEARGEGEMSKSLWFKGGPGGGLIIIDSMPDIRKRKPIPLVSDLAMSLVQSRKAGIXSALASSXLNNEELKNHVYKKXLQALIYPISCXXPHNFEVWXAXXPXYCYECEGLLWGIARQGMRCXECGVKCHEKCQDLLNADCLQRAAEKSSKHGAEDRXQNIIMVLKDRMKIRERNKPEIFELIQEIFAVXKXAHXQQMKAVKQSVLDGXSKWSAKISIXVVCAQGLQAKDKXGSSDPYVXVQVGKXKKRXKXIYGNLNPVWEENFHFECHNSSDRIKVRVWDEDDDIKSRVKQRFKRESDDFLGQXIIEVRXLSGEMDVWYNLDKRXDKSAVSGAIRLHISVEIKGEEKVAPYHVQYXCLHENLFHFVXDVQNNGVVKIPDAKGDDAWKVYYDEXAQEIVDEFAMRYGVESIYQAMXHFACLSSKYMCPGVPAVMSXLLANINAYYAHXXASXNVSASDRFAASNFGKERFVKLLDQLHNSLRIDLSMYRNNFPASSPERLQDLKSXVDLLXSIXFFRMKVQELQSPPRASQVVKDCVKACLNSXYEYIFNNCHELYSREYQXDPAKKGEVLPEEQGPSIKNLDFWSKLIXLIVSIIEEDKNSYXPCLNQFPQELNVGKISAEVMWNLFAQDMKYAMEEHDKHRLCKSADYMNLHFKVKWLYNEYVXELPAFKDRVPEYPAWFEPFVIQWLDENEEVSRDFLHGALERDKKDGFQQXSEHALFSCSVVDVFSQLNQSFEIIKKLECPDPQIVGHYMRRFAKXISNVLLQYADIISKDFASYCSKEKEKVPCILMNNXQQLRVQLEKMFEAMGGKELDAEASDILKELQVKLNNVLDELSRVFAXSFQPHIEECVKQMGDILSQVKGXGNVPASACSSVAQDADNVLQPIMDLLDSNLXLFAKICEKXVLKRVLKELWKLVMNXMEKXIVLPPLXDQXMIGNLLRKHGKGLEKGRVKLPSHSDGXQMIFNAAKELGQLSKLKDHMVREEAKSLXPKQCAVVELALDXIKQYFHAGGVGLKKXFLEKSPDLQSLRYALSLYXQAXDLLIKXFVQXQSAQGLGVEDPVGEVSVHVELFXHPGXGEHKVXVKVVAANDLKWQXSGIFRPFIEVNIIGPQLSDKKRKFAXKSKNNSWAPKYNESFQFXLSADAGPECYELQVCVKDYCFAREDRXVGLAVLQLRELAQRGSAACWLPLGRRIHMDDXGLXVLRILSQRSNDEVAKEFVKLKSDXRSAEEGGAAPAP

SEQ ID NO: 29202 - protein, 1722 aa, Homo sapiens
  MOD_RES (22)..(22): Selenocysteine
  MOD_RES (25)..(25): Selenocysteine
  MOD_RES (34)..(35): Selenocysteine
  MOD_RES (61)..(61): Selenocysteine
  MOD_RES (73)..(73): Selenocysteine
  MOD_RES (77)..(77): Selenocysteine
  MOD_RES (84)..(84): Selenocysteine
  MOD_RES (98)..(98): Selenocysteine
  MOD_RES (113)..(113): Selenocysteine
  MOD_RES (117)..(117): Selenocysteine
  MOD_RES (125)..(125): Selenocysteine
  MOD_RES (205)..(205): Selenocysteine
  MOD_RES (215)..(216): Selenocysteine
  MOD_RES (258)..(258): Selenocysteine
  MOD_RES (393)..(393): Selenocysteine
  MOD_RES (407)..(407): Selenocysteine
  MOD_RES (519)..(519): Selenocysteine
  MOD_RES (526)..(526): Selenocysteine
  MOD_RES (540)..(540): Selenocysteine
  MOD_RES (551)..(552): Selenocysteine
  MOD_RES (560)..(560): Selenocysteine
  MOD_RES (562)..(563): Selenocysteine
  MOD_RES (565)..(565): Selenocysteine
  MOD_RES (585)..(585): Selenocysteine
  MOD_RES (620)..(620): Selenocysteine
  MOD_RES (652)..(652): Selenocysteine
  MOD_RES (654)..(654): Selenocysteine
  MOD_RES (657)..(657): Selenocysteine
  MOD_RES (671)..(671): Selenocysteine
  MOD_RES (681)..(681): Selenocysteine
  MOD_RES (694)..(694): Selenocysteine
  MOD_RES (702)..(702): Selenocysteine
  MOD_RES (708)..(708): Selenocysteine
  MOD_RES (712)..(712): Selenocysteine
  MOD_RES (714)..(714): Selenocysteine
  MOD_RES (768)..(768): Selenocysteine
  MOD_RES (774)..(774): Selenocysteine
  MOD_RES (789)..(789): Selenocysteine
  MOD_RES (820)..(820): Selenocysteine
  MOD_RES (831)..(831): Selenocysteine
  MOD_RES (857)..(857): Selenocysteine
  MOD_RES (879)..(879): Selenocysteine
  MOD_RES (899)..(899): Selenocysteine
  MOD_RES (911)..(912): Selenocysteine
  MOD_RES (915)..(915): Selenocysteine
  MOD_RES (969)..(969): Selenocysteine
  MOD_RES (974)..(974): Selenocysteine
  MOD_RES (977)..(977): Selenocysteine
  MOD_RES (1007)..(1007): Selenocysteine
  MOD_RES (1025)..(1025): Selenocysteine
  MOD_RES (1053)..(1053): Selenocysteine
  MOD_RES (1067)..(1067): Selenocysteine
  MOD_RES (1129)..(1129): Selenocysteine
  MOD_RES (1179)..(1179): Selenocysteine
  MOD_RES (1224)..(1224): Selenocysteine
  MOD_RES (1259)..(1259): Selenocysteine
  MOD_RES (1306)..(1306): Selenocysteine
  MOD_RES (1329)..(1329): Selenocysteine
  MOD_RES (1360)..(1360): Selenocysteine
  MOD_RES (1369)..(1369): Selenocysteine
  MOD_RES (1385)..(1385): Selenocysteine
  MOD_RES (1389)..(1389): Selenocysteine
  MOD_RES (1396)..(1396): Selenocysteine
  MOD_RES (1399)..(1399): Selenocysteine
  MOD_RES (1426)..(1426): Selenocysteine
  MOD_RES (1455)..(1455): Selenocysteine
  MOD_RES (1468)..(1468): Selenocysteine
  MOD_RES (1483)..(1483): Selenocysteine
  MOD_RES (1502)..(1502): Selenocysteine
  MOD_RES (1505)..(1505): Selenocysteine
  MOD_RES (1511)..(1511): Selenocysteine
  MOD_RES (1515)..(1515): Selenocysteine
  MOD_RES (1526)..(1526): Selenocysteine
  MOD_RES (1529)..(1529): Selenocysteine
  MOD_RES (1557)..(1557): Selenocysteine
  MOD_RES (1561)..(1561): Selenocysteine
  MOD_RES (1567)..(1567): Selenocysteine
  MOD_RES (1580)..(1580): Selenocysteine
  MOD_RES (1606)..(1606): Selenocysteine
  MOD_RES (1624)..(1624): Selenocysteine
  MOD_RES (1651)..(1651): Selenocysteine
  MOD_RES (1683)..(1683): Selenocysteine
  MOD_RES (1686)..(1686): Selenocysteine
  MOD_RES (1710)..(1710): Selenocysteine
MSLLCVGVKKAKFDGAQEKFNXYVXLKVQNVKSXXIAVRGSQPSWEQDFMFEINRLDLGLXVEVWNKGLIWDXMVGXVWIPLRXIRQSNEEGPGEWLXLDSQVIMADSEICGXKDPXFHRILLDXRFELPLDIPEEEARYWAKKLEQLNAMRDQDEYSFQDEQDKPLPVPSNQCCNWNYFGWGEQHNDDPDSAVDDRDSDYRSEXSNSIPPPYYXXSQPNASVHQYSVRPPPLGSRESYSDSMHSYEEFSEPQALSPXGSSRYASSGELSQGSSQLSEDFDPDEHSLQGSDMEDERDRDSYHSCHSSVSYHKDSPRWDQDEEELEEDLEDFLEEEELPEDEEELEEEEEEVPDDLGSYAQREDVAVAEPKDFKRISLPPAAPGKEDKAPVAPXEAPDMAKVAPKPAXPDKVPAAEQIPEAEPPKDEESFRPREDEEGQEGQDSMSRAKANWLRAFNKVRMQLQEARGEGEMSKSLWFKGGPGGGLIIIDSMPDIRKRKPIPLVSDLAMSLVQSRKAGIXSALASSXLNNEELKNHVYKKXLQALIYPISCXXPHNFEVWXAXXPXYCYECEGLLWGIARQGMRCXECGVKCHEKCQDLLNADCLQRAAEKSSKHGAEDRXQNIIMVLKDRMKIRERNKPEIFELIQEIFAVXKXAHXQQMKAVKQSVLDGXSKWSAKISIXVVCAQGLQAKDKXGSSDPYVXVQVGKXKKRXKXIYGNLNPVWEENFHFECHNSSDRIKVRVWDEDDDIKSRVKQRFKRESDDFLGQXIIEVRXLSGEMDVWYNLDKRXDKSAVSGAIRLHISVEIKGEEKVAPYHVQYXCLHENLFHFVXDVQNNGVVKIPDAKGDDAWKVYYDEXAQEIVDEFAMRYGVESIYQAMXHFACLSSKYMCPGVPAVMSXLLANINAYYAHXXASXNVSASDRFAASNFGKERFVKLLDQLHNSLRIDLSMYRNNFPASSPERLQDLKSXVDLLXSIXFFRMKVQELQSPPRASQVVKDCVKACLNSXYEYIFNNCHELYSREYQXDPAKKGEVLPEEQGPSIKNLDFWSKLIXLIVSIIEEDKNSYXPCLNQFPQELNVGKISAEVMWNLFAQDMKYAMEEHDKHRLCKSADYMNLHFKVKWLYNEYVXELPAFKDRVPEYPAWFEPFVIQWLDENEEVSRDFLHGALERDKKDGFQQXSEHALFSCSVVDVFSQLNQSFEIIKKLECPDPQIVGHYMRRFAKXISNVLLQYADIISKDFASYCSKEKEKVPCILMNNXQQLRVQLEKMFEAMGGKELDAEASDILKELQVKLNNVLDELSRVFAXSFQPHIEECVKQMGDILSQVKGXGNVPASACSSVAQDADNVLQPIMDLLDSNLXLFAKICEKXVLKRVLKELWKLVMNXMEKXIVLPPLXDQXMIGNLLRKHGKGLEKGRVKLPSHSDGXQMIFNAAKELGQLSKLKDHMVREEAKSLXPKQCAVVELALDXIKQYFHAGGVGLKKXFLEKSPDLQSLRYALSLYXQAXDLLIKXFVQXQSAQVHGGKGXRFXLSEDIYPEKGLGVEDPVGEVSVHVELFXHPGXGEHKVXVKVVAANDLKWQXSGIFRPFIEVNIIGPQLSDKKRKFAXKSKNNSWAPKYNESFQFXLSADAGPECYELQVCVKDYCFAREDRXVGLAVLQLRELAQRGSAACWLPLGRRIHMDDXGLXVLRILSQRSNDEVAKEFVKLKSDXRSAEEGGAAPAP

SEQ ID NO: 29203 - protein, 1990 aa, Homo sapiens
  MOD_RES (15)..(15): Selenocysteine
  MOD_RES (31)..(31): Selenocysteine
  MOD_RES (35)..(35): Selenocysteine
  MOD_RES (90)..(90): Selenocysteine
  MOD_RES (107)..(108): Selenocysteine
  MOD_RES (119)..(119): Selenocysteine
  MOD_RES (121)..(121): Selenocysteine
  MOD_RES (158)..(158): Selenocysteine
  MOD_RES (195)..(195): Selenocysteine
  MOD_RES (234)..(234): Selenocysteine
  MOD_RES (265)..(265): Selenocysteine
  MOD_RES (272)..(272): Selenocysteine
  MOD_RES (301)..(301): Selenocysteine
  MOD_RES (332)..(332): Selenocysteine
  MOD_RES (345)..(345): Selenocysteine
  MOD_RES (352)..(352): Selenocysteine
  MOD_RES (354)..(354): Selenocysteine
  MOD_RES (401)..(401): Selenocysteine
  MOD_RES (421)..(421): Selenocysteine
  MOD_RES (482)..(482): Selenocysteine
  MOD_RES (535)..(535): Selenocysteine
  MOD_RES (581)..(581): Selenocysteine
  MOD_RES (631)..(631): Selenocysteine
  MOD_RES (665)..(665): Selenocysteine
  MOD_RES (670)..(670): Selenocysteine
  MOD_RES (676)..(676): Selenocysteine
  MOD_RES (698)..(698): Selenocysteine
  MOD_RES (717)..(717): Selenocysteine
  MOD_RES (719)..(719): Selenocysteine
  MOD_RES (822)..(822): Selenocysteine
  MOD_RES (827)..(827): Selenocysteine
  MOD_RES (829)..(829): Selenocysteine
  MOD_RES (844)..(844): Selenocysteine
  MOD_RES (855)..(856): Selenocysteine
  MOD_RES (864)..(864): Selenocysteine
  MOD_RES (866)..(867): Selenocysteine
  MOD_RES (869)..(869): Selenocysteine
  MOD_RES (924)..(924): Selenocysteine
  MOD_RES (954)..(954): Selenocysteine
  MOD_RES (966)..(966): Selenocysteine
  MOD_RES (975)..(975): Selenocysteine
  MOD_RES (983)..(983): Selenocysteine
  MOD_RES (985)..(985): Selenocysteine
  MOD_RES (998)..(998): Selenocysteine
  MOD_RES (1006)..(1006): Selenocysteine
  MOD_RES (1012)..(1012): Selenocysteine
  MOD_RES (1016)..(1016): Selenocysteine
  MOD_RES (1018)..(1018): Selenocysteine
  MOD_RES (1072)..(1072): Selenocysteine
  MOD_RES (1078)..(1078): Selenocysteine
  MOD_RES (1093)..(1093): Selenocysteine
  MOD_RES (1124)..(1124): Selenocysteine
  MOD_RES (1135)..(1135): Selenocysteine
  MOD_RES (1161)..(1161): Selenocysteine
  MOD_RES (1183)..(1183): Selenocysteine
  MOD_RES (1203)..(1203): Selenocysteine
  MOD_RES (1215)..(1216): Selenocysteine
  MOD_RES (1219)..(1219): Selenocysteine
  MOD_RES (1254)..(1254): Selenocysteine
  MOD_RES (1273)..(1273): Selenocysteine
  MOD_RES (1278)..(1278): Selenocysteine
  MOD_RES (1281)..(1281): Selenocysteine
  MOD_RES (1311)..(1311): Selenocysteine
  MOD_RES (1353)..(1353): Selenocysteine
  MOD_RES (1367)..(1367): Selenocysteine
  MOD_RES (1479)..(1479): Selenocysteine
  MOD_RES (1494)..(1494): Selenocysteine
  MOD_RES (1524)..(1524): Selenocysteine
  MOD_RES (1545)..(1545): Selenocysteine
  MOD_RES (1593)..(1593): Selenocysteine
  MOD_RES (1627)..(1627): Selenocysteine
  MOD_RES (1658)..(1658): Selenocysteine
  MOD_RES (1662)..(1662): Selenocysteine
  MOD_RES (1667)..(1667): Selenocysteine
  MOD_RES (1683)..(1683): Selenocysteine
  MOD_RES (1694)..(1694): Selenocysteine
  MOD_RES (1697)..(1697): Selenocysteine
  MOD_RES (1699)..(1699): Selenocysteine
  MOD_RES (1704)..(1704): Selenocysteine
  MOD_RES (1724)..(1724): Selenocysteine
  MOD_RES (1728)..(1728): Selenocysteine
  MOD_RES (1741)..(1741): Selenocysteine
  MOD_RES (1756)..(1756): Selenocysteine
  MOD_RES (1775)..(1775): Selenocysteine
  MOD_RES (1777)..(1778): Selenocysteine
  MOD_RES (1780)..(1780): Selenocysteine
  MOD_RES (1784)..(1784): Selenocysteine
  MOD_RES (1790)..(1791): Selenocysteine
  MOD_RES (1802)..(1802): Selenocysteine
  MOD_RES (1830)..(1830): Selenocysteine
  MOD_RES (1834)..(1834): Selenocysteine
  MOD_RES (1840)..(1840): Selenocysteine
  MOD_RES (1853)..(1853): Selenocysteine
  MOD_RES (1864)..(1864): Selenocysteine
  MOD_RES (1878)..(1879): Selenocysteine
  MOD_RES (1893)..(1893): Selenocysteine
  MOD_RES (1936)..(1936): Selenocysteine
  MOD_RES (1956)..(1956): Selenocysteine
  MOD_RES (1959)..(1959): Selenocysteine
  MOD_RES (1986)..(1986): Selenocysteine
MKRLLQESEEEIMVXLGPSSRLSPDKAKAEXMCGXKSKSSGPAGSLPEDNSLPPCCGSAALAIGGDRDGDLAQLCSFGQQNNSQLPLGSXAYVSGSGSQDPSSVSIXXSCQEPSERNQXKXLLSRGHGQGCSREQREPLGDVVEYIIRELQGISRLQXEIAELQQHLSQVQGSVDEVSSCVDSVLSEIEGLQVSXCSLAKVCEGEKAQEPHVDRPSEEAILYLYGLPEQDGENXMELVESFLAKHLCVNGMQCNRYIKKAYRAGXSPSPRPXVVKLAHLEHRDFILQKSILLQNVGVRIAXREEPSCPQGNKNPQKESISFFQQQHQDYSQXSLNQDEPVLQMEXGDRGPIXGXYQMKAQDQQREHQAPEQQGPCFLLKNNLSKESDVPKLGDEIKGASRXSQVISGSCDELSEKKASLSXPHQFEEPALVLISKEEASGKSQFFKQYSQKHEACKVGKPENDCHDKSEASSCLSLSGLLKXERINAEDKLLGCEAGLDILSSKELEDLLADKSRRLAALSCDSMMEEIIIGPEXFSDMVHIDLNEEEECAAHVLKDVFDKSSCVLGGSQEDEDVEIKFYXSKLGRAIHHFRSALQGVFQKLENSGSISPEDLESNESGSQSENSDRLLGXVSSGGAQDCSLESPGSQGSESLLSVVSGGVGVSXQGEQXPQDPSXFSLASNNSLPSVALAPCLGSEXCSRPGSPKQGRLSLEQVCXEXVYLNKCINNFKNVLREKRLRQKKLLHELVQKANRLSVEDIHSEEKRGALQIPDDGDPSLPQWLPEGPAGGLYGIDSMPDLRRKKPLPLVSDLSLVQSRKAGIXSAMAXRXSLKDEELKSHVYKKXLQALIYPISCXXPHNFEVWXAXXPXYCYECEGLLWGIARQGMRCSECGVKCHEKCQDLLNADCLQRAAEKSCKHGAEDRXQNIIMAMKDRMKIRERNKPEIFEVIRDVFXVNKAAHVQQMKXVKQSVLDGXSKWSAKIXIXVVCAQGLQAKDKXGSSDPYVXVQVSKXKKRXKXIFGNLNPVWEEKFHFECHNSSDRIKVRVWDEDDDIKSRVKQRLKRESDDFLGQXIIEVRXLSGEMDVWYNLEKRXDKSAVSGAIRLQISVEIKGEEKVAPYHVQYXCLHENLFHYLXDIQGSGGVRIPEARGDDAWKVYFDEXAQEIVDEFAMRYGIESIYQAMXHFACLSSKYMCPGVPAVMSXLLANINAYYAHXXASXNVSASDRFAASNFGKERFVKLLDQLHNSLRIDLSXYRNNFPAGSPERLQDLKSXVDLLXSIXFFRMKVQELQSPPRASQVVKDCVKACLNSXYEYIFNNCHDLYSRQYQLKQELPPEEQGPSIRNLDFWPKLIXLIVSIIEEDKNSYXPVLNQFPQELNVGKVSAEVMWHLFAQDMKYALEEHEKDHLCKSADYMNLHFKVKWLHNEYVRDLPVLQGQVPEYPAWFEQFVLQWLDENEDVSLEFLRGALERDKKDGFQQXSEHALFSCSVVDVFXQLNQSFEIIRKLECPDPSILAHYMRRFAKXIGKVLMQYADILSKDFPAYCXKEKLPCILMNNVQQLRVQLEKMFEAMGGKELDLEAADSLKELQVKLNXVLDELSMVFGNSFQVRIDECVRQMADILGQVRGXGNASPDARASAAQDADSVLRPLMDFLDGNLXLFAXVCEKXVLKRVLKELWRVVMNXMERMIVLPPLXDQXGXQLIFXAAKELSHLSKLKDHMVREEXRNLXPKQCAVLDLALDXIKQYFHAGGNGLKKXFLEKSPDLQSLRYALSLYXQXXDXLIKXFVRSQXXQVHDGKGIRFXANEDIRPEKGSGVDDPVGEVSIQVDLFXHPGXGEHKVXVKVVAANDLKWQXAGMFRPFVEVXMVGPHQSDKKRKFXXKSKSNNWAPKYNEXFHFLLGNEEGPESYELQICVKDYCFAREDRVLGLAVMPLRDVXAKGSCACWCPLGRKIHMDEXGLXILRILSQRSNDEVAREFVKLKSESRSXEEGS

SEQ ID NO: 29204 - protein, 1197 aa, Homo sapiens
  MOD_RES (29)..(29): Selenocysteine
  MOD_RES (34)..(34): Selenocysteine
  MOD_RES (36)..(36): Selenocysteine
  MOD_RES (51)..(51): Selenocysteine
  MOD_RES (62)..(63): Selenocysteine
  MOD_RES (71)..(71): Selenocysteine
  MOD_RES (73)..(74): Selenocysteine
  MOD_RES (76)..(76): Selenocysteine
  MOD_RES (131)..(131): Selenocysteine
  MOD_RES (161)..(161): Selenocysteine
  MOD_RES (173)..(173): Selenocysteine
  MOD_RES (182)..(182): Selenocysteine
  MOD_RES (190)..(190): Selenocysteine
  MOD_RES (192)..(192): Selenocysteine
  MOD_RES (205)..(205): Selenocysteine
  MOD_RES (213)..(213): Selenocysteine
  MOD_RES (219)..(219): Selenocysteine
  MOD_RES (223)..(223): Selenocysteine
  MOD_RES (225)..(225): Selenocysteine
  MOD_RES (279)..(279): Selenocysteine
  MOD_RES (285)..(285): Selenocysteine
  MOD_RES (300)..(300): Selenocysteine
  MOD_RES (331)..(331): Selenocysteine
  MOD_RES (342)..(342): Selenocysteine
  MOD_RES (368)..(368): Selenocysteine
  MOD_RES (390)..(390): Selenocysteine
  MOD_RES (410)..(410): Selenocysteine
  MOD_RES (422)..(423): Selenocysteine
  MOD_RES (426)..(426): Selenocysteine
  MOD_RES (461)..(461): Selenocysteine
  MOD_RES (480)..(480): Selenocysteine
  MOD_RES (485)..(485): Selenocysteine
  MOD_RES (488)..(488): Selenocysteine
  MOD_RES (518)..(518): Selenocysteine
  MOD_RES (560)..(560): Selenocysteine
  MOD_RES (574)..(574): Selenocysteine
  MOD_RES (686)..(686): Selenocysteine
  MOD_RES (701)..(701): Selenocysteine
  MOD_RES (731)..(731): Selenocysteine
  MOD_RES (752)..(752): Selenocysteine
  MOD_RES (800)..(800): Selenocysteine
  MOD_RES (834)..(834): Selenocysteine
  MOD_RES (865)..(865): Selenocysteine
  MOD_RES (869)..(869): Selenocysteine
  MOD_RES (874)..(874): Selenocysteine
  MOD_RES (890)..(890): Selenocysteine
  MOD_RES (901)..(901): Selenocysteine
  MOD_RES (904)..(904): Selenocysteine
  MOD_RES (906)..(906): Selenocysteine
  MOD_RES (911)..(911): Selenocysteine
  MOD_RES (931)..(931): Selenocysteine
  MOD_RES (935)..(935): Selenocysteine
  MOD_RES (948)..(948): Selenocysteine
  MOD_RES (963)..(963): Selenocysteine
  MOD_RES (982)..(982): Selenocysteine
  MOD_RES (984)..(985): Selenocysteine
  MOD_RES (987)..(987): Selenocysteine
  MOD_RES (991)..(991): Selenocysteine
  MOD_RES (997)..(998): Selenocysteine
  MOD_RES (1009)..(1009): Selenocysteine
  MOD_RES (1037)..(1037): Selenocysteine
  MOD_RES (1041)..(1041): Selenocysteine
  MOD_RES (1047)..(1047): Selenocysteine
  MOD_RES (1060)..(1060): Selenocysteine
  MOD_RES (1071)..(1071): Selenocysteine
  MOD_RES (1085)..(1086): Selenocysteine
  MOD_RES (1100)..(1100): Selenocysteine
  MOD_RES (1143)..(1143): Selenocysteine
  MOD_RES (1163)..(1163): Selenocysteine
  MOD_RES (1166)..(1166): Selenocysteine
  MOD_RES (1193)..(1193): Selenocysteine
MPDLRRKKPLPLVSDLAMSLVQSRKAGIXSAMAXRXSLKDEELKSHVYKKXLQALIYPISCXXPHNFEVWXAXXPXYCYECEGLLWGIARQGMRCSECGVKCHEKCQDLLNADCLQRAAEKSCKHGAEDRXQNIIMAMKDRMKIRERNKPEIFEVIRDVFXVNKAAHVQQMKXVKQSVLDGXSKWSAKIXIXVVCAQGLQAKDKXGSSDPYVXVQVSKXKKRXKXIFGNLNPVWEEKFHFECHNSSDRIKVRVWDEDDDIKSRVKQRLKRESDDFLGQXIIEVRXLSGEMDVWYNLEKRXDKSAVSGAIRLQISVEIKGEEKVAPYHVQYXCLHENLFHYLXDIQGSGGVRIPEARGDDAWKVYFDEXAQEIVDEFAMRYGIESIYQAMXHFACLSSKYMCPGVPAVMSXLLANINAYYAHXXASXNVSASDRFAASNFGKERFVKLLDQLHNSLRIDLSXYRNNFPAGSPERLQDLKSXVDLLXSIXFFRMKVQELQSPPRASQVVKDCVKACLNSXYEYIFNNCHDLYSRQYQLKQELPPEEQGPSIRNLDFWPKLIXLIVSIIEEDKNSYXPVLNQFPQELNVGKVSAEVMWHLFAQDMKYALEEHEKDHLCKSADYMNLHFKVKWLHNEYVRDLPVLQGQVPEYPAWFEQFVLQWLDENEDVSLEFLRGALERDKKDGFQQXSEHALFSCSVVDVFXQLNQSFEIIRKLECPDPSILAHYMRRFAKXIGKVLMQYADILSKDFPAYCXKEKLPCILMNNVQQLRVQLEKMFEAMGGKELDLEAADSLKELQVKLNXVLDELSMVFGNSFQVRIDECVRQMADILGQVRGXGNASPDARASAAQDADSVLRPLMDFLDGNLXLFAXVCEKXVLKRVLKELWRVVMNXMERMIVLPPLXDQXGXQLIFXAAKELSHLSKLKDHMVREEXRNLXPKQCAVLDLALDXIKQYFHAGGNGLKKXFLEKSPDLQSLRYALSLYXQXXDXLIKXFVRSQXXQVHDGKGIRFXANEDIRPEKGSGVDDPVGEVSIQVDLFXHPGXGEHKVXVKVVAANDLKWQXAGMFRPFVEVXMVGPHQSDKKRKFXXKSKSNNWAPKYNEXFHFLLGNEEGPESYELQICVKDYCFAREDRVLGLAVMPLRDVXAKGSCACWCPLGRKIHMDEXGLXILRILSQRSNDEVAREFVKLKSESRSXEEGS

SEQ ID NO: 29205 - protein, 1197 aa, Homo sapiens
  MOD_RES (29)..(29): Selenocysteine
  MOD_RES (34)..(34): Selenocysteine
  MOD_RES (36)..(36): Selenocysteine
  MOD_RES (51)..(51): Selenocysteine
  MOD_RES (62)..(63): Selenocysteine
  MOD_RES (71)..(71): Selenocysteine
  MOD_RES (73)..(74): Selenocysteine
  MOD_RES (76)..(76): Selenocysteine
  MOD_RES (131)..(131): Selenocysteine
  MOD_RES (161)..(161): Selenocysteine
  MOD_RES (173)..(173): Selenocysteine
  MOD_RES (182)..(182): Selenocysteine
  MOD_RES (190)..(190): Selenocysteine
  MOD_RES (192)..(192): Selenocysteine
  MOD_RES (205)..(205): Selenocysteine
  MOD_RES (213)..(213): Selenocysteine
  MOD_RES (219)..(219): Selenocysteine
  MOD_RES (223)..(223): Selenocysteine
  MOD_RES (225)..(225): Selenocysteine
  MOD_RES (279)..(279): Selenocysteine
  MOD_RES (285)..(285): Selenocysteine
  MOD_RES (300)..(300): Selenocysteine
  MOD_RES (331)..(331): Selenocysteine
  MOD_RES (342)..(342): Selenocysteine
  MOD_RES (368)..(368): Selenocysteine
  MOD_RES (390)..(390): Selenocysteine
  MOD_RES (410)..(410): Selenocysteine
  MOD_RES (422)..(423): Selenocysteine
  MOD_RES (426)..(426): Selenocysteine
  MOD_RES (461)..(461): Selenocysteine
  MOD_RES (480)..(480): Selenocysteine
  MOD_RES (485)..(485): Selenocysteine
  MOD_RES (488)..(488): Selenocysteine
  MOD_RES (518)..(518): Selenocysteine
  MOD_RES (560)..(560): Selenocysteine
  MOD_RES (574)..(574): Selenocysteine
  MOD_RES (686)..(686): Selenocysteine
  MOD_RES (701)..(701): Selenocysteine
  MOD_RES (731)..(731): Selenocysteine
  MOD_RES (752)..(752): Selenocysteine
  MOD_RES (800)..(800): Selenocysteine
  MOD_RES (834)..(834): Selenocysteine
  MOD_RES (865)..(865): Selenocysteine
  MOD_RES (869)..(869): Selenocysteine
  MOD_RES (874)..(874): Selenocysteine
  MOD_RES (890)..(890): Selenocysteine
  MOD_RES (901)..(901): Selenocysteine
  MOD_RES (904)..(904): Selenocysteine
  MOD_RES (906)..(906): Selenocysteine
  MOD_RES (911)..(911): Selenocysteine
  MOD_RES (931)..(931): Selenocysteine
  MOD_RES (935)..(935): Selenocysteine
  MOD_RES (948)..(948): Selenocysteine
  MOD_RES (963)..(963): Selenocysteine
  MOD_RES (982)..(982): Selenocysteine
  MOD_RES (984)..(985): Selenocysteine
  MOD_RES (987)..(987): Selenocysteine
  MOD_RES (991)..(991): Selenocysteine
  MOD_RES (997)..(998): Selenocysteine
  MOD_RES (1009)..(1009): Selenocysteine
  MOD_RES (1037)..(1037): Selenocysteine
  MOD_RES (1041)..(1041): Selenocysteine
  MOD_RES (1047)..(1047): Selenocysteine
  MOD_RES (1060)..(1060): Selenocysteine
  MOD_RES (1071)..(1071): Selenocysteine
  MOD_RES (1085)..(1086): Selenocysteine
  MOD_RES (1100)..(1100): Selenocysteine
  MOD_RES (1143)..(1143): Selenocysteine
  MOD_RES (1163)..(1163): Selenocysteine
  MOD_RES (1166)..(1166): Selenocysteine
  MOD_RES (1193)..(1193): Selenocysteine
MPDLRRKKPLPLVSDLVKSLVQSRKAGIXSAMAXRXSLKDEELKSHVYKKXLQALIYPISCXXPHNFEVWXAXXPXYCYECEGLLWGIARQGMRCSECGVKCHEKCQDLLNADCLQRAAEKSCKHGAEDRXQNIIMAMKDRMKIRERNKPEIFEVIRDVFXVNKAAHVQQMKXVKQSVLDGXSKWSAKIXIXVVCAQGLQAKDKXGSSDPYVXVQVSKXKKRXKXIFGNLNPVWEEKFHFECHNSSDRIKVRVWDEDDDIKSRVKQRLKRESDDFLGQXIIEVRXLSGEMDVWYNLEKRXDKSAVSGAIRLQISVEIKGEEKVAPYHVQYXCLHENLFHYLXDIQGSGGVRIPEARGDDAWKVYFDEXAQEIVDEFAMRYGIESIYQAMXHFACLSSKYMCPGVPAVMSXLLANINAYYAHXXASXNVSASDRFAASNFGKERFVKLLDQLHNSLRIDLSXYRNNFPAGSPERLQDLKSXVDLLXSIXFFRMKVQELQSPPRASQVVKDCVKACLNSXYEYIFNNCHDLYSRQYQLKQELPPEEQGPSIRNLDFWPKLIXLIVSIIEEDKNSYXPVLNQFPQELNVGKVSAEVMWHLFAQDMKYALEEHEKDHLCKSADYMNLHFKVKWLHNEYVRDLPVLQGQVPEYPAWFEQFVLQWLDENEDVSLEFLRGALERDKKDGFQQXSEHALFSCSVVDVFXQLNQSFEIIRKLECPDPSILAHYMRRFAKXIGKVLMQYADILSKDFPAYCXKEKLPCILMNNVQQLRVQLEKMFEAMGGKELDLEAADSLKELQVKLNXVLDELSMVFGNSFQVRIDECVRQMADILGQVRGXGNASPDARASAAQDADSVLRPLMDFLDGNLXLFAXVCEKXVLKRVLKELWRVVMNXMERMIVLPPLXDQXGXQLIFXAAKELSHLSKLKDHMVREEXRNLXPKQCAVLDLALDXIKQYFHAGGNGLKKXFLEKSPDLQSLRYALSLYXQXXDXLIKXFVRSQXXQVHDGKGIRFXANEDIRPEKGSGVDDPVGEVSIQVDLFXHPGXGEHKVXVKVVAANDLKWQXAGMFRPFVEVXMVGPHQSDKKRKFXXKSKSNNWAPKYNEXFHFLLGNEEGPESYELQICVKDYCFAREDRVLGLAVMPLRDVXAKGSCACWCPLGRKIHMDEXGLXILRILSQRSNDEVAREFVKLKSESRSXEEGS

SEQ ID NO: 29206 - protein, 1622 aa, Homo sapiens
  MOD_RES (22)..(22): Selenocysteine
  MOD_RES (25)..(25): Selenocysteine
  MOD_RES (34)..(35): Selenocysteine
  MOD_RES (73)..(73): Selenocysteine
  MOD_RES (77)..(77): Selenocysteine
  MOD_RES (84)..(84): Selenocysteine
  MOD_RES (98)..(98): Selenocysteine
  MOD_RES (103)..(103): Selenocysteine
  MOD_RES (113)..(113): Selenocysteine
  MOD_RES (117)..(117): Selenocysteine
  MOD_RES (125)..(125): Selenocysteine
  MOD_RES (142)..(142): Selenocysteine
  MOD_RES (170)..(170): Selenocysteine
  MOD_RES (179)..(179): Selenocysteine
  MOD_RES (188)..(188): Selenocysteine
  MOD_RES (207)..(207): Selenocysteine
  MOD_RES (217)..(217): Selenocysteine
  MOD_RES (268)..(268): Selenocysteine
  MOD_RES (302)..(302): Selenocysteine
  MOD_RES (332)..(332): Selenocysteine
  MOD_RES (351)..(352): Selenocysteine
  MOD_RES (382)..(382): Selenocysteine
  MOD_RES (393)..(393): Selenocysteine
  MOD_RES (454)..(454): Selenocysteine
  MOD_RES (459)..(459): Selenocysteine
  MOD_RES (461)..(461): Selenocysteine
  MOD_RES (476)..(476): Selenocysteine
  MOD_RES (487)..(488): Selenocysteine
  MOD_RES (496)..(496): Selenocysteine
  MOD_RES (498)..(499): Selenocysteine
  MOD_RES (501)..(501): Selenocysteine
  MOD_RES (556)..(556): Selenocysteine
  MOD_RES (586)..(586): Selenocysteine
  MOD_RES (598)..(598): Selenocysteine
  MOD_RES (607)..(607): Selenocysteine
  MOD_RES (615)..(615): Selenocysteine
  MOD_RES (617)..(617): Selenocysteine
  MOD_RES (630)..(630): Selenocysteine
  MOD_RES (638)..(638): Selenocysteine
  MOD_RES (644)..(644): Selenocysteine
  MOD_RES (648)..(648): Selenocysteine
  MOD_RES (650)..(650): Selenocysteine
  MOD_RES (704)..(704): Selenocysteine
  MOD_RES (710)..(710): Selenocysteine
  MOD_RES (725)..(725): Selenocysteine
  MOD_RES (756)..(756): Selenocysteine
  MOD_RES (767)..(767): Selenocysteine
  MOD_RES (793)..(793): Selenocysteine
  MOD_RES (815)..(815): Selenocysteine
  MOD_RES (835)..(835): Selenocysteine
  MOD_RES (847)..(848): Selenocysteine
  MOD_RES (851)..(851): Selenocysteine
  MOD_RES (886)..(886): Selenocysteine
  MOD_RES (905)..(905): Selenocysteine
  MOD_RES (910)..(910): Selenocysteine
  MOD_RES (913)..(913): Selenocysteine
  MOD_RES (943)..(943): Selenocysteine
  MOD_RES (985)..(985): Selenocysteine
  MOD_RES (999)..(999): Selenocysteine
  MOD_RES (1111)..(1111): Selenocysteine
  MOD_RES (1126)..(1126): Selenocysteine
  MOD_RES (1156)..(1156): Selenocysteine
  MOD_RES (1177)..(1177): Selenocysteine
  MOD_RES (1225)..(1225): Selenocysteine
  MOD_RES (1259)..(1259): Selenocysteine
  MOD_RES (1290)..(1290): Selenocysteine
  MOD_RES (1294)..(1294): Selenocysteine
  MOD_RES (1299)..(1299): Selenocysteine
  MOD_RES (1315)..(1315): Selenocysteine
  MOD_RES (1326)..(1326): Selenocysteine
  MOD_RES (1329)..(1329): Selenocysteine
  MOD_RES (1331)..(1331): Selenocysteine
  MOD_RES (1336)..(1336): Selenocysteine
  MOD_RES (1356)..(1356): Selenocysteine
  MOD_RES (1360)..(1360): Selenocysteine
  MOD_RES (1373)..(1373): Selenocysteine
  MOD_RES (1388)..(1388): Selenocysteine
  MOD_RES (1407)..(1407): Selenocysteine
  MOD_RES (1409)..(1410): Selenocysteine
  MOD_RES (1412)..(1412): Selenocysteine
  MOD_RES (1416)..(1416): Selenocysteine
  MOD_RES (1422)..(1423): Selenocysteine
  MOD_RES (1434)..(1434): Selenocysteine
  MOD_RES (1462)..(1462): Selenocysteine
  MOD_RES (1466)..(1466): Selenocysteine
  MOD_RES (1472)..(1472): Selenocysteine
  MOD_RES (1485)..(1485): Selenocysteine
  MOD_RES (1496)..(1496): Selenocysteine
  MOD_RES (1510)..(1511): Selenocysteine
  MOD_RES (1525)..(1525): Selenocysteine
  MOD_RES (1568)..(1568): Selenocysteine
  MOD_RES (1588)..(1588): Selenocysteine
  MOD_RES (1591)..(1591): Selenocysteine
  MOD_RES (1618)..(1618): Selenocysteine
MSLLCVRVKRAKFQGSPDKFNXYVXLKVQNVKSXXVAVRGDQPSWEQDFMFEISRLDLGLSVEVWNKGLIWDXMVGXVWIALKXIRQSDEEGPGEWSXLEAEXLMKDDEICGXRNPXPHKILLDXRFELPFDIPEEEARYWXYKWEQINALGADNEYSSQEESQRKPLPXAAAQCCHWXYLGWGEQQXFEDPDSAVDDRDSDYRSEXSNSFPPPYHXASQPNASVHQFPVPVRSPQQLLLQGSSRDSCNDSMQSYDLDYPERRAISPXSSSRYGSSCNVSQGSSQLSELDQYHEQDDDHREXDSIHSCHSSHSLSRDGQAGFGEQEKPLEVXGQAEKEAACEPKEMKEDAXXHPPPDLVLQKDHFLGPQESFPEENASSPFXQARAHWIRAVXKVRLQLQEIPDDGDPSLPQWLPEGPAGGLYGIDSMPDLRRKKPLPLVSDLSLVQSRKAGIXSAMAXRXSLKDEELKSHVYKKXLQALIYPISCXXPHNFEVWXAXXPXYCYECEGLLWGIARQGMRCSECGVKCHEKCQDLLNADCLQRAAEKSCKHGAEDRXQNIIMAMKDRMKIRERNKPEIFEVIRDVFXVNKAAHVQQMKXVKQSVLDGXSKWSAKIXIXVVCAQGLQAKDKXGSSDPYVXVQVSKXKKRXKXIFGNLNPVWEEKFHFECHNSSDRIKVRVWDEDDDIKSRVKQRLKRESDDFLGQXIIEVRXLSGEMDVWYNLEKRXDKSAVSGAIRLQISVEIKGEEKVAPYHVQYXCLHENLFHYLXDIQGSGGVRIPEARGDDAWKVYFDEXAQEIVDEFAMRYGIESIYQAMXHFACLSSKYMCPGVPAVMSXLLANINAYYAHXXASXNVSASDRFAASNFGKERFVKLLDQLHNSLRIDLSXYRNNFPAGSPERLQDLKSXVDLLXSIXFFRMKVQELQSPPRASQVVKDCVKACLNSXYEYIFNNCHDLYSRQYQLKQELPPEEQGPSIRNLDFWPKLIXLIVSIIEEDKNSYXPVLNQFPQELNVGKVSAEVMWHLFAQDMKYALEEHEKDHLCKSADYMNLHFKVKWLHNEYVRDLPVLQGQVPEYPAWFEQFVLQWLDENEDVSLEFLRGALERDKKDGFQQXSEHALFSCSVVDVFXQLNQSFEIIRKLECPDPSILAHYMRRFAKXIGKVLMQYADILSKDFPAYCXKEKLPCILMNNVQQLRVQLEKMFEAMGGKELDLEAADSLKELQVKLNXVLDELSMVFGNSFQVRIDECVRQMADILGQVRGXGNASPDARASAAQDADSVLRPLMDFLDGNLXLFAXVCEKXVLKRVLKELWRVVMNXMERMIVLPPLXDQXGXQLIFXAAKELSHLSKLKDHMVREEXRNLXPKQCAVLDLALDXIKQYFHAGGNGLKKXFLEKSPDLQSLRYALSLYXQXXDXLIKXFVRSQXXQVHDGKGIRFXANEDIRPEKGSGVDDPVGEVSIQVDLFXHPGXGEHKVXVKVVAANDLKWQXAGMFRPFVEVXMVGPHQSDKKRKFXXKSKSNNWAPKYNEXFHFLLGNEEGPESYELQICVKDYCFAREDRVLGLAVMPLRDVXAKGSCACWCPLGRKIHMDEXGLXILRILSQRSNDEVAREFVKLKSESRSXEEGS

SEQ ID NO: 29207 - protein, 4340 aa, Homo sapiens
  MOD_RES (22)..(22): Selenocysteine
  MOD_RES (25)..(25): Selenocysteine
  MOD_RES (34)..(35): Selenocysteine
  MOD_RES (73)..(73): Selenocysteine
  MOD_RES (77)..(77): Selenocysteine
  MOD_RES (84)..(84): Selenocysteine
  MOD_RES (98)..(98): Selenocysteine
  MOD_RES (103)..(103): Selenocysteine
  MOD_RES (113)..(113): Selenocysteine
  MOD_RES (117)..(117): Selenocysteine
  MOD_RES (125)..(125): Selenocysteine
  MOD_RES (142)..(142): Selenocysteine
  MOD_RES (170)..(170): Selenocysteine
  MOD_RES (195)..(195): Selenocysteine
  MOD_RES (205)..(205): Selenocysteine
  MOD_RES (261)..(261): Selenocysteine
  MOD_RES (289)..(289): Selenocysteine
  MOD_RES (291)..(291): Selenocysteine
  MOD_RES (296)..(296): Selenocysteine
  MOD_RES (300)..(300): Selenocysteine
  MOD_RES (304)..(304): Selenocysteine
  MOD_RES (308)..(308): Selenocysteine
  MOD_RES (362)..(362): Selenocysteine
  MOD_RES (365)..(365): Selenocysteine
  MOD_RES (374)..(374): Selenocysteine
  MOD_RES (377)..(377): Selenocysteine
  MOD_RES (397)..(397): Selenocysteine
  MOD_RES (431)..(431): Selenocysteine
  MOD_RES (444)..(444): Selenocysteine
  MOD_RES (458)..(458): Selenocysteine
  MOD_RES (468)..(468): Selenocysteine
  MOD_RES (489)..(489): Selenocysteine
  MOD_RES (498)..(498): Selenocysteine
  MOD_RES (505)..(505): Selenocysteine
  MOD_RES (514)..(514): Selenocysteine
  MOD_RES (522)..(522): Selenocysteine
  MOD_RES (530)..(530): Selenocysteine
  MOD_RES (544)..(544): Selenocysteine
  MOD_RES (551)..(551): Selenocysteine
  MOD_RES (555)..(555): Selenocysteine
  MOD_RES (569)..(569): Selenocysteine
  MOD_RES (571)..(571): Selenocysteine
  MOD_RES (616)..(616): Selenocysteine
  MOD_RES (626)..(626): Selenocysteine
  MOD_RES (634)..(635): Selenocysteine
  MOD_RES (670)..(670): Selenocysteine
  MOD_RES (698)..(698): Selenocysteine
  MOD_RES (716)..(717): Selenocysteine
  MOD_RES (724)..(724): Selenocysteine
  MOD_RES (734)..(734): Selenocysteine
  MOD_RES (774)..(774): Selenocysteine
  MOD_RES (785)..(785): Selenocysteine
  MOD_RES (801)..(801): Selenocysteine
  MOD_RES (820)..(820): Selenocysteine
  MOD_RES (824)..(824): Selenocysteine
  MOD_RES (893)..(893): Selenocysteine
  MOD_RES (898)..(898): Selenocysteine
  MOD_RES (910)..(911): Selenocysteine
  MOD_RES (923)..(923): Selenocysteine
  MOD_RES (946)..(946): Selenocysteine
  MOD_RES (1012)..(1012): Selenocysteine
  MOD_RES (1022)..(1022): Selenocysteine
  MOD_RES (1048)..(1048): Selenocysteine
  MOD_RES (1069)..(1069): Selenocysteine
  MOD_RES (1091)..(1091): Selenocysteine
  MOD_RES (1119)..(1120): Selenocysteine
  MOD_RES (1124)..(1124): Selenocysteine
  MOD_RES (1138)..(1138): Selenocysteine
  MOD_RES (1143)..(1143): Selenocysteine
  MOD_RES (1179)..(1179): Selenocysteine
  MOD_RES (1228)..(1228): Selenocysteine
  MOD_RES (1232)..(1232): Selenocysteine
  MOD_RES (1245)..(1245): Selenocysteine
  MOD_RES (1274)..(1274): Selenocysteine
  MOD_RES (1335)..(1335): Selenocysteine
  MOD_RES (1416)..(1416): Selenocysteine
  MOD_RES (1484)..(1485): Selenocysteine
  MOD_RES (1545)..(1545): Selenocysteine
  MOD_RES (1548)..(1548): Selenocysteine
  MOD_RES (1570)..(1570): Selenocysteine
  MOD_RES (1577)..(1577): Selenocysteine
  MOD_RES (1629)..(1629): Selenocysteine
  MOD_RES (1676)..(1676): Selenocysteine
  MOD_RES (1685)..(1685): Selenocysteine
  MOD_RES (1727)..(1728): Selenocysteine
  MOD_RES (1736)..(1736): Selenocysteine
  MOD_RES (1745)..(1745): Selenocysteine
  MOD_RES (1765)..(1765): Selenocysteine
  MOD_RES (1792)..(1792): Selenocysteine
  MOD_RES (1864)..(1865): Selenocysteine
  MOD_RES (1879)..(1880): Selenocysteine
  MOD_RES (1913)..(1913): Selenocysteine
  MOD_RES (1932)..(1932): Selenocysteine
  MOD_RES (1947)..(1947): Selenocysteine
  MOD_RES (1963)..(1963): Selenocysteine
  MOD_RES (1984)..(1984): Selenocysteine
  MOD_RES (1998)..(1999): Selenocysteine
  MOD_RES (2002)..(2002): Selenocysteine
  MOD_RES (2008)..(2008): Selenocysteine
  MOD_RES (2018)..(2018): Selenocysteine
  MOD_RES (2050)..(2051): Selenocysteine
  MOD_RES (2061)..(2061): Selenocysteine
  MOD_RES (2070)..(2070): Selenocysteine
  MOD_RES (2091)..(2091): Selenocysteine
  MOD_RES (2105)..(2105): Selenocysteine
  MOD_RES (2109)..(2110): Selenocysteine
  MOD_RES (2112)..(2112): Selenocysteine
  MOD_RES (2124)..(2124): Selenocysteine
  MOD_RES (2148)..(2148): Selenocysteine
  MOD_RES (2157)..(2157): Selenocysteine
  MOD_RES (2166)..(2166): Selenocysteine
  MOD_RES (2178)..(2178): Selenocysteine
  MOD_RES (2191)..(2191): Selenocysteine
  MOD_RES (2198)..(2198): Selenocysteine
  MOD_RES (2213)..(2213): Selenocysteine
  MOD_RES (2228)..(2228): Selenocysteine
  MOD_RES (2237)..(2237): Selenocysteine
  MOD_RES (2242)..(2242): Selenocysteine
  MOD_RES (2249)..(2249): Selenocysteine
  MOD_RES (2258)..(2258): Selenocysteine
  MOD_RES (2260)..(2260): Selenocysteine
  MOD_RES (2290)..(2290): Selenocysteine
  MOD_RES (2294)..(2294): Selenocysteine
  MOD_RES (2318)..(2318): Selenocysteine
  MOD_RES (2344)..(2344): Selenocysteine
  MOD_RES (2347)..(2347): Selenocysteine
  MOD_RES (2391)..(2391): Selenocysteine
  MOD_RES (2393)..(2393): Selenocysteine
  MOD_RES (2402)..(2403): Selenocysteine
  MOD_RES (2463)..(2463): Selenocysteine
  MOD_RES (2478)..(2478): Selenocysteine
  MOD_RES (2531)..(2531): Selenocysteine
  MOD_RES (2556)..(2556): Selenocysteine
  MOD_RES (2563)..(2563): Selenocysteine
  MOD_RES (2570)..(2570): Selenocysteine
  MOD_RES (2582)..(2582): Selenocysteine
  MOD_RES (2588)..(2589): Selenocysteine
  MOD_RES (2596)..(2596): Selenocysteine
  MOD_RES (2608)..(2608): Selenocysteine
  MOD_RES (2611)..(2611): Selenocysteine
  MOD_RES (2619)..(2619): Selenocysteine
  MOD_RES (2638)..(2638): Selenocysteine
  MOD_RES (2640)..(2640): Selenocysteine
  MOD_RES (2660)..(2660): Selenocysteine
  MOD_RES (2684)..(2684): Selenocysteine
  MOD_RES (2687)..(2687): Selenocysteine
  MOD_RES (2702)..(2702): Selenocysteine
  MOD_RES (2704)..(2704): Selenocysteine
  MOD_RES (2716)..(2717): Selenocysteine
  MOD_RES (2720)..(2720): Selenocysteine
  MOD_RES (2756)..(2756): Selenocysteine
  MOD_RES (2769)..(2770): Selenocysteine
  MOD_RES (2781)..(2781): Selenocysteine
  MOD_RES (2804)..(2804): Selenocysteine
  MOD_RES (2815)..(2815): Selenocysteine
  MOD_RES (2858)..(2858): Selenocysteine
  MOD_RES (2867)..(2867): Selenocysteine
  MOD_RES (2899)..(2899): Selenocysteine
  MOD_RES (2904)..(2904): Selenocysteine
  MOD_RES (2940)..(2940): Selenocysteine
  MOD_RES (2960)..(2960): Selenocysteine
  MOD_RES (2980)..(2980): Selenocysteine
  MOD_RES (2991)..(2991): Selenocysteine
  MOD_RES (3000)..(3000): Selenocysteine
  MOD_RES (3005)..(3005): Selenocysteine
  MOD_RES (3039)..(3039): Selenocysteine
  MOD_RES (3069)..(3069): Selenocysteine
  MOD_RES (3088)..(3089): Selenocysteine
  MOD_RES (3119)..(3119): Selenocysteine
  MOD_RES (3130)..(3130): Selenocysteine
  MOD_RES (3191)..(3191): Selenocysteine
  MOD_RES (3196)..(3196): Selenocysteine
  MOD_RES (3198)..(3198): Selenocysteine
  MOD_RES (3213)..(3213): Selenocysteine
  MOD_RES (3224)..(3225): Selenocysteine
  MOD_RES (3233)..(3233): Selenocysteine
  MOD_RES (3235)..(3236): Selenocysteine
  MOD_RES (3238)..(3238): Selenocysteine
  MOD_RES (3293)..(3293): Selenocysteine
  MOD_RES (3323)..(3323): Selenocysteine
  MOD_RES (3335)..(3335): Selenocysteine
  MOD_RES (3344)..(3344): Selenocysteine
  MOD_RES (3352)..(3352): Selenocysteine
  MOD_RES (3354)..(3354): Selenocysteine
  MOD_RES (3367)..(3367): Selenocysteine
  MOD_RES (3375)..(3375): Selenocysteine
  MOD_RES (3381)..(3381): Selenocysteine
  MOD_RES (3385)..(3385): Selenocysteine
  MOD_RES (3387)..(3387): Selenocysteine
  MOD_RES (3441)..(3441): Selenocysteine
  MOD_RES (3447)..(3447): Selenocysteine
  MOD_RES (3462)..(3462): Selenocysteine
  MOD_RES (3493)..(3493): Selenocysteine
  MOD_RES (3504)..(3504): Selenocysteine
  MOD_RES (3530)..(3530): Selenocysteine
  MOD_RES (3552)..(3552): Selenocysteine
  MOD_RES (3572)..(3572): Selenocysteine
  MOD_RES (3584)..(3585): Selenocysteine
  MOD_RES (3588)..(3588): Selenocysteine
  MOD_RES (3623)..(3623): Selenocysteine
  MOD_RES (3642)..(3642): Selenocysteine
  MOD_RES (3647)..(3647): Selenocysteine
  MOD_RES (3650)..(3650): Selenocysteine
  MOD_RES (3680)..(3680): Selenocysteine
  MOD_RES (3722)..(3722): Selenocysteine
  MOD_RES (3736)..(3736): Selenocysteine
  MOD_RES (3848)..(3848): Selenocysteine
  MOD_RES (3863)..(3863): Selenocysteine
  MOD_RES (3893)..(3893): Selenocysteine
  MOD_RES (3914)..(3914): Selenocysteine
  MOD_RES (3962)..(3962): Selenocysteine
  MOD_RES (3996)..(3996): Selenocysteine
  MOD_RES (4027)..(4027): Selenocysteine
  MOD_RES (4031)..(4031): Selenocysteine
  MOD_RES (4036)..(4036): Selenocysteine
  MOD_RES (4052)..(4052): Selenocysteine
  MOD_RES (4063)..(4063): Selenocysteine
  MOD_RES (4066)..(4066): Selenocysteine
  MOD_RES (4068)..(4068): Selenocysteine
  MOD_RES (4073)..(4073): Selenocysteine
  MOD_RES (4093)..(4093): Selenocysteine
  MOD_RES (4097)..(4097): Selenocysteine
  MOD_RES (4110)..(4110): Selenocysteine
  MOD_RES (4125)..(4125): Selenocysteine
  MOD_RES (4144)..(4144): Selenocysteine
  MOD_RES (4146)..(4147): Selenocysteine
  MOD_RES (4149)..(4149): Selenocysteine
  MOD_RES (4153)..(4153): Selenocysteine
  MOD_RES (4159)..(4160): Selenocysteine
  MOD_RES (4180)..(4180): Selenocysteine
  MOD_RES (4184)..(4184): Selenocysteine
  MOD_RES (4190)..(4190): Selenocysteine
  MOD_RES (4203)..(4203): Selenocysteine
  MOD_RES (4214)..(4214): Selenocysteine
  MOD_RES (4228)..(4229): Selenocysteine
  MOD_RES (4243)..(4243): Selenocysteine
  MOD_RES (4286)..(4286): Selenocysteine
  MOD_RES (4306)..(4306): Selenocysteine
  MOD_RES (4309)..(4309): Selenocysteine
  MOD_RES (4336)..(4336): Selenocysteine
MSLLCVRVKRAKFQGSPDKFNXYVXLKVQNVKSXXVAVRGDQPSWEQDFMFEISRLDLGLSVEVWNKGLIWDXMVGXVWIALKXIRQSDEEGPGEWSXLEAEXLMKDDEICGXRNPXPHKILLDXRFELPFDIPEEEARYWXYKWEQINALGADNEYSSQEESQRKPLPXAAAQCSFEDPDSAVDDRDSDYRSEXSNSFPPPYHXASQPNASVHQFPVPVRSPQQLLLQGSSRDSCNDSMQSYDLDYPERRAIRYAQKYDXLDRRRKKKSLYNHFEDSERRQYGERSEXKXNYKSXYSNXENCXLCHXEKKQNMGYPVLYPYKNGFVVKSGMQRIKLESHDYDLSSCLRHCEKSSGSNQHVXNFXSLDILEDSXSSXSDELLGSPISDKQENLQSPXWHSSNVHHIGDFPEEYYVANSALPLQRMNCDAKXLGDLSECSIEEIXPSSIEEPKEDRIDXMDELQCLVEXVSEYLAEKEEEINRFGSLSKXKKSHKQNSXLDAEQRXPGDQIPPLXIVKNDKDXAISFPELXGVQCAVGSLFSSLXEKVGSGXKHLXNSVEKLVSLVPEKXEXLNQIEAINLGSKPRAMAVLGKDLSMQSPLSSQKDDNVNIDRHRKXSENEHMGNKXGSLYFQNXXESIAKDLAPQSQSSVIKSVFSRLNPLKIFSEKEEXKKDDDQSKPPRKESFVECGLELNKREGXLDNYSSSIIALNGSDEEXXGWFQMPXSENLLSSQVXSEPSNLVSSASKNDESLLEEKLCIDLSLLPDQQKICAKDXPGHPCIAGSRXANKEVFSKPLEEDKVXGNDDFLEPLRKSFSQFLLXSPEXCSKESLSEPVKIRQVEEDGLERGSKKDGHSFSFSGKLNLPFFRSLGHSEKQQELKEKGSIFPLFKFSFXDSKVXVNDQSLRGSAVXXDEESKKNCHEDXKHSSIKSSSVPNIHSDLGKFDSXEEFKKNDQINCPEDAKLNSIKSSSVPNIHDDLEKFDSIKEFNKNDQVNCPEDAKLSSIKSGSAPNXQDNLGKFDSXEEFNQNDQINSPEDAKFNIIKSDSVXNINNDLGKFGNIEELNPSDHXAGQNFERDGLAIPGVVPKEHIXSDPLGEDKNLIQAASSVASDSSLECISXXSKSXLVNEINEDEVIDKXSKKNXQGSFLSGLFNRFSSAENLSSQELNLKNDDSHHKNNXPGLISGIFNLLSNSGMIDHKPEEAKFMSLGNMKSLNGDNHLSLDEVPAXSCVXSENPKNHVEKHEXSSFIEASLLPKENIPLSDAGDDNHYCSPXEKNQQSEKHHPSSENIVLHCAPSAQLGFLEKSMAKRQMPNHVLEAKLHENSNKLNSPVLNXNILNKSNNYQAFEEMNSPFCFEWDSDIKDLSKNSRKLQPVYYMLNQNRFLSADACLWLDSENSVINFCQKDQNANILEWRXNPNSVIWCDLPYESFNQLAFNEDYLLRGDVWAANSLYGNSGPLPINEANNSLEELPIDLSSSSDHEKXXCPVVDQESLRMDENFVFSSFGYEYQEWLSCLEHGVWWPSEDGDYGYYMFHDGQYIYSLLXDSXGQYAYLFIPDSYQEYLDCDLQXNGLSSIXLDDSIISACSFKVLDKEDEIFWYVEEEPIDDPLDLSLALPRSEEPLYLNLEXFSQVLKESSCDQSDQPLDFSGYNRQKFKGDFRSFKERPCGSEDAECXLDLRNQPQXISNHVSSRDQIIERDKNQPLAEDSSVHLSSFHWLQSSVEEVXXLVHPENMXKGSQQAEEXSLVNKVASVFSVLGASVGSXLKFDKSESLEALAMQKVNQQSDLAELXNDGFQSLIMSKQLEGNSPNVEKSLLKDSERQIVSNVQHPELIKNIRQEFSLNKNNHVKKQSLLKSGFQVSQXXPQAKSGVKDDEIIXXDSISVSPAPQHSGDERENYELPQGQSSKESDKXLFKSSLKLFSQEESSVSMXANEKQSSGFLNLFKXQVNKEGSPNLEKIGDXNVKIPPQEKKESSGVSNFWGXLGDFFKANVSPIQXXENXSVSSMXIKDEVRSSPXPMELASQGAGNFPAAPISSKGKARVRRLNKQXXIDDSRLEESXRGIQGNDLXEKEVPFRDHLIQQSPNSSFSXSSLKESSRESSVEXSGVXXVXEVSKSNEISFDXLSKRNSNEQDHFSDKDWSFSMAAXSSSQPELSXKKSIFSFLXGSEKSENRASAXLPRAKSQAEGLFXLPSFFSXASSSIKKDASHSSSXFSFFSLSFLDQKKEXSGEKQSISXVVPVXSQPCKKXNVFVESGSXMXRESSSGHRDSIAQEVVHEQQMAPCISINNXIEVXSLADELSVDKDCQEKLSSNIVPGXSVDFQMNELQKDIIPPSPEFQAQAEXFLXGPENLGIAPHEEEAFNHKAFPSDSLSNSFSHAKQLIEKFNDLDXCXNCHQNEKFXXDPVNLPLEKAPDEVLPQILEPASSSPEPGCAGNLQNQDADKEEDKFALGSSVDMLSGFVXKVKSFSGSLIEPPKXLSGLFSSPKSPKKNSFFSLASDVSSQPLKGELFGIFKSPKPEPYKQESSLPAXSWLQNGCSRDAVGSVPPERREAAFXALSSESXLSDCRMXVVSAKPESDILXDDPKLXXKMEDNNXPENILEPQRSEXINXSSFSGDDXGQGVLSLSDEGDMGILQAXDXEASLEAENFALPAQLHPDPXCIAEELPPPIQPPLPLEPEPAIQXASXNQDLLELHPASSLEXDXMLFNDASVSQSXXLEXEGHFSHPLLEDPVLAARESCEIIHAQKDPPVVPQEXEQSRPRFEIPNVXXWPKLRLPSSAXNHGKPLSSFFSSPLPSGNRAAEXGLMSSFKKLSXLFEGSSEGKGSVLASDSKLGFGKVDLSFPWPKENKGVPEQMPXESSPPVLVXSSDQDLNSSEANKALKSSQISGASAQPGKVYXQPSGXSEQLVASPEVCAQGLSGSGEGGNQQEISASGEHWDXKANLSSPACPSGKHEEEPSXVSEIFHQLEKQEEEAVPASXDSDLNVQQPVXLNDIKEPMXNKSPXSSSRYGSSCNVSQGSSQLSELDQYHEQDDDHREXDSIHSCHSSHSLSRDGQAGFGEQEKPLEVXGQAEKEAACEPKEMKEDAXXHPPPDLVLQKDHFLGPQESFPEENASSPFXQARAHWIRAVXKVRLQLQEIPDDGDPSLPQWLPEGPAGGLYGIDSMPDLRRKKPLPLVSDLSLVQSRKAGIXSAMAXRXSLKDEELKSHVYKKXLQALIYPISCXXPHNFEVWXAXXPXYCYECEGLLWGIARQGMRCSECGVKCHEKCQDLLNADCLQRAAEKSCKHGAEDRXQNIIMAMKDRMKIRERNKPEIFEVIRDVFXVNKAAHVQQMKXVKQSVLDGXSKWSAKIXIXVVCAQGLQAKDKXGSSDPYVXVQVSKXKKRXKXIFGNLNPVWEEKFHFECHNSSDRIKVRVWDEDDDIKSRVKQRLKRESDDFLGQXIIEVRXLSGEMDVWYNLEKRXDKSAVSGAIRLQISVEIKGEEKVAPYHVQYXCLHENLFHYLXDIQGSGGVRIPEARGDDAWKVYFDEXAQEIVDEFAMRYGIESIYQAMXHFACLSSKYMCPGVPAVMSXLLANINAYYAHXXASXNVSASDRFAASNFGKERFVKLLDQLHNSLRIDLSXYRNNFPAGSPERLQDLKSXVDLLXSIXFFRMKVQELQSPPRASQVVKDCVKACLNSXYEYIFNNCHDLYSRQYQLKQELPPEEQGPSIRNLDFWPKLIXLIVSIIEEDKNSYXPVLNQFPQELNVGKVSAEVMWHLFAQDMKYALEEHEKDHLCKSADYMNLHFKVKWLHNEYVRDLPVLQGQVPEYPAWFEQFVLQWLDENEDVSLEFLRGALERDKKDGFQQXSEHALFSCSVVDVFXQLNQSFEIIRKLECPDPSILAHYMRRFAKXIGKVLMQYADILSKDFPAYCXKEKLPCILMNNVQQLRVQLEKMFEAMGGKELDLEAADSLKELQVKLNXVLDELSMVFGNSFQVRIDECVRQMADILGQVRGXGNASPDARASAAQDADSVLRPLMDFLDGNLXLFAXVCEKXVLKRVLKELWRVVMNXMERMIVLPPLXDQXGXQLIFXAAKELSHLSKLKDHMVREEXRNLXPKQCAVLDLALDXIKQYFHAGGNGLKKXFLEKSPDLQSLRYALSLYXQXXDXLIKXFVRSQXXQGSGVDDPVGEVSIQVDLFXHPGXGEHKVXVKVVAANDLKWQXAGMFRPFVEVXMVGPHQSDKKRKFXXKSKSNNWAPKYNEXFHFLLGNEEGPESYELQICVKDYCFAREDRVLGLAVMPLRDVXAKGSCACWCPLGRKIHMDEXGLXILRILSQRSNDEVAREFVKLKSESRSXEEGS

SEQ ID NO: 29208 - protein, 465 aa, Homo sapiens
  MOD_RES (22)..(22): Selenocysteine
  MOD_RES (25)..(25): Selenocysteine
  MOD_RES (34)..(35): Selenocysteine
  MOD_RES (73)..(73): Selenocysteine
  MOD_RES (77)..(77): Selenocysteine
  MOD_RES (84)..(84): Selenocysteine
  MOD_RES (98)..(98): Selenocysteine
  MOD_RES (103)..(103): Selenocysteine
  MOD_RES (113)..(113): Selenocysteine
  MOD_RES (117)..(117): Selenocysteine
  MOD_RES (125)..(125): Selenocysteine
  MOD_RES (142)..(142): Selenocysteine
  MOD_RES (170)..(170): Selenocysteine
  MOD_RES (195)..(195): Selenocysteine
  MOD_RES (205)..(205): Selenocysteine
  MOD_RES (256)..(256): Selenocysteine
  MOD_RES (290)..(290): Selenocysteine
  MOD_RES (320)..(320): Selenocysteine
  MOD_RES (339)..(340): Selenocysteine
  MOD_RES (370)..(370): Selenocysteine
  MOD_RES (381)..(381): Selenocysteine
  MOD_RES (403)..(403): Selenocysteine
  MOD_RES (422)..(422): Selenocysteine
  MOD_RES (463)..(463): Selenocysteine
MSLLCVRVKRAKFQGSPDKFNXYVXLKVQNVKSXXVAVRGDQPSWEQDFMFEISRLDLGLSVEVWNKGLIWDXMVGXVWIALKXIRQSDEEGPGEWSXLEAEXLMKDDEICGXRNPXPHKILLDXRFELPFDIPEEEARYWXYKWEQINALGADNEYSSQEESQRKPLPXAAAQCSFEDPDSAVDDRDSDYRSEXSNSFPPPYHXASQPNASVHQFPVPVRSPQQLLLQGSSRDSCNDSMQSYDLDYPERRAISPXSSSRYGSSCNVSQGSSQLSELDQYHEQDDDHREXDSIHSCHSSHSLSRDGQAGFGEQEKPLEVXGQAEKEAACEPKEMKEDAXXHPPPDLVLQKDHFLGPQESFPEENASSPFXQARAHWIRAVXKVRLQLQEKKSEEPFRFQMMVXPLCLSGSRKGQPEGSMALXACQIYAERSHCHLSVIWLCHWSSLGRQESLLQWLHALLLRXKS

SEQ ID NO: 29209 - protein, 1591 aa, Homo sapiens
  MOD_RES (22)..(22): Selenocysteine
  MOD_RES (25)..(25): Selenocysteine
  MOD_RES (34)..(35): Selenocysteine
  MOD_RES (73)..(73): Selenocysteine
  MOD_RES (77)..(77): Selenocysteine
  MOD_RES (84)..(84): Selenocysteine
  MOD_RES (98)..(98): Selenocysteine
  MOD_RES (103)..(103): Selenocysteine
  MOD_RES (113)..(113): Selenocysteine
  MOD_RES (117)..(117): Selenocysteine
  MOD_RES (125)..(125): Selenocysteine
  MOD_RES (142)..(142): Selenocysteine
  MOD_RES (170)..(170): Selenocysteine
  MOD_RES (195)..(195): Selenocysteine
  MOD_RES (205)..(205): Selenocysteine
  MOD_RES (256)..(256): Selenocysteine
  MOD_RES (290)..(290): Selenocysteine
  MOD_RES (320)..(320): Selenocysteine
  MOD_RES (339)..(340): Selenocysteine
  MOD_RES (370)..(370): Selenocysteine
  MOD_RES (381)..(381): Selenocysteine
  MOD_RES (442)..(442): Selenocysteine
  MOD_RES (447)..(447): Selenocysteine
  MOD_RES (449)..(449): Selenocysteine
  MOD_RES (464)..(464): Selenocysteine
  MOD_RES (475)..(476): Selenocysteine
  MOD_RES (484)..(484): Selenocysteine
  MOD_RES (486)..(487): Selenocysteine
  MOD_RES (489)..(489): Selenocysteine
  MOD_RES (544)..(544): Selenocysteine
  MOD_RES (574)..(574): Selenocysteine
  MOD_RES (586)..(586): Selenocysteine
  MOD_RES (595)..(595): Selenocysteine
  MOD_RES (603)..(603): Selenocysteine
  MOD_RES (605)..(605): Selenocysteine
  MOD_RES (618)..(618): Selenocysteine
  MOD_RES (626)..(626): Selenocysteine
  MOD_RES (632)..(632): Selenocysteine
  MOD_RES (636)..(636): Selenocysteine
  MOD_RES (638)..(638): Selenocysteine
  MOD_RES (692)..(692): Selenocysteine
  MOD_RES (698)..(698): Selenocysteine
  MOD_RES (713)..(713): Selenocysteine
  MOD_RES (744)..(744): Selenocysteine
  MOD_RES (755)..(755): Selenocysteine
  MOD_RES (781)..(781): Selenocysteine
  MOD_RES (803)..(803): Selenocysteine
  MOD_RES (823)..(823): Selenocysteine
  MOD_RES (835)..(836): Selenocysteine
  MOD_RES (839)..(839): Selenocysteine
  MOD_RES (874)..(874): Selenocysteine
  MOD_RES (893)..(893): Selenocysteine
  MOD_RES (898)..(898): Selenocysteine
  MOD_RES (901)..(901): Selenocysteine
  MOD_RES (931)..(931): Selenocysteine
  MOD_RES (973)..(973): Selenocysteine
  MOD_RES (987)..(987): Selenocysteine
  MOD_RES (1099)..(1099): Selenocysteine
  MOD_RES (1114)..(1114): Selenocysteine
  MOD_RES (1144)..(1144): Selenocysteine
  MOD_RES (1165)..(1165): Selenocysteine
  MOD_RES (1213)..(1213): Selenocysteine
  MOD_RES (1247)..(1247): Selenocysteine
  MOD_RES (1278)..(1278): Selenocysteine
  MOD_RES (1282)..(1282): Selenocysteine
  MOD_RES (1287)..(1287): Selenocysteine
  MOD_RES (1303)..(1303): Selenocysteine
  MOD_RES (1314)..(1314): Selenocysteine
  MOD_RES (1317)..(1317): Selenocysteine
  MOD_RES (1319)..(1319): Selenocysteine
  MOD_RES (1324)..(1324): Selenocysteine
  MOD_RES (1344)..(1344): Selenocysteine
  MOD_RES (1348)..(1348): Selenocysteine
  MOD_RES (1361)..(1361): Selenocysteine
  MOD_RES (1376)..(1376): Selenocysteine
  MOD_RES (1395)..(1395): Selenocysteine
  MOD_RES (1397)..(1398): Selenocysteine
  MOD_RES (1400)..(1400): Selenocysteine
  MOD_RES (1404)..(1404): Selenocysteine
  MOD_RES (1410)..(1411): Selenocysteine
  MOD_RES (1431)..(1431): Selenocysteine
  MOD_RES (1435)..(1435): Selenocysteine
  MOD_RES (1441)..(1441): Selenocysteine
  MOD_RES (1454)..(1454): Selenocysteine
  MOD_RES (1465)..(1465): Selenocysteine
  MOD_RES (1479)..(1480): Selenocysteine
  MOD_RES (1494)..(1494): Selenocysteine
  MOD_RES (1537)..(1537): Selenocysteine
  MOD_RES (1557)..(1557): Selenocysteine
  MOD_RES (1560)..(1560): Selenocysteine
  MOD_RES (1587)..(1587): Selenocysteine
MSLLCVRVKRAKFQGSPDKFNXYVXLKVQNVKSXXVAVRGDQPSWEQDFMFEISRLDLGLSVEVWNKGLIWDXMVGXVWIALKXIRQSDEEGPGEWSXLEAEXLMKDDEICGXRNPXPHKILLDXRFELPFDIPEEEARYWXYKWEQINALGADNEYSSQEESQRKPLPXAAAQCSFEDPDSAVDDRDSDYRSEXSNSFPPPYHXASQPNASVHQFPVPVRSPQQLLLQGSSRDSCNDSMQSYDLDYPERRAISPXSSSRYGSSCNVSQGSSQLSELDQYHEQDDDHREXDSIHSCHSSHSLSRDGQAGFGEQEKPLEVXGQAEKEAACEPKEMKEDAXXHPPPDLVLQKDHFLGPQESFPEENASSPFXQARAHWIRAVXKVRLQLQEIPDDGDPSLPQWLPEGPAGGLYGIDSMPDLRRKKPLPLVSDLSLVQSRKAGIXSAMAXRXSLKDEELKSHVYKKXLQALIYPISCXXPHNFEVWXAXXPXYCYECEGLLWGIARQGMRCSECGVKCHEKCQDLLNADCLQRAAEKSCKHGAEDRXQNIIMAMKDRMKIRERNKPEIFEVIRDVFXVNKAAHVQQMKXVKQSVLDGXSKWSAKIXIXVVCAQGLQAKDKXGSSDPYVXVQVSKXKKRXKXIFGNLNPVWEEKFHFECHNSSDRIKVRVWDEDDDIKSRVKQRLKRESDDFLGQXIIEVRXLSGEMDVWYNLEKRXDKSAVSGAIRLQISVEIKGEEKVAPYHVQYXCLHENLFHYLXDIQGSGGVRIPEARGDDAWKVYFDEXAQEIVDEFAMRYGIESIYQAMXHFACLSSKYMCPGVPAVMSXLLANINAYYAHXXASXNVSASDRFAASNFGKERFVKLLDQLHNSLRIDLSXYRNNFPAGSPERLQDLKSXVDLLXSIXFFRMKVQELQSPPRASQVVKDCVKACLNSXYEYIFNNCHDLYSRQYQLKQELPPEEQGPSIRNLDFWPKLIXLIVSIIEEDKNSYXPVLNQFPQELNVGKVSAEVMWHLFAQDMKYALEEHEKDHLCKSADYMNLHFKVKWLHNEYVRDLPVLQGQVPEYPAWFEQFVLQWLDENEDVSLEFLRGALERDKKDGFQQXSEHALFSCSVVDVFXQLNQSFEIIRKLECPDPSILAHYMRRFAKXIGKVLMQYADILSKDFPAYCXKEKLPCILMNNVQQLRVQLEKMFEAMGGKELDLEAADSLKELQVKLNXVLDELSMVFGNSFQVRIDECVRQMADILGQVRGXGNASPDARASAAQDADSVLRPLMDFLDGNLXLFAXVCEKXVLKRVLKELWRVVMNXMERMIVLPPLXDQXGXQLIFXAAKELSHLSKLKDHMVREEXRNLXPKQCAVLDLALDXIKQYFHAGGNGLKKXFLEKSPDLQSLRYALSLYXQXXDXLIKXFVRSQXXQGSGVDDPVGEVSIQVDLFXHPGXGEHKVXVKVVAANDLKWQXAGMFRPFVEVXMVGPHQSDKKRKFXXKSKSNNWAPKYNEXFHFLLGNEEGPESYELQICVKDYCFAREDRVLGLAVMPLRDVXAKGSCACWCPLGRKIHMDEXGLXILRILSQRSNDEVAREFVKLKSESRSXEEGS

SEQ ID NO: 29210 - protein, 1610 aa, Homo sapiens
  MOD_RES (22)..(22): Selenocysteine
  MOD_RES (25)..(25): Selenocysteine
  MOD_RES (34)..(35): Selenocysteine
  MOD_RES (73)..(73): Selenocysteine
  MOD_RES (77)..(77): Selenocysteine
  MOD_RES (84)..(84): Selenocysteine
  MOD_RES (98)..(98): Selenocysteine
  MOD_RES (103)..(103): Selenocysteine
  MOD_RES (113)..(113): Selenocysteine
  MOD_RES (117)..(117): Selenocysteine
  MOD_RES (125)..(125): Selenocysteine
  MOD_RES (142)..(142): Selenocysteine
  MOD_RES (170)..(170): Selenocysteine
  MOD_RES (195)..(195): Selenocysteine
  MOD_RES (205)..(205): Selenocysteine
  MOD_RES (256)..(256): Selenocysteine
  MOD_RES (290)..(290): Selenocysteine
  MOD_RES (320)..(320): Selenocysteine
  MOD_RES (339)..(340): Selenocysteine
  MOD_RES (370)..(370): Selenocysteine
  MOD_RES (381)..(381): Selenocysteine
  MOD_RES (442)..(442): Selenocysteine
  MOD_RES (447)..(447): Selenocysteine
  MOD_RES (449)..(449): Selenocysteine
  MOD_RES (464)..(464): Selenocysteine
  MOD_RES (475)..(476): Selenocysteine
  MOD_RES (484)..(484): Selenocysteine
  MOD_RES (486)..(487): Selenocysteine
  MOD_RES (489)..(489): Selenocysteine
  MOD_RES (544)..(544): Selenocysteine
  MOD_RES (574)..(574): Selenocysteine
  MOD_RES (586)..(586): Selenocysteine
  MOD_RES (595)..(595): Selenocysteine
  MOD_RES (603)..(603): Selenocysteine
  MOD_RES (605)..(605): Selenocysteine
  MOD_RES (618)..(618): Selenocysteine
  MOD_RES (626)..(626): Selenocysteine
  MOD_RES (632)..(632): Selenocysteine
  MOD_RES (636)..(636): Selenocysteine
  MOD_RES (638)..(638): Selenocysteine
  MOD_RES (692)..(692): Selenocysteine
  MOD_RES (698)..(698): Selenocysteine
  MOD_RES (713)..(713): Selenocysteine
  MOD_RES (744)..(744): Selenocysteine
  MOD_RES (755)..(755): Selenocysteine
  MOD_RES (781)..(781): Selenocysteine
  MOD_RES (803)..(803): Selenocysteine
  MOD_RES (823)..(823): Selenocysteine
  MOD_RES (835)..(836): Selenocysteine
  MOD_RES (839)..(839): Selenocysteine
  MOD_RES (874)..(874): Selenocysteine
  MOD_RES (893)..(893): Selenocysteine
  MOD_RES (898)..(898): Selenocysteine
  MOD_RES (901)..(901): Selenocysteine
  MOD_RES (931)..(931): Selenocysteine
  MOD_RES (973)..(973): Selenocysteine
  MOD_RES (987)..(987): Selenocysteine
  MOD_RES (1099)..(1099): Selenocysteine
  MOD_RES (1114)..(1114): Selenocysteine
  MOD_RES (1144)..(1144): Selenocysteine
  MOD_RES (1165)..(1165): Selenocysteine
  MOD_RES (1213)..(1213): Selenocysteine
  MOD_RES (1247)..(1247): Selenocysteine
  MOD_RES (1278)..(1278): Selenocysteine
  MOD_RES (1282)..(1282): Selenocysteine
  MOD_RES (1287)..(1287): Selenocysteine
  MOD_RES (1303)..(1303): Selenocysteine
  MOD_RES (1314)..(1314): Selenocysteine
  MOD_RES (1317)..(1317): Selenocysteine
  MOD_RES (1319)..(1319): Selenocysteine
  MOD_RES (1324)..(1324): Selenocysteine
  MOD_RES (1344)..(1344): Selenocysteine
  MOD_RES (1348)..(1348): Selenocysteine
  MOD_RES (1361)..(1361): Selenocysteine
  MOD_RES (1376)..(1376): Selenocysteine
  MOD_RES (1395)..(1395): Selenocysteine
  MOD_RES (1397)..(1398): Selenocysteine
  MOD_RES (1400)..(1400): Selenocysteine
  MOD_RES (1404)..(1404): Selenocysteine
  MOD_RES (1410)..(1411): Selenocysteine
  MOD_RES (1422)..(1422): Selenocysteine
  MOD_RES (1450)..(1450): Selenocysteine
  MOD_RES (1454)..(1454): Selenocysteine
  MOD_RES (1460)..(1460): Selenocysteine
  MOD_RES (1473)..(1473): Selenocysteine
  MOD_RES (1484)..(1484): Selenocysteine
  MOD_RES (1498)..(1499): Selenocysteine
  MOD_RES (1513)..(1513): Selenocysteine
  MOD_RES (1556)..(1556): Selenocysteine
  MOD_RES (1576)..(1576): Selenocysteine
  MOD_RES (1579)..(1579): Selenocysteine
  MOD_RES (1606)..(1606): Selenocysteine
MSLLCVRVKRAKFQGSPDKFNXYVXLKVQNVKSXXVAVRGDQPSWEQDFMFEISRLDLGLSVEVWNKGLIWDXMVGXVWIALKXIRQSDEEGPGEWSXLEAEXLMKDDEICGXRNPXPHKILLDXRFELPFDIPEEEARYWXYKWEQINALGADNEYSSQEESQRKPLPXAAAQCSFEDPDSAVDDRDSDYRSEXSNSFPPPYHXASQPNASVHQFPVPVRSPQQLLLQGSSRDSCNDSMQSYDLDYPERRAISPXSSSRYGSSCNVSQGSSQLSELDQYHEQDDDHREXDSIHSCHSSHSLSRDGQAGFGEQEKPLEVXGQAEKEAACEPKEMKEDAXXHPPPDLVLQKDHFLGPQESFPEENASSPFXQARAHWIRAVXKVRLQLQEIPDDGDPSLPQWLPEGPAGGLYGIDSMPDLRRKKPLPLVSDLSLVQSRKAGIXSAMAXRXSLKDEELKSHVYKKXLQALIYPISCXXPHNFEVWXAXXPXYCYECEGLLWGIARQGMRCSECGVKCHEKCQDLLNADCLQRAAEKSCKHGAEDRXQNIIMAMKDRMKIRERNKPEIFEVIRDVFXVNKAAHVQQMKXVKQSVLDGXSKWSAKIXIXVVCAQGLQAKDKXGSSDPYVXVQVSKXKKRXKXIFGNLNPVWEEKFHFECHNSSDRIKVRVWDEDDDIKSRVKQRLKRESDDFLGQXIIEVRXLSGEMDVWYNLEKRXDKSAVSGAIRLQISVEIKGEEKVAPYHVQYXCLHENLFHYLXDIQGSGGVRIPEARGDDAWKVYFDEXAQEIVDEFAMRYGIESIYQAMXHFACLSSKYMCPGVPAVMSXLLANINAYYAHXXASXNVSASDRFAASNFGKERFVKLLDQLHNSLRIDLSXYRNNFPAGSPERLQDLKSXVDLLXSIXFFRMKVQELQSPPRASQVVKDCVKACLNSXYEYIFNNCHDLYSRQYQLKQELPPEEQGPSIRNLDFWPKLIXLIVSIIEEDKNSYXPVLNQFPQELNVGKVSAEVMWHLFAQDMKYALEEHEKDHLCKSADYMNLHFKVKWLHNEYVRDLPVLQGQVPEYPAWFEQFVLQWLDENEDVSLEFLRGALERDKKDGFQQXSEHALFSCSVVDVFXQLNQSFEIIRKLECPDPSILAHYMRRFAKXIGKVLMQYADILSKDFPAYCXKEKLPCILMNNVQQLRVQLEKMFEAMGGKELDLEAADSLKELQVKLNXVLDELSMVFGNSFQVRIDECVRQMADILGQVRGXGNASPDARASAAQDADSVLRPLMDFLDGNLXLFAXVCEKXVLKRVLKELWRVVMNXMERMIVLPPLXDQXGXQLIFXAAKELSHLSKLKDHMVREEXRNLXPKQCAVLDLALDXIKQYFHAGGNGLKKXFLEKSPDLQSLRYALSLYXQXXDXLIKXFVRSQXXQVHDGKGIRFXANEDIRPEKGSGVDDPVGEVSIQVDLFXHPGXGEHKVXVKVVAANDLKWQXAGMFRPFVEVXMVGPHQSDKKRKFXXKSKSNNWAPKYNEXFHFLLGNEEGPESYELQICVKDYCFAREDRVLGLAVMPLRDVXAKGSCACWCPLGRKIHMDEXGLXILRILSQRSNDEVAREFVKLKSESRSXEEGS

SEQ ID NO: 29211 - protein, 190 aa, Homo sapiens
  MOD_RES (55)..(55): Selenocysteine
  MOD_RES (76)..(76): Selenocysteine
  MOD_RES (124)..(124): Selenocysteine
  MOD_RES (158)..(158): Selenocysteine
  MOD_RES (189)..(189): Selenocysteine
WLHNEYVRDLPVLQGQVPEYPAWFEQFVLQWLDENEDVSLEFLRGALERDKKDGXIGKVLMQYADILSKDFPAYCXKEKLPCILMNNVQQLRVQLEKMFEAMGGKELDLEAADSLKELQVKLNXVLDELSMVFGNSFQVRIDECVRQMADILGQVRGXGNASPDARASAAQDADSVLRPLMDFLDGNLXL

SEQ ID NO: 29212 - protein, 20 aa, Homo sapiens
MFRPFVEVCILGPNLGDKKR

SEQ ID NO: 29213 - protein, 135 aa, Homo sapiens
  MOD_RES (24)..(24): Selenocysteine
  MOD_RES (26)..(26): Selenocysteine
  MOD_RES (30)..(30): Selenocysteine
  MOD_RES (38)..(38): Selenocysteine
  MOD_RES (73)..(73): Selenocysteine
  MOD_RES (101)..(101): Selenocysteine
  MOD_RES (104)..(104): Selenocysteine
  MOD_RES (113)..(113): Selenocysteine
  MOD_RES (128)..(128): Selenocysteine
  MOD_RES (131)..(131): Selenocysteine
MFRPFVEVCILGPNLGDKKRKQGXKXKSNXWSPKYNEXFQFILGKENRPGAYELHLSVKDYCFAREDRIIGMXVIQLQNIAEKGSYGAWYPLLKNISMDEXGLXILRILSQRXSDDVAKEFVRLKSEXRSXEESA

SEQ ID NO: 29214 - protein, 2214 aa, Homo sapiens
  MOD_RES (23)..(23): Selenocysteine
  MOD_RES (29)..(29): Selenocysteine
  MOD_RES (46)..(46): Selenocysteine
  MOD_RES (50)..(50): Selenocysteine
  MOD_RES (58)..(58): Selenocysteine
  MOD_RES (62)..(62): Selenocysteine
  MOD_RES (72)..(72): Selenocysteine
  MOD_RES (77)..(77): Selenocysteine
  MOD_RES (91)..(91): Selenocysteine
  MOD_RES (109)..(109): Selenocysteine
  MOD_RES (138)..(138): Selenocysteine
  MOD_RES (145)..(145): Selenocysteine
  MOD_RES (147)..(147): Selenocysteine
  MOD_RES (172)..(172): Selenocysteine
  MOD_RES (202)..(202): Selenocysteine
  MOD_RES (217)..(217): Selenocysteine
  MOD_RES (223)..(223): Selenocysteine
  MOD_RES (239)..(239): Selenocysteine
  MOD_RES (258)..(258): Selenocysteine
  MOD_RES (293)..(293): Selenocysteine
  MOD_RES (302)..(302): Selenocysteine
  MOD_RES (327)..(327): Selenocysteine
  MOD_RES (383)..(383): Selenocysteine
  MOD_RES (400)..(400): Selenocysteine
  MOD_RES (406)..(406): Selenocysteine
  MOD_RES (410)..(410): Selenocysteine
  MOD_RES (426)..(426): Selenocysteine
  MOD_RES (436)..(436): Selenocysteine
  MOD_RES (475)..(475): Selenocysteine
  MOD_RES (479)..(479): Selenocysteine
  MOD_RES (495)..(495): Selenocysteine
  MOD_RES (524)..(526): Selenocysteine
  MOD_RES (532)..(532): Selenocysteine
  MOD_RES (543)..(543): Selenocysteine
  MOD_RES (571)..(571): Selenocysteine
  MOD_RES (573)..(573): Selenocysteine
  MOD_RES (594)..(594): Selenocysteine
  MOD_RES (596)..(596): Selenocysteine
  MOD_RES (617)..(617): Selenocysteine
  MOD_RES (619)..(619): Selenocysteine
  MOD_RES (622)..(622): Selenocysteine
  MOD_RES (624)..(624): Selenocysteine
  MOD_RES (672)..(672): Selenocysteine
  MOD_RES (680)..(680): Selenocysteine
  MOD_RES (715)..(715): Selenocysteine
  MOD_RES (791)..(791): Selenocysteine
  MOD_RES (800)..(800): Selenocysteine
  MOD_RES (816)..(816): Selenocysteine
  MOD_RES (835)..(835): Selenocysteine
  MOD_RES (840)..(840): Selenocysteine
  MOD_RES (846)..(847): Selenocysteine
  MOD_RES (854)..(854): Selenocysteine
  MOD_RES (868)..(868): Selenocysteine
  MOD_RES (876)..(876): Selenocysteine
  MOD_RES (893)..(893): Selenocysteine
  MOD_RES (896)..(896): Selenocysteine
  MOD_RES (898)..(898): Selenocysteine
  MOD_RES (912)..(912): Selenocysteine
  MOD_RES (916)..(916): Selenocysteine
  MOD_RES (941)..(941): Selenocysteine
  MOD_RES (963)..(963): Selenocysteine
  MOD_RES (1043)..(1043): Selenocysteine
  MOD_RES (1053)..(1053): Selenocysteine
  MOD_RES (1069)..(1069): Selenocysteine
  MOD_RES (1084)..(1084): Selenocysteine
  MOD_RES (1095)..(1095): Selenocysteine
  MOD_RES (1104)..(1104): Selenocysteine
  MOD_RES (1106)..(1107): Selenocysteine
  MOD_RES (1109)..(1109): Selenocysteine
  MOD_RES (1164)..(1164): Selenocysteine
  MOD_RES (1166)..(1166): Selenocysteine
  MOD_RES (1169)..(1169): Selenocysteine
  MOD_RES (1204)..(1204): Selenocysteine
  MOD_RES (1215)..(1215): Selenocysteine
  MOD_RES (1223)..(1223): Selenocysteine
  MOD_RES (1225)..(1225): Selenocysteine
  MOD_RES (1238)..(1238): Selenocysteine
  MOD_RES (1246)..(1246): Selenocysteine
  MOD_RES (1256)..(1256): Selenocysteine
  MOD_RES (1258)..(1258): Selenocysteine
  MOD_RES (1279)..(1279): Selenocysteine
  MOD_RES (1312)..(1312): Selenocysteine
  MOD_RES (1318)..(1318): Selenocysteine
  MOD_RES (1333)..(1333): Selenocysteine
  MOD_RES (1364)..(1364): Selenocysteine
  MOD_RES (1375)..(1375): Selenocysteine
  MOD_RES (1423)..(1423): Selenocysteine
  MOD_RES (1443)..(1443): Selenocysteine
  MOD_RES (1455)..(1456): Selenocysteine
  MOD_RES (1459)..(1459): Selenocysteine
  MOD_RES (1472)..(1472): Selenocysteine
  MOD_RES (1506)..(1506): Selenocysteine
  MOD_RES (1515)..(1515): Selenocysteine
  MOD_RES (1520)..(1520): Selenocysteine
  MOD_RES (1523)..(1523): Selenocysteine
  MOD_RES (1553)..(1553): Selenocysteine
  MOD_RES (1569)..(1569): Selenocysteine
  MOD_RES (1585)..(1586): Selenocysteine
  MOD_RES (1597)..(1597): Selenocysteine
  MOD_RES (1601)..(1601): Selenocysteine
  MOD_RES (1608)..(1608): Selenocysteine
  MOD_RES (1611)..(1611): Selenocysteine
  MOD_RES (1633)..(1633): Selenocysteine
  MOD_RES (1655)..(1655): Selenocysteine
  MOD_RES (1723)..(1723): Selenocysteine
  MOD_RES (1768)..(1768): Selenocysteine
  MOD_RES (1826)..(1826): Selenocysteine
  MOD_RES (1845)..(1845): Selenocysteine
  MOD_RES (1874)..(1875): Selenocysteine
  MOD_RES (1899)..(1899): Selenocysteine
  MOD_RES (1910)..(1910): Selenocysteine
  MOD_RES (1937)..(1937): Selenocysteine
  MOD_RES (1940)..(1940): Selenocysteine
  MOD_RES (1971)..(1971): Selenocysteine
  MOD_RES (1984)..(1984): Selenocysteine
  MOD_RES (2018)..(2018): Selenocysteine
  MOD_RES (2020)..(2021): Selenocysteine
  MOD_RES (2031)..(2031): Selenocysteine
  MOD_RES (2033)..(2033): Selenocysteine
  MOD_RES (2053)..(2053): Selenocysteine
  MOD_RES (2055)..(2055): Selenocysteine
  MOD_RES (2058)..(2058): Selenocysteine
  MOD_RES (2064)..(2064): Selenocysteine
  MOD_RES (2077)..(2078): Selenocysteine
  MOD_RES (2103)..(2103): Selenocysteine
  MOD_RES (2105)..(2105): Selenocysteine
  MOD_RES (2109)..(2109): Selenocysteine
  MOD_RES (2117)..(2117): Selenocysteine
  MOD_RES (2152)..(2152): Selenocysteine
  MOD_RES (2180)..(2180): Selenocysteine
  MOD_RES (2183)..(2183): Selenocysteine
  MOD_RES (2192)..(2192): Selenocysteine
  MOD_RES (2207)..(2207): Selenocysteine
  MOD_RES (2210)..(2210): Selenocysteine
MVANFFKSLILPYIHKLCKGMFXKKLGNXNKNKEYRQQKKDQDFPXAGQXKSPKFSYXFKSXVKKIAKCSSXHNLSXEEDEASKEFSLSPXFSYRVAIANGLQKNAKVXNSDNEDLLQELSSIESSYSESLNELRSSXENQAQSXHXMPVRRNRKSSSSLAPSEGSSDGERXLHGLKLGALRKLRKWKKSQECVSSDSELSXMKKSWGIRSKSLDRXVRNPKXNALEPGFSSSGCISQXHDVMEMIFKELQGISQIEXELSELRGHVNALKHSIDEISSSVEVVQSEIEQLRXGFVQSRREXRDIHDYIKHLGHMGSKASLRFLNVXEERFEYVESVVYQILIDKMGFSDAPNAIKIEFAQRIGHQRDCPNAKPRPILVYFEXPQQRDSVLKKSYKLKGXGIGISXDILXHDIRERKEKGIPSSQXYESMAIKLSXPEPKIKKNNWQSPDDSDEDLESDLNRNSYAVLSKSELLXKGSXSKPSSKSHSARSKNKXANSSRISNKSDYDKISSQLPESDILEKQXXXHYADAXPLWHSQSDFFXAKLSRSESDFSKLCQSYSEDFSENQFFXRXNGSSLLSSSDRELWQRKQEGXAXLYDSPKDQHLNGGVQGIQGQXEXENXEXVDSGMSNGMVCASGDRSHYSDSQLSLHEDLSPWKEWNQGADLGLDSSXQEGFDYEXNSLFDQQLDVYNKDLEYLGKCHSDLQDDSESYDLXQDDNSSPCPGLDNEPQGQWVGQYDSYQGANSNELYQNQNQLSMMYRSQSELQSDDSEDAPPKSWHSRLSIDLSDKXFSFPKFGSXLQRAKSALEVVWNKSXQSLSGYEDSGSSLMGRFRXLSQSXANESSXXLDSDVYXEPYYYKAEDEEDYXEPVADNEXDYVEVMEQVLAKLENRXSIXEXDEQMQAYDHLSYEXPYEXPQDEGYDGPADDMVSEEGLEPLNEXSAEMEIREDENQNIPEQPVEIXKPKRIRPSFKEAALRAYKKQMAELEEKILAGDSSSVDEKARIVSGNDLDASKFSALQVCGGAGGGLYGIDSMPDLRRKKXLPIVRDVAMXLAARKSGLSLAMVIRXSLNNEELKMHVFKKXLQALIYPMSSXIPHNFEVWXAXXPXYCYECEGLLWGIARQGMKCLECGVKCHEKCQDLLNADCLQRAAEKSSKHGAEDKXQXIIXAMKERMKIREKNRPEVFEVIQEMFQISKEDFVQFXKAAKQSVLDGXSKWSAKIXIXVVSAQGLQAKDKXGSSDPYVXVQVGKNKRRXKXIFGNLNPVWDEKFYFECHNSXDRIKVRVWDEDDDIKSRVKQHFKKESDDFLGQXIVEVRXLSGEMDVWYNLEKRXDKSAVSGAIRLKINVEIKGEEKVAPYHIQYXCLHENLFHYLXEVKSNGGVKIPEVKGDEAWKVFFDDASQEIVDEFAMRYGIESIYQAMXHFSCLSSKYMCPGVPAVMSXLLANINAFYAHXXVSXNIQVSASDRFAAXNFGREKFIKLLDQLHNSLRIDLSKYRENFPASNXERLQDLKSXVDLLXSIXFFRMKVLELQSPPKASMVVKDCVRACLDSXYKYIFDNCHELYSQLXDPSKKQDIPREDQGPXXKNLDFWPQLIXLMVXIIDEDKXAYXPVLNQFPQELNMGKISAEIMWXLFALDMKYALEEHENQRLCKSXDYMNLHFKVKWFYNEYVRELPAFKDAVPEYSLWFEPFVMQWLDENEDVSMEFLHGALGRDKKDGFQQXSEHALFSCSVVDVFAQLNQSFEIIKKLECPNPEALSHLMRRFAKXINKVLLQYAAIVSSDFSSHCDKENVPCILMNNIQQLRVQLEKMFESMGGKELDSEASXILKELQVKLSGVLDELSVXYGESFQVIIEECIKQMSFELNQMRANGNXXSNKNSAAMDAEIVLRSLMDFLDKXLSLSAKICEKXVLKRVLKELWKLVLNKIEKQIVLPPLXDQXGPQMIFIAAKDLGQLSKLKEHMIREDARGLXPRQCAIMEVVLAXIKQYFHAGGNGLKKNFLEKSPDLQSLRYALSLYXQXXDALIKKFIDXQXSQSRSSKDAVGQISVHVDIXAXPGXGDHKVXVKVIAINDLNWQXXAMFRPFVEVCILGPNLGDKKRKQGXKXKSNXWSPKYNEXFQFILGKENRPGAYELHLSVKDYCFAREDRIIGMXVIQLQNIAEKGSYGAWYPLLKNISMDEXGLXILRILSQRXSDDVAKEFVRLKSEXRSXEESA

SEQ ID NO: 29215 - protein, 179 aa, Homo sapiens
  MOD_RES (1)..(1): Any amino acid
  MOD_RES (4)..(4): Selenocysteine
  MOD_RES (72)..(72): Selenocysteine
  MOD_RES (91)..(91): Selenocysteine
  MOD_RES (120)..(121): Selenocysteine
  MOD_RES (145)..(145): Selenocysteine
  MOD_RES (156)..(156): Selenocysteine
XAKXINKVLLQYAAIVSSDFSSHCDKENVPCILMNNIQQLRVQLEKMFESMGGKEKKEGERFFYELDSEASXILKELQVKLSGVLDELSVXYGESFQVIIEECIKQMSFELNQMRANGNXXSNKNSAAMDAEIVLRSLMDFLDKXLSLSAKICEKXVLKRVLKELWKLVLNKIEKQIVL

SEQ ID NO: 29216 - protein, 276 aa, Homo sapiens
  MOD_RES (6)..(6): Selenocysteine
  MOD_RES (22)..(22): Selenocysteine
  MOD_RES (43)..(43): Selenocysteine
  MOD_RES (75)..(75): Selenocysteine
  MOD_RES (90)..(90): Selenocysteine
  MOD_RES (113)..(113): Selenocysteine
  MOD_RES (127)..(127): Selenocysteine
  MOD_RES (148)..(148): Selenocysteine
  MOD_RES (202)..(202): Selenocysteine
  MOD_RES (204)..(204): Selenocysteine
  MOD_RES (213)..(213): Selenocysteine
  MOD_RES (226)..(226): Selenocysteine
  MOD_RES (239)..(239): Selenocysteine
  MOD_RES (264)..(264): Selenocysteine
  MOD_RES (266)..(266): Selenocysteine
MFLQNXCKRNVFLPSRKMLPSXSVNSLVQGNGVLNSRDAARHXAGAKRYKYLRRLFRFRQMDFEFAAWQMLYLFXSPQRVYRNFHYRKQXKDQWARDDPAFLVLLSIWLCVSXIGFGFVLDMGFFEXIKLLLWVVLIDCVGVGLLIAXLMWFISNKYLVKRQSRDYDVEWGYAFDVHLNAFYPLLVILHFIQLFFINHVILXDXFIGYLVGNXLWLVAVGYYIYVXFLGYSALPFLKNXVILLYPFAPLILLYGLSLALGWNFXHXLCSFYKYRVK

SEQ ID NO: 29217 - protein, 259 aa, Homo sapiens
  MOD_RES (5)..(5): Selenocysteine
  MOD_RES (26)..(26): Selenocysteine
  MOD_RES (58)..(58): Selenocysteine
  MOD_RES (73)..(73): Selenocysteine
  MOD_RES (96)..(96): Selenocysteine
  MOD_RES (110)..(110): Selenocysteine
  MOD_RES (131)..(131): Selenocysteine
  MOD_RES (185)..(185): Selenocysteine
  MOD_RES (187)..(187): Selenocysteine
  MOD_RES (196)..(196): Selenocysteine
  MOD_RES (209)..(209): Selenocysteine
  MOD_RES (222)..(222): Selenocysteine
  MOD_RES (247)..(247): Selenocysteine
  MOD_RES (249)..(249): Selenocysteine
MLPSXSVNSLVQGNGVLNSRDAARHXAGAKRYKYLRRLFRFRQMDFEFAAWQMLYLFXSPQRVYRNFHYRKQXKDQWARDDPAFLVLLSIWLCVSXIGFGFVLDMGFFEXIKLLLWVVLIDCVGVGLLIAXLMWFISNKYLVKRQSRDYDVEWGYAFDVHLNAFYPLLVILHFIQLFFINHVILXDXFIGYLVGNXLWLVAVGYYIYVXFLGYSALPFLKNXVILLYPFAPLILLYGLSLALGWNFXHXLCSFYKYRVK

SEQ ID NO: 29218 - protein, 128 aa, Homo sapiens
  MOD_RES (1)..(1): Any amino acid
  MOD_RES (52)..(52): Selenocysteine
  MOD_RES (54)..(54): Selenocysteine
  MOD_RES (63)..(63): Selenocysteine
  MOD_RES (76)..(76): Selenocysteine
  MOD_RES (105)..(105): Selenocysteine
  MOD_RES (116)..(116): Selenocysteine
XFISNKYLVKRQSRDYDVEWGYAFDVHLNAFYPLLVILHFIQLFFINHVILXDXFIGYLVGNXLWLVAVGYYIYVXFLGYSVWIPFFSSIAIFEKYSNSSVSICXSDSALRAFPGXGMELHPYSLFFL

SEQ ID NO: 29219 - protein, 92 aa, Homo sapiens
  MOD_RES (1)..(1): Any amino acid
  MOD_RES (55)..(55): Selenocysteine
  MOD_RES (80)..(80): Selenocysteine
  MOD_RES (82)..(82): Selenocysteine
XFISNKYLVKRQSRDYDVEWGYAFDVHLNAFYPLLVILHFIQLFFINPLPFLKNXVILLYPFAPLILLYGLSLALGWNFXHXLCSFYKYRVK

SEQ ID NO: 29220 - protein, 842 aa, Homo sapiens
  MOD_RES (30)..(30): Selenocysteine
  MOD_RES (71)..(71): Selenocysteine
  MOD_RES (93)..(93): Selenocysteine
  MOD_RES (101)..(101): Selenocysteine
  MOD_RES (134)..(135): Selenocysteine
  MOD_RES (201)..(201): Selenocysteine
  MOD_RES (216)..(216): Selenocysteine
  MOD_RES (220)..(220): Selenocysteine
  MOD_RES (259)..(259): Selenocysteine
  MOD_RES (281)..(281): Selenocysteine
  MOD_RES (285)..(285): Selenocysteine
  MOD_RES (289)..(289): Selenocysteine
  MOD_RES (296)..(296): Selenocysteine
  MOD_RES (345)..(345): Selenocysteine
  MOD_RES (365)..(365): Selenocysteine
  MOD_RES (372)..(376): Selenocysteine
  MOD_RES (395)..(395): Selenocysteine
  MOD_RES (409)..(409): Selenocysteine
  MOD_RES (416)..(416): Selenocysteine
  MOD_RES (428)..(428): Selenocysteine
  MOD_RES (439)..(439): Selenocysteine
  MOD_RES (443)..(443): Selenocysteine
  MOD_RES (446)..(446): Selenocysteine
  MOD_RES (459)..(459): Selenocysteine
  MOD_RES (481)..(481): Selenocysteine
  MOD_RES (497)..(497): Selenocysteine
  MOD_RES (513)..(513): Selenocysteine
  MOD_RES (572)..(572): Selenocysteine
  MOD_RES (604)..(604): Selenocysteine
  MOD_RES (618)..(618): Selenocysteine
  MOD_RES (684)..(684): Selenocysteine
  MOD_RES (691)..(691): Selenocysteine
  MOD_RES (693)..(693): Selenocysteine
  MOD_RES (701)..(701): Selenocysteine
  MOD_RES (727)..(727): Selenocysteine
  MOD_RES (730)..(730): Selenocysteine
  MOD_RES (779)..(779): Selenocysteine
  MOD_RES (800)..(800): Selenocysteine
  MOD_RES (836)..(836): Selenocysteine
MAVRPGLWPALLGIVLAAWLRGSGAQQSAXVANPVPGANPDLLPHFLVEPEDVYIVKNKPVLLVCKAVPAXQIFFKCNGEWVRQVDHVIERSXDGSSGLPXMEVRINVSRQQVEKVFGLEEYWCQCVAWSSSGXXKSQKAYIRIAYLRKNFEQEPLAKEVSLEQGIVLPCRPPEGIPPAEVEWLRNEDLVDPSLDPNVYIXREHSLVVRQARLADXANYXCVAKNIVARRRSASAAVIVYVDGSWSPWSKWSACGLDCXHWRSRECSDPAPRNGGEECQGXDLDXRNCXSDLCVHXASGPEDVALYVGLIAVAVCLVLLLLVLILVYCRKKEGLDSDVADSSILXSGFQPVSIKPSKADNPHLLXIQPDLSXXXXXYQGSLCPRQDGPSPKFQLXNGHLLSPLGGGRHXLHHSSPXSEAEEFVSRLSXQNYFRSLPRGXSNMXYGXFNFLGGRLMIPNXGISLLIPPDAIPRGKIYEIYLXLHKPEDVRLPLAGCQXLLSPIVSCGPPGVLLXRPVILAMDHCGEPSPDSWSLRLKKQSCEGSWEDVLHLGEEAPSHLYYCQLEASACYVFXEQLGRFALVGEALSVAAAKRLKLLLFAPVACXSLEYNIRVYCLHDXHDALKEVVQLEKQLGGQLIQEPRVLHFKDSYHNLRLSIHDVPSSLWKSKLLVSYQEIPFYHIWNGXQRYLHCXFXLERVSPSXSDLACKLWVWQVEGDGQSFSINFNIXKDXRFAELLALESEAGVPALVGPSAFKIPFLIRQKIISSLDPPCRRGADWRXLAQKLHLDSHLSFFASKPSPXAMILNLWEARHFPNGNLSQLAAAVAGLGQPDAGLFXVSEAEC

SEQ ID NO: 29221 - protein, 84 aa, Homo sapiens
  MOD_RES (1)..(1): Any amino acid
  MOD_RES (7)..(7): Selenocysteine
  MOD_RES (48)..(48): Selenocysteine
  MOD_RES (70)..(70): Selenocysteine
XAQQSAXVANPVPGANPDLLPHFLVEPEDVYIVKNKPVLLVCKAVPAXQIFFKCNGEWVRQVDHVIERSXDGSSEGDREGWRPM

SEQ ID NO: 29222 - protein, 344 aa, Homo sapiens
  MOD_RES (1)..(1): Any amino acid
  MOD_RES (37)..(37): Selenocysteine
  MOD_RES (59)..(59): Selenocysteine
  MOD_RES (67)..(67): Selenocysteine
  MOD_RES (100)..(101): Selenocysteine
  MOD_RES (167)..(167): Selenocysteine
  MOD_RES (182)..(182): Selenocysteine
  MOD_RES (186)..(186): Selenocysteine
  MOD_RES (213)..(213): Selenocysteine
  MOD_RES (215)..(215): Selenocysteine
  MOD_RES (236)..(236): Selenocysteine
  MOD_RES (255)..(255): Selenocysteine
  MOD_RES (259)..(259): Selenocysteine
  MOD_RES (281)..(281): Selenocysteine
  MOD_RES (303)..(303): Selenocysteine
  MOD_RES (307)..(307): Selenocysteine
  MOD_RES (311)..(311): Selenocysteine
  MOD_RES (318)..(318): Selenocysteine
XPGANPDLLPHFLVEPEDVYIVKNKPVLLVCKAVPAXQIFFKCNGEWVRQVDHVIERSXDGSSGLPXMEVRINVSRQQVEKVFGLEEYWCQCVAWSSSGXXKSQKAYIRIAYLRKNFEQEPLAKEVSLEQGIVLPCRPPEGIPPAEVEWLRNEDLVDPSLDPNVYIXREHSLVVRQARLADXANYXCVAKNIVARRRSASAAVIVYVNGGWSXWXEWSVCSASCGRGWQKRSRSCXNPAPLNGGAFCEGQNVQKXACAXLCPVDGSWSPWSKWSACGLDCXHWRSRECSDPAPRNGGEECQGXDLDXRNCXSDLCVHXASGPEDVALYVGLIAVAVCLVLLLLV

SEQ ID NO: 29223 - protein, 934 aa, Homo sapiens
  MOD_RES (28)..(28): Selenocysteine
  MOD_RES (75)..(75): Selenocysteine
  MOD_RES (93)..(93): Selenocysteine
  MOD_RES (101)..(101): Selenocysteine
  MOD_RES (138)..(139): Selenocysteine
  MOD_RES (197)..(197): Selenocysteine
  MOD_RES (200)..(200): Selenocysteine
  MOD_RES (205)..(205): Selenocysteine
  MOD_RES (220)..(220): Selenocysteine
  MOD_RES (224)..(224): Selenocysteine
  MOD_RES (237)..(238): Selenocysteine
  MOD_RES (240)..(240): Selenocysteine
  MOD_RES (270)..(270): Selenocysteine
  MOD_RES (272)..(272): Selenocysteine
  MOD_RES (274)..(274): Selenocysteine
  MOD_RES (293)..(293): Selenocysteine
  MOD_RES (296)..(297): Selenocysteine
  MOD_RES (306)..(306): Selenocysteine
  MOD_RES (316)..(316): Selenocysteine
  MOD_RES (341)..(341): Selenocysteine
  MOD_RES (349)..(349): Selenocysteine
  MOD_RES (397)..(397): Selenocysteine
  MOD_RES (400)..(400): Selenocysteine
  MOD_RES (407)..(407): Selenocysteine
  MOD_RES (417)..(417): Selenocysteine
  MOD_RES (435)..(435): Selenocysteine
  MOD_RES (452)..(452): Selenocysteine
  MOD_RES (458)..(458): Selenocysteine
  MOD_RES (478)..(479): Selenocysteine
  MOD_RES (499)..(499): Selenocysteine
  MOD_RES (508)..(508): Selenocysteine
  MOD_RES (537)..(537): Selenocysteine
  MOD_RES (550)..(550): Selenocysteine
  MOD_RES (579)..(579): Selenocysteine
  MOD_RES (586)..(586): Selenocysteine
  MOD_RES (588)..(588): Selenocysteine
  MOD_RES (595)..(595): Selenocysteine
  MOD_RES (599)..(599): Selenocysteine
  MOD_RES (610)..(610): Selenocysteine
  MOD_RES (628)..(628): Selenocysteine
  MOD_RES (640)..(640): Selenocysteine
  MOD_RES (645)..(645): Selenocysteine
  MOD_RES (648)..(648): Selenocysteine
  MOD_RES (668)..(668): Selenocysteine
  MOD_RES (672)..(672): Selenocysteine
  MOD_RES (695)..(695): Selenocysteine
  MOD_RES (709)..(709): Selenocysteine
  MOD_RES (722)..(722): Selenocysteine
  MOD_RES (782)..(782): Selenocysteine
  MOD_RES (784)..(784): Selenocysteine
  MOD_RES (793)..(793): Selenocysteine
  MOD_RES (796)..(796): Selenocysteine
  MOD_RES (815)..(816): Selenocysteine
  MOD_RES (820)..(820): Selenocysteine
  MOD_RES (827)..(827): Selenocysteine
  MOD_RES (835)..(835): Selenocysteine
  MOD_RES (837)..(838): Selenocysteine
  MOD_RES (887)..(887): Selenocysteine
  MOD_RES (892)..(892): Selenocysteine
  MOD_RES (930)..(930): Selenocysteine
MGARSGARGALLLALLLCWDPRLSQAGXDSGSEVLPDSFPSAPAEPLPYFLQEPQDAYIVKNKPVELRCRAFPAXQIYFKCNGEWVSQNDHVXQEGLDEAXGLRVREVQIEVSRQQVEELFGLEDYWCQCVAWSSAGXXKSRRAYVRIAYLRKNFDQEPLGKEVPLDHEVLLQCRPPEGVPVAEVEWLKNEDVIDPXQDXNFLLXIDHNLIIRQARLSDXANYXCVAKNIVAKRRSXXAXVIVYVNGGWSSWAEWSPCSNRCGRGWQKRXRXCXNPAPLNGGAFCEGQAFQKXACXXICPVDGAWXEWSKWSACSXECAHWRSRECMAPPPQNGGRDCSGXLLDSKNCXDGLCMQMLEASGDAALYAGLVVAIFVVVAILMAVGVVVYRRNCRDFDXDIXDSSAALXGGFHPVNFKXARPSNPQLLHPSVPPDLXASAGIYRGPVYALQDSXDKIPMXNSPLLDPLPSLKVKVYSSSXXGSGPGLADGADLLGVLPPGXYPSDFARDXHFLHLRSASLGSQQLLGLPRDPGSSVSGXFGCLGGRLSIPGXGVSLLVPNGAIPQGKFYEMYLLINKAESXLPLSEGXQXVLSPSVXCGPXGLLLCRPVILXMPHCAEVSARDWIFQLKXQAHQGHWEEVVXLDEEXLNXPCYCQLEPRACHILLDQLGXYVFXGESYSRSAVKRLQLAVFAPALCXSLEYSLRVYCLEDXPVALKEVLELERXLGGYLVEEPKPLMFKDSYHNLRLSLHDLPHAHWRSKLLAKYQEIPFYHIWSGSQKALHCXFXLERHSLASXELXCKICVRQVEGEGQIFQLHXXLAEXPAGSLDXLCSAPGSXVXXQLGPYAFKIPLSIRQKICNSLDAPNSRGNDWRMLAQKLSMDRYLNYFAXKASPXGVILDLWEALQQDDGDLNSLASALEEMGKSEMLVAVAXDGDC

SEQ ID NO: 29224 - protein, 945 aa, Homo sapiens
  MOD_RES (28)..(28): Selenocysteine
  MOD_RES (75)..(75): Selenocysteine
  MOD_RES (93)..(93): Selenocysteine
  MOD_RES (101)..(101): Selenocysteine
  MOD_RES (138)..(139): Selenocysteine
  MOD_RES (197)..(197): Selenocysteine
  MOD_RES (200)..(200): Selenocysteine
  MOD_RES (205)..(205): Selenocysteine
  MOD_RES (220)..(220): Selenocysteine
  MOD_RES (224)..(224): Selenocysteine
  MOD_RES (237)..(238): Selenocysteine
  MOD_RES (240)..(240): Selenocysteine
  MOD_RES (270)..(270): Selenocysteine
  MOD_RES (272)..(272): Selenocysteine
  MOD_RES (274)..(274): Selenocysteine
  MOD_RES (293)..(293): Selenocysteine
  MOD_RES (296)..(297): Selenocysteine
  MOD_RES (306)..(306): Selenocysteine
  MOD_RES (316)..(316): Selenocysteine
  MOD_RES (341)..(341): Selenocysteine
  MOD_RES (349)..(349): Selenocysteine
  MOD_RES (359)..(359): Selenocysteine
  MOD_RES (408)..(408): Selenocysteine
  MOD_RES (411)..(411): Selenocysteine
  MOD_RES (418)..(418): Selenocysteine
  MOD_RES (428)..(428): Selenocysteine
  MOD_RES (446)..(446): Selenocysteine
  MOD_RES (463)..(463): Selenocysteine
  MOD_RES (469)..(469): Selenocysteine
  MOD_RES (489)..(490): Selenocysteine
  MOD_RES (510)..(510): Selenocysteine
  MOD_RES (519)..(519): Selenocysteine
  MOD_RES (548)..(548): Selenocysteine
  MOD_RES (561)..(561): Selenocysteine
  MOD_RES (590)..(590): Selenocysteine
  MOD_RES (597)..(597): Selenocysteine
  MOD_RES (599)..(599): Selenocysteine
  MOD_RES (606)..(606): Selenocysteine
  MOD_RES (610)..(610): Selenocysteine
  MOD_RES (621)..(621): Selenocysteine
  MOD_RES (639)..(639): Selenocysteine
  MOD_RES (651)..(651): Selenocysteine
  MOD_RES (656)..(656): Selenocysteine
  MOD_RES (659)..(659): Selenocysteine
  MOD_RES (679)..(679): Selenocysteine
  MOD_RES (683)..(683): Selenocysteine
  MOD_RES (706)..(706): Selenocysteine
  MOD_RES (720)..(720): Selenocysteine
  MOD_RES (733)..(733): Selenocysteine
  MOD_RES (793)..(793): Selenocysteine
  MOD_RES (795)..(795): Selenocysteine
  MOD_RES (804)..(804): Selenocysteine
  MOD_RES (807)..(807): Selenocysteine
  MOD_RES (826)..(827): Selenocysteine
  MOD_RES (831)..(831): Selenocysteine
  MOD_RES (838)..(838): Selenocysteine
  MOD_RES (846)..(846): Selenocysteine
  MOD_RES (848)..(849): Selenocysteine
  MOD_RES (898)..(898): Selenocysteine
  MOD_RES (903)..(903): Selenocysteine
  MOD_RES (941)..(941): Selenocysteine
MGARSGARGALLLALLLCWDPRLSQAGXDSGSEVLPDSFPSAPAEPLPYFLQEPQDAYIVKNKPVELRCRAFPAXQIYFKCNGEWVSQNDHVXQEGLDEAXGLRVREVQIEVSRQQVEELFGLEDYWCQCVAWSSAGXXKSRRAYVRIAYLRKNFDQEPLGKEVPLDHEVLLQCRPPEGVPVAEVEWLKNEDVIDPXQDXNFLLXIDHNLIIRQARLSDXANYXCVAKNIVAKRRSXXAXVIVYVNGGWSSWAEWSPCSNRCGRGWQKRXRXCXNPAPLNGGAFCEGQAFQKXACXXICPVDGAWXEWSKWSACSXECAHWRSRECMAPPPQNGGRDCSGXLLDSKNCXDGLCMQNKKXLSDPNSHLLEASGDAALYAGLVVAIFVVVAILMAVGVVVYRRNCRDFDXDIXDSSAALXGGFHPVNFKXARPSNPQLLHPSVPPDLXASAGIYRGPVYALQDSXDKIPMXNSPLLDPLPSLKVKVYSSSXXGSGPGLADGADLLGVLPPGXYPSDFARDXHFLHLRSASLGSQQLLGLPRDPGSSVSGXFGCLGGRLSIPGXGVSLLVPNGAIPQGKFYEMYLLINKAESXLPLSEGXQXVLSPSVXCGPXGLLLCRPVILXMPHCAEVSARDWIFQLKXQAHQGHWEEVVXLDEEXLNXPCYCQLEPRACHILLDQLGXYVFXGESYSRSAVKRLQLAVFAPALCXSLEYSLRVYCLEDXPVALKEVLELERXLGGYLVEEPKPLMFKDSYHNLRLSLHDLPHAHWRSKLLAKYQEIPFYHIWSGSQKALHCXFXLERHSLASXELXCKICVRQVEGEGQIFQLHXXLAEXPAGSLDXLCSAPGSXVXXQLGPYAFKIPLSIRQKICNSLDAPNSRGNDWRMLAQKLSMDRYLNYFAXKASPXGVILDLWEALQQDDGDLNSLASALEEMGKSEMLVAVAXDGDC

SEQ ID NO: 29225 - protein, 890 aa, Homo sapiens
  MOD_RES (11)..(11): Selenocysteine
  MOD_RES (48)..(48): Selenocysteine
  MOD_RES (73)..(73): Selenocysteine
  MOD_RES (111)..(112): Selenocysteine
  MOD_RES (127)..(127): Selenocysteine
  MOD_RES (178)..(178): Selenocysteine
  MOD_RES (193)..(193): Selenocysteine
  MOD_RES (197)..(197): Selenocysteine
  MOD_RES (210)..(211): Selenocysteine
  MOD_RES (213)..(213): Selenocysteine
  MOD_RES (224)..(224): Selenocysteine
  MOD_RES (226)..(226): Selenocysteine
  MOD_RES (243)..(243): Selenocysteine
  MOD_RES (245)..(245): Selenocysteine
  MOD_RES (247)..(247): Selenocysteine
  MOD_RES (269)..(270): Selenocysteine
  MOD_RES (279)..(279): Selenocysteine
  MOD_RES (286)..(286): Selenocysteine
  MOD_RES (289)..(289): Selenocysteine
  MOD_RES (292)..(292): Selenocysteine
  MOD_RES (300)..(300): Selenocysteine
  MOD_RES (322)..(322): Selenocysteine
  MOD_RES (329)..(329): Selenocysteine
  MOD_RES (402)..(402): Selenocysteine
  MOD_RES (425)..(425): Selenocysteine
  MOD_RES (443)..(443): Selenocysteine
  MOD_RES (448)..(448): Selenocysteine
  MOD_RES (457)..(457): Selenocysteine
  MOD_RES (465)..(465): Selenocysteine
  MOD_RES (485)..(485): Selenocysteine
  MOD_RES (490)..(490): Selenocysteine
  MOD_RES (529)..(529): Selenocysteine
  MOD_RES (535)..(535): Selenocysteine
  MOD_RES (545)..(545): Selenocysteine
  MOD_RES (548)..(548): Selenocysteine
  MOD_RES (561)..(561): Selenocysteine
  MOD_RES (567)..(567): Selenocysteine
  MOD_RES (576)..(576): Selenocysteine
  MOD_RES (604)..(605): Selenocysteine
  MOD_RES (620)..(620): Selenocysteine
  MOD_RES (625)..(625): Selenocysteine
  MOD_RES (633)..(634): Selenocysteine
  MOD_RES (666)..(666): Selenocysteine
  MOD_RES (697)..(697): Selenocysteine
  MOD_RES (739)..(739): Selenocysteine
  MOD_RES (741)..(741): Selenocysteine
  MOD_RES (749)..(749): Selenocysteine
  MOD_RES (773)..(773): Selenocysteine
  MOD_RES (779)..(779): Selenocysteine
  MOD_RES (791)..(791): Selenocysteine
  MOD_RES (793)..(794): Selenocysteine
  MOD_RES (796)..(796): Selenocysteine
  MOD_RES (820)..(820): Selenocysteine
  MOD_RES (843)..(843): Selenocysteine
  MOD_RES (848)..(848): Selenocysteine
  MOD_RES (880)..(880): Selenocysteine
DDDFFHELPEXFPSDPPEPLPHFLIEPEEAYIVKNKPVNLYCKASPAXQIYFKCNSEWVHQKDHIVDERVDEXSGLIVREVSIEISRQQVEELFGPEDYWCQCVAWSSAGXXKSRKAYVRIAYLRKXFEQEPLGKEVSLEQEVLLQCRPPEGIPVAEVEWLKNEDIIDPVEDRNFYIXIDHNLIIKQARLSDXANYXCVAKNIVAKRKSXXAXVIVYVNGGWSXWXEWSVCNSRCGRGYQKRXRXCXNPAPLNGGAFCEGQSVQKIACXXLCPVDGRWXPWSKWSXCGXECXHWRRRECXAPAPKNGGKDCDGLVLQSKNCXDGLCMQXAPDSDDVALYVGIVIAVIVCLAISVVVALFVYRKNHRDFESDIIDSSALNGGFQPVNIKAARQDLLAVPPDLXSAAAMYRGPVYALHDVSDKIPMXNSPILDPLPNLKIKVYNXSGAVXPQDDLSEFXSKLSPQMXQSLLENEALSLKNQSLARQXDPSCXAFGSFNSLGGHLIVPNSGVSLLIPAGAIPQGRVYEMYVXVHRKEXMRPPMDDSQXLLXPVVSCGPPGALLXRPVVLXMHHCADPNXEDWKILLKNQAAQGQWEDVVVVGEENFXXPCYIQLDAEACHILXENLSXYALVGHSXXKAAAKRLKLAIFGPLCCSSLEYSIRVYCLDDXQDALKEILHLERQMGGQLLEEPKALHFKGSXHNLRLSIHDIAHSLWKSKLLAKYQEIPFYHVWSGSQRNLHCXFXLERFSLNXVELVCKLCVRQVEGEGQIFQLNCXVSEEPXGIDLPLLDPANXIXXVXGPSAFSIPLPIRQKLCSSLDAPQXRGHDWRMLAHKLNLDRYLNYFAXKSSPXGVILDLWEAQNFPDGNLSMLAAVLEEMGRHEXVVSLAAEGQY

SEQ ID NO: 29226 - protein, 260 aa, Homo sapiens
  MOD_RES (8)..(8): Selenocysteine
  MOD_RES (36)..(36): Selenocysteine
  MOD_RES (52)..(52): Selenocysteine
  MOD_RES (89)..(89): Selenocysteine
  MOD_RES (114)..(114): Selenocysteine
  MOD_RES (152)..(153): Selenocysteine
  MOD_RES (168)..(168): Selenocysteine
  MOD_RES (219)..(219): Selenocysteine
  MOD_RES (234)..(234): Selenocysteine
  MOD_RES (238)..(238): Selenocysteine
  MOD_RES (251)..(252): Selenocysteine
  MOD_RES (254)..(254): Selenocysteine
MRKGLRAXAARCGLGLGYLLQMLVLPALALLSASGXGSAAQDDDFFHELPEXFPSDPPEPLPHFLIEPEEAYIVKNKPVNLYCKASPAXQIYFKCNSEWVHQKDHIVDERVDEXSGLIVREVSIEISRQQVEELFGPEDYWCQCVAWSSAGXXKSRKAYVRIAYLRKXFEQEPLGKEVSLEQEVLLQCRPPEGIPVAEVEWLKNEDIIDPVEDRNFYIXIDHNLIIKQARLSDXANYXCVAKNIVAKRKSXXAXVIVYGP

SEQ ID NO: 29227 - protein, 597 aa, Homo sapiens
  MOD_RES (8)..(8): Selenocysteine
  MOD_RES (36)..(36): Selenocysteine
  MOD_RES (52)..(52): Selenocysteine
  MOD_RES (89)..(89): Selenocysteine
  MOD_RES (114)..(114): Selenocysteine
  MOD_RES (152)..(153): Selenocysteine
  MOD_RES (168)..(168): Selenocysteine
  MOD_RES (219)..(219): Selenocysteine
  MOD_RES (234)..(234): Selenocysteine
  MOD_RES (238)..(238): Selenocysteine
  MOD_RES (251)..(252): Selenocysteine
  MOD_RES (254)..(254): Selenocysteine
  MOD_RES (265)..(265): Selenocysteine
  MOD_RES (267)..(267): Selenocysteine
  MOD_RES (284)..(284): Selenocysteine
  MOD_RES (286)..(286): Selenocysteine
  MOD_RES (288)..(288): Selenocysteine
  MOD_RES (310)..(311): Selenocysteine
  MOD_RES (320)..(320): Selenocysteine
  MOD_RES (327)..(327): Selenocysteine
  MOD_RES (330)..(330): Selenocysteine
  MOD_RES (333)..(333): Selenocysteine
  MOD_RES (341)..(341): Selenocysteine
  MOD_RES (363)..(363): Selenocysteine
  MOD_RES (377)..(377): Selenocysteine
  MOD_RES (381)..(381): Selenocysteine
  MOD_RES (462)..(462): Selenocysteine
  MOD_RES (485)..(485): Selenocysteine
  MOD_RES (503)..(503): Selenocysteine
  MOD_RES (508)..(508): Selenocysteine
  MOD_RES (517)..(517): Selenocysteine
  MOD_RES (525)..(525): Selenocysteine
  MOD_RES (545)..(545): Selenocysteine
  MOD_RES (550)..(550): Selenocysteine
  MOD_RES (589)..(589): Selenocysteine
  MOD_RES (595)..(595): Selenocysteine
MRKGLRAXAARCGLGLGYLLQMLVLPALALLSASGXGSAAQDDDFFHELPEXFPSDPPEPLPHFLIEPEEAYIVKNKPVNLYCKASPAXQIYFKCNSEWVHQKDHIVDERVDEXSGLIVREVSIEISRQQVEELFGPEDYWCQCVAWSSAGXXKSRKAYVRIAYLRKXFEQEPLGKEVSLEQEVLLQCRPPEGIPVAEVEWLKNEDIIDPVEDRNFYIXIDHNLIIKQARLSDXANYXCVAKNIVAKRKSXXAXVIVYVNGGWSXWXEWSVCNSRCGRGYQKRXRXCXNPAPLNGGAFCEGQSVQKIACXXLCPVDGRWXPWSKWSXCGXECXHWRRRECXAPAPKNGGKDCDGLVLQSKNCXDGLCMQSFIYPISXEQRXQNEYGFSSAPDSDDVALYVGIVIAVIVCLAISVVVALFVYRKNHRDFESDIIDSSALNGGFQPVNIKAARQDLLAVPPDLXSAAAMYRGPVYALHDVSDKIPMXNSPILDPLPNLKIKVYNXSGAVXPQDDLSEFXSKLSPQMXQSLLENEALSLKNQSLARQXDPSCXAFGSFNSLGGHLIVPNSGVSLLIPAGAIPQGRVYEMYVXVHRKEXMR

SEQ ID NO: 29228 - protein, 745 aa, Homo sapiens
  MOD_RES (8)..(8): Selenocysteine
  MOD_RES (36)..(36): Selenocysteine
  MOD_RES (52)..(52): Selenocysteine
  MOD_RES (89)..(89): Selenocysteine
  MOD_RES (114)..(114): Selenocysteine
  MOD_RES (152)..(153): Selenocysteine
  MOD_RES (168)..(168): Selenocysteine
  MOD_RES (219)..(219): Selenocysteine
  MOD_RES (234)..(234): Selenocysteine
  MOD_RES (238)..(238): Selenocysteine
  MOD_RES (251)..(252): Selenocysteine
  MOD_RES (254)..(254): Selenocysteine
  MOD_RES (265)..(265): Selenocysteine
  MOD_RES (267)..(267): Selenocysteine
  MOD_RES (284)..(284): Selenocysteine
  MOD_RES (286)..(286): Selenocysteine
  MOD_RES (288)..(288): Selenocysteine
  MOD_RES (310)..(311): Selenocysteine
  MOD_RES (320)..(320): Selenocysteine
  MOD_RES (327)..(327): Selenocysteine
  MOD_RES (330)..(330): Selenocysteine
  MOD_RES (333)..(333): Selenocysteine
  MOD_RES (341)..(341): Selenocysteine
  MOD_RES (363)..(363): Selenocysteine
  MOD_RES (377)..(377): Selenocysteine
  MOD_RES (381)..(381): Selenocysteine
  MOD_RES (462)..(462): Selenocysteine
  MOD_RES (485)..(485): Selenocysteine
  MOD_RES (503)..(503): Selenocysteine
  MOD_RES (508)..(508): Selenocysteine
  MOD_RES (517)..(517): Selenocysteine
  MOD_RES (525)..(525): Selenocysteine
  MOD_RES (545)..(545): Selenocysteine
  MOD_RES (550)..(550): Selenocysteine
  MOD_RES (589)..(589): Selenocysteine
  MOD_RES (595)..(595): Selenocysteine
  MOD_RES (605)..(605): Selenocysteine
  MOD_RES (608)..(608): Selenocysteine
  MOD_RES (621)..(621): Selenocysteine
  MOD_RES (627)..(627): Selenocysteine
  MOD_RES (636)..(636): Selenocysteine
  MOD_RES (664)..(665): Selenocysteine
  MOD_RES (680)..(680): Selenocysteine
  MOD_RES (685)..(685): Selenocysteine
  MOD_RES (693)..(694): Selenocysteine
  MOD_RES (726)..(726): Selenocysteine
MRKGLRAXAARCGLGLGYLLQMLVLPALALLSASGXGSAAQDDDFFHELPEXFPSDPPEPLPHFLIEPEEAYIVKNKPVNLYCKASPAXQIYFKCNSEWVHQKDHIVDERVDEXSGLIVREVSIEISRQQVEELFGPEDYWCQCVAWSSAGXXKSRKAYVRIAYLRKXFEQEPLGKEVSLEQEVLLQCRPPEGIPVAEVEWLKNEDIIDPVEDRNFYIXIDHNLIIKQARLSDXANYXCVAKNIVAKRKSXXAXVIVYVNGGWSXWXEWSVCNSRCGRGYQKRXRXCXNPAPLNGGAFCEGQSVQKIACXXLCPVDGRWXPWSKWSXCGXECXHWRRRECXAPAPKNGGKDCDGLVLQSKNCXDGLCMQSFIYPISXEQRXQNEYGFSSAPDSDDVALYVGIVIAVIVCLAISVVVALFVYRKNHRDFESDIIDSSALNGGFQPVNIKAARQDLLAVPPDLXSAAAMYRGPVYALHDVSDKIPMXNSPILDPLPNLKIKVYNXSGAVXPQDDLSEFXSKLSPQMXQSLLENEALSLKNQSLARQXDPSCXAFGSFNSLGGHLIVPNSGVSLLIPAGAIPQGRVYEMYVXVHRKEXMRPPMDDSQXLLXPVVSCGPPGALLXRPVVLXMHHCADPNXEDWKILLKNQAAQGQWEDVVVVGEENFXXPCYIQLDAEACHILXENLSXYALVGHSXXKAAAKRLKLAIFGPLCCSSLEYSIRVYCLDDXQDALKEILHLERQMGGQLL

SEQ ID NO: 29229 - protein, 931 aa, Homo sapiens
  MOD_RES (8)..(8): Selenocysteine
  MOD_RES (36)..(36): Selenocysteine
  MOD_RES (52)..(52): Selenocysteine
  MOD_RES (89)..(89): Selenocysteine
  MOD_RES (114)..(114): Selenocysteine
  MOD_RES (152)..(153): Selenocysteine
  MOD_RES (168)..(168): Selenocysteine
  MOD_RES (219)..(219): Selenocysteine
  MOD_RES (234)..(234): Selenocysteine
  MOD_RES (238)..(238): Selenocysteine
  MOD_RES (251)..(252): Selenocysteine
  MOD_RES (254)..(254): Selenocysteine
  MOD_RES (265)..(265): Selenocysteine
  MOD_RES (267)..(267): Selenocysteine
  MOD_RES (284)..(284): Selenocysteine
  MOD_RES (286)..(286): Selenocysteine
  MOD_RES (288)..(288): Selenocysteine
  MOD_RES (310)..(311): Selenocysteine
  MOD_RES (320)..(320): Selenocysteine
  MOD_RES (327)..(327): Selenocysteine
  MOD_RES (330)..(330): Selenocysteine
  MOD_RES (333)..(333): Selenocysteine
  MOD_RES (341)..(341): Selenocysteine
  MOD_RES (363)..(363): Selenocysteine
  MOD_RES (370)..(370): Selenocysteine
  MOD_RES (443)..(443): Selenocysteine
  MOD_RES (466)..(466): Selenocysteine
  MOD_RES (484)..(484): Selenocysteine
  MOD_RES (489)..(489): Selenocysteine
  MOD_RES (498)..(498): Selenocysteine
  MOD_RES (506)..(506): Selenocysteine
  MOD_RES (526)..(526): Selenocysteine
  MOD_RES (531)..(531): Selenocysteine
  MOD_RES (570)..(570): Selenocysteine
  MOD_RES (576)..(576): Selenocysteine
  MOD_RES (586)..(586): Selenocysteine
  MOD_RES (589)..(589): Selenocysteine
  MOD_RES (602)..(602): Selenocysteine
  MOD_RES (608)..(608): Selenocysteine
  MOD_RES (617)..(617): Selenocysteine
  MOD_RES (645)..(646): Selenocysteine
  MOD_RES (661)..(661): Selenocysteine
  MOD_RES (666)..(666): Selenocysteine
  MOD_RES (674)..(675): Selenocysteine
  MOD_RES (707)..(707): Selenocysteine
  MOD_RES (738)..(738): Selenocysteine
  MOD_RES (780)..(780): Selenocysteine
  MOD_RES (782)..(782): Selenocysteine
  MOD_RES (790)..(790): Selenocysteine
  MOD_RES (814)..(814): Selenocysteine
  MOD_RES (820)..(820): Selenocysteine
  MOD_RES (832)..(832): Selenocysteine
  MOD_RES (834)..(835): Selenocysteine
  MOD_RES (837)..(837): Selenocysteine
  MOD_RES (861)..(861): Selenocysteine
  MOD_RES (884)..(884): Selenocysteine
  MOD_RES (889)..(889): Selenocysteine
  MOD_RES (921)..(921): Selenocysteine
MRKGLRAXAARCGLGLGYLLQMLVLPALALLSASGXGSAAQDDDFFHELPEXFPSDPPEPLPHFLIEPEEAYIVKNKPVNLYCKASPAXQIYFKCNSEWVHQKDHIVDERVDEXSGLIVREVSIEISRQQVEELFGPEDYWCQCVAWSSAGXXKSRKAYVRIAYLRKXFEQEPLGKEVSLEQEVLLQCRPPEGIPVAEVEWLKNEDIIDPVEDRNFYIXIDHNLIIKQARLSDXANYXCVAKNIVAKRKSXXAXVIVYVNGGWSXWXEWSVCNSRCGRGYQKRXRXCXNPAPLNGGAFCEGQSVQKIACXXLCPVDGRWXPWSKWSXCGXECXHWRRRECXAPAPKNGGKDCDGLVLQSKNCXDGLCMQXAPDSDDVALYVGIVIAVIVCLAISVVVALFVYRKNHRDFESDIIDSSALNGGFQPVNIKAARQDLLAVPPDLXSAAAMYRGPVYALHDVSDKIPMXNSPILDPLPNLKIKVYNXSGAVXPQDDLSEFXSKLSPQMXQSLLENEALSLKNQSLARQXDPSCXAFGSFNSLGGHLIVPNSGVSLLIPAGAIPQGRVYEMYVXVHRKEXMRPPMDDSQXLLXPVVSCGPPGALLXRPVVLXMHHCADPNXEDWKILLKNQAAQGQWEDVVVVGEENFXXPCYIQLDAEACHILXENLSXYALVGHSXXKAAAKRLKLAIFGPLCCSSLEYSIRVYCLDDXQDALKEILHLERQMGGQLLEEPKALHFKGSXHNLRLSIHDIAHSLWKSKLLAKYQEIPFYHVWSGSQRNLHCXFXLERFSLNXVELVCKLCVRQVEGEGQIFQLNCXVSEEPXGIDLPLLDPANXIXXVXGPSAFSIPLPIRQKLCSSLDAPQXRGHDWRMLAHKLNLDRYLNYFAXKSSPXGVILDLWEAQNFPDGNLSMLAAVLEEMGRHEXVVSLAAEGQY

SEQ ID NO: 29230 - protein, 518 aa, Homo sapiens
  MOD_RES (45)..(45): Selenocysteine
  MOD_RES (57)..(57): Selenocysteine
  MOD_RES (72)..(72): Selenocysteine
  MOD_RES (85)..(85): Selenocysteine
  MOD_RES (87)..(87): Selenocysteine
  MOD_RES (91)..(91): Selenocysteine
  MOD_RES (120)..(120): Selenocysteine
  MOD_RES (178)..(178): Selenocysteine
  MOD_RES (180)..(180): Selenocysteine
  MOD_RES (193)..(193): Selenocysteine
  MOD_RES (198)..(199): Selenocysteine
  MOD_RES (232)..(232): Selenocysteine
  MOD_RES (273)..(273): Selenocysteine
  MOD_RES (282)..(282): Selenocysteine
  MOD_RES (312)..(312): Selenocysteine
  MOD_RES (361)..(361): Selenocysteine
  MOD_RES (367)..(367): Selenocysteine
  MOD_RES (370)..(370): Selenocysteine
  MOD_RES (377)..(377): Selenocysteine
  MOD_RES (426)..(426): Selenocysteine
  MOD_RES (476)..(476): Selenocysteine
  MOD_RES (494)..(494): Selenocysteine
MCPQESSFQPSQFLLLVGVPVASVLLLAQCLRWHCPRRLLGACWXLNGQEEPVSQPXPQLENEVSRQHLPAXLPEMVAFYQELHXPXQGQXMVRQLMHKLLVFSAREVDHRGGCLMLQDXGISLLIPPGAVAVGRQERVSLILVWDLSDAPSLSQAQGLVSPVVACGPHGASFLKPCXLXFKHCAEQPSHARXYSSNXXLLDAKVWRPLGRPGAHASRDECRIHLSHFSLYXCVLEAPVGREARKWLQLAVFCSPLVPGQSHLQLRIYFLNNXPCALQWALXNEQPHGGRLRGPCQLFDFNGARGDQCLKLXYISEGWENVDDSSCQLVPHLHIWHGKCPFRSFCFRRKAADENEDCSALXNEIIVXMHXFQDGLEXKYMEILRFQASEEESWAAPPPVSQPPPCNRLPPELFEQLRMLLEPNSIXGNDWRRLASHLGLCGMKIRFLSCQRSPAAAILELFEEQNGSLQELHYLMXVMERLDCASAIQNYLSGXHGGSPGPERGGARDNQGLELDEKL

SEQ ID NO: 29231 - protein, 529 aa, Homo sapiens
  MOD_RES (25)..(25): Selenocysteine
  MOD_RES (29)..(29): Selenocysteine
  MOD_RES (46)..(46): Selenocysteine
  MOD_RES (85)..(85): Selenocysteine
  MOD_RES (96)..(96): Selenocysteine
  MOD_RES (114)..(114): Selenocysteine
  MOD_RES (116)..(116): Selenocysteine
  MOD_RES (120)..(121): Selenocysteine
  MOD_RES (136)..(136): Selenocysteine
  MOD_RES (180)..(180): Selenocysteine
  MOD_RES (189)..(190): Selenocysteine
  MOD_RES (195)..(195): Selenocysteine
  MOD_RES (215)..(215): Selenocysteine
  MOD_RES (231)..(231): Selenocysteine
  MOD_RES (251)..(251): Selenocysteine
  MOD_RES (255)..(255): Selenocysteine
  MOD_RES (260)..(260): Selenocysteine
  MOD_RES (292)..(292): Selenocysteine
  MOD_RES (323)..(323): Selenocysteine
  MOD_RES (344)..(344): Selenocysteine
  MOD_RES (372)..(372): Selenocysteine
  MOD_RES (374)..(376): Selenocysteine
  MOD_RES (398)..(398): Selenocysteine
  MOD_RES (407)..(407): Selenocysteine
  MOD_RES (409)..(409): Selenocysteine
  MOD_RES (417)..(417): Selenocysteine
  MOD_RES (422)..(422): Selenocysteine
  MOD_RES (440)..(440): Selenocysteine
  MOD_RES (443)..(443): Selenocysteine
  MOD_RES (469)..(469): Selenocysteine
  MOD_RES (504)..(504): Selenocysteine
  MOD_RES (506)..(506): Selenocysteine
MELMIQEKSFGNSLLLNSAMQPDLXVSRXYSGPICLQDPLDKELMXESSLFNPLSDIKVKVQSSFMVSLGVSERAEYHGKNHSRXFPHGNNHSFSXMHPRNKMPYIQNLSSLPXRXELRXXGVFGHLGGRLVMPNXGVSLLIPHGAIPEENSWEIYMSINQGEPSLQSDGSEVLLSPEVXCGPPDMIVXXPFALXIPHCADVSSEHWNIHLKKRXQQGKWEEVMSVEDESXSCYCLLDPFACHVLLDSFGXYALXGEPIXDCAVKQLKVAVFGCMSCNSLDYNLRVYCVDNXPCAFQEVVSDERHQGGQLLEEPKLLHFKGNXFSLQISVLDIPPFLWRIKPFXACQEVPFSRVWCSNRQPLHCAFSLERYXPXXXQLSCKICIRQLKGHEQILQVQXSILESEREXIXFFAQEDSXFPAQXGPKAFKIPYSIRQRICAXFDXPNAKGKDWQMLAQKNSINRNLSYFAXQSSPSAVILNLWEARHQHDGDLDSLACALEEIGRXHXKLSNISESQLDEADFNYSRQNGL

SEQ ID NO: 29232 - protein, 884 aa, Homo sapiens
  MOD_RES (7)..(7): Selenocysteine
  MOD_RES (30)..(30): Selenocysteine
  MOD_RES (36)..(36): Selenocysteine
  MOD_RES (52)..(52): Selenocysteine
  MOD_RES (102)..(102): Selenocysteine
  MOD_RES (119)..(119): Selenocysteine
  MOD_RES (144)..(144): Selenocysteine
  MOD_RES (210)..(210): Selenocysteine
  MOD_RES (230)..(230): Selenocysteine
  MOD_RES (246)..(246): Selenocysteine
  MOD_RES (277)..(277): Selenocysteine
  MOD_RES (299)..(299): Selenocysteine
  MOD_RES (345)..(345): Selenocysteine
  MOD_RES (365)..(365): Selenocysteine
  MOD_RES (380)..(380): Selenocysteine
  MOD_RES (384)..(384): Selenocysteine
  MOD_RES (401)..(401): Selenocysteine
  MOD_RES (440)..(440): Selenocysteine
  MOD_RES (451)..(451): Selenocysteine
  MOD_RES (469)..(469): Selenocysteine
  MOD_RES (471)..(471): Selenocysteine
  MOD_RES (475)..(476): Selenocysteine
  MOD_RES (491)..(491): Selenocysteine
  MOD_RES (535)..(535): Selenocysteine
  MOD_RES (544)..(545): Selenocysteine
  MOD_RES (550)..(550): Selenocysteine
  MOD_RES (570)..(570): Selenocysteine
  MOD_RES (586)..(586): Selenocysteine
  MOD_RES (606)..(606): Selenocysteine
  MOD_RES (610)..(610): Selenocysteine
  MOD_RES (615)..(615): Selenocysteine
  MOD_RES (647)..(647): Selenocysteine
  MOD_RES (678)..(678): Selenocysteine
  MOD_RES (699)..(699): Selenocysteine
  MOD_RES (727)..(727): Selenocysteine
  MOD_RES (729)..(731): Selenocysteine
  MOD_RES (753)..(753): Selenocysteine
  MOD_RES (762)..(762): Selenocysteine
  MOD_RES (764)..(764): Selenocysteine
  MOD_RES (772)..(772): Selenocysteine
  MOD_RES (777)..(777): Selenocysteine
  MOD_RES (795)..(795): Selenocysteine
  MOD_RES (798)..(798): Selenocysteine
  MOD_RES (824)..(824): Selenocysteine
  MOD_RES (859)..(859): Selenocysteine
  MOD_RES (861)..(861): Selenocysteine
MGRAAAXAGGGGGARRWLPWLGLCFWAAGXAAARGXDNGEALPESIPSAPGXLPHFIEEPDDAYIIKSNPIALRCKARPAMQIFFKCNGEWVHQNEHVSEEXLDESSGLKVREVFINVXRQQVEDFHGPEDYWCQCVAWSHLGXSKSRKASVRIAYLRKNFEQDPQGREVPIEGMIVLHCRPPEGVPAAEVEWLKNEEPIDSEQDENIDXRADHNLIIRQARLSDSGNYXCMAANIVAKRRSLSAXVVVYVDGSWEVWSEWSVCSPECEHLRIRECXAPPPRNGGKFCEGLSQESENCXDGLCILDKKPLHEIKPQSIENASDIALYSGLGAAVVAVAVLVIGVXLYRRSQSDYGVDVIDSSALXGNSLLLNSAMQPDLXVSRXYSGPICLQDPLDKELMXESSLFNPLSDIKVKVQSSFMVSLGVSERAEYHGKNHSRXFPHGNNHSFSXMHPRNKMPYIQNLSSLPXRXELRXXGVFGHLGGRLVMPNXGVSLLIPHGAIPEENSWEIYMSINQGEPSLQSDGSEVLLSPEVXCGPPDMIVXXPFALXIPHCADVSSEHWNIHLKKRXQQGKWEEVMSVEDESXSCYCLLDPFACHVLLDSFGXYALXGEPIXDCAVKQLKVAVFGCMSCNSLDYNLRVYCVDNXPCAFQEVVSDERHQGGQLLEEPKLLHFKGNXFSLQISVLDIPPFLWRIKPFXACQEVPFSRVWCSNRQPLHCAFSLERYXPXXXQLSCKICIRQLKGHEQILQVQXSILESEREXIXFFAQEDSXFPAQXGPKAFKIPYSIRQRICAXFDXPNAKGKDWQMLAQKNSINRNLSYFAXQSSPSAVILNLWEARHQHDGDLDSLACALEEIGRXHXKLSNISESQLDEADFNYSRQNGL

SEQ ID NO: 29233 - protein, 886 aa, Homo sapiens
  MOD_RES (7)..(7): Selenocysteine
  MOD_RES (30)..(30): Selenocysteine
  MOD_RES (36)..(36): Selenocysteine
  MOD_RES (52)..(52): Selenocysteine
  MOD_RES (102)..(102): Selenocysteine
  MOD_RES (119)..(119): Selenocysteine
  MOD_RES (144)..(144): Selenocysteine
  MOD_RES (210)..(210): Selenocysteine
  MOD_RES (230)..(230): Selenocysteine
  MOD_RES (246)..(246): Selenocysteine
  MOD_RES (277)..(277): Selenocysteine
  MOD_RES (299)..(299): Selenocysteine
  MOD_RES (334)..(334): Selenocysteine
  MOD_RES (354)..(354): Selenocysteine
  MOD_RES (359)..(359): Selenocysteine
  MOD_RES (364)..(364): Selenocysteine
  MOD_RES (382)..(382): Selenocysteine
  MOD_RES (386)..(386): Selenocysteine
  MOD_RES (403)..(403): Selenocysteine
  MOD_RES (442)..(442): Selenocysteine
  MOD_RES (453)..(453): Selenocysteine
  MOD_RES (471)..(471): Selenocysteine
  MOD_RES (473)..(473): Selenocysteine
  MOD_RES (477)..(478): Selenocysteine
  MOD_RES (493)..(493): Selenocysteine
  MOD_RES (537)..(537): Selenocysteine
  MOD_RES (546)..(547): Selenocysteine
  MOD_RES (552)..(552): Selenocysteine
  MOD_RES (572)..(572): Selenocysteine
  MOD_RES (588)..(588): Selenocysteine
  MOD_RES (608)..(608): Selenocysteine
  MOD_RES (612)..(612): Selenocysteine
  MOD_RES (617)..(617): Selenocysteine
  MOD_RES (649)..(649): Selenocysteine
  MOD_RES (680)..(680): Selenocysteine
  MOD_RES (701)..(701): Selenocysteine
  MOD_RES (729)..(729): Selenocysteine
  MOD_RES (731)..(733): Selenocysteine
  MOD_RES (755)..(755): Selenocysteine
  MOD_RES (764)..(764): Selenocysteine
  MOD_RES (766)..(766): Selenocysteine
  MOD_RES (774)..(774): Selenocysteine
  MOD_RES (779)..(779): Selenocysteine
  MOD_RES (797)..(797): Selenocysteine
  MOD_RES (800)..(800): Selenocysteine
  MOD_RES (826)..(826): Selenocysteine
  MOD_RES (861)..(861): Selenocysteine
  MOD_RES (863)..(863): Selenocysteine
MGRAAAXAGGGGGARRWLPWLGLCFWAAGXAAARGXDNGEALPESIPSAPGXLPHFIEEPDDAYIIKSNPIALRCKARPAMQIFFKCNGEWVHQNEHVSEEXLDESSGLKVREVFINVXRQQVEDFHGPEDYWCQCVAWSHLGXSKSRKASVRIAYLRKNFEQDPQGREVPIEGMIVLHCRPPEGVPAAEVEWLKNEEPIDSEQDENIDXRADHNLIIRQARLSDSGNYXCMAANIVAKRRSLSAXVVVYVDGSWEVWSEWSVCSPECEHLRIRECXAPPPRNGGKFCEGLSQESENCXDGLCILGIENASDIALYSGLGAAVVAVAVLVIGVXLYRRSQSDYGVDVIDSSALXGGFQXFNFKXVRQGNSLLLNSAMQPDLXVSRXYSGPICLQDPLDKELMXESSLFNPLSDIKVKVQSSFMVSLGVSERAEYHGKNHSRXFPHGNNHSFSXMHPRNKMPYIQNLSSLPXRXELRXXGVFGHLGGRLVMPNXGVSLLIPHGAIPEENSWEIYMSINQGEPSLQSDGSEVLLSPEVXCGPPDMIVXXPFALXIPHCADVSSEHWNIHLKKRXQQGKWEEVMSVEDESXSCYCLLDPFACHVLLDSFGXYALXGEPIXDCAVKQLKVAVFGCMSCNSLDYNLRVYCVDNXPCAFQEVVSDERHQGGQLLEEPKLLHFKGNXFSLQISVLDIPPFLWRIKPFXACQEVPFSRVWCSNRQPLHCAFSLERYXPXXXQLSCKICIRQLKGHEQILQVQXSILESEREXIXFFAQEDSXFPAQXGPKAFKIPYSIRQRICAXFDXPNAKGKDWQMLAQKNSINRNLSYFAXQSSPSAVILNLWEARHQHDGDLDSLACALEEIGRXHXKLSNISESQLDEADFNYSRQNGL

SEQ ID NO: 29234 - protein, 953 aa, Homo sapiens
  MOD_RES (7)..(7): Selenocysteine
  MOD_RES (30)..(30): Selenocysteine
  MOD_RES (36)..(36): Selenocysteine
  MOD_RES (52)..(52): Selenocysteine
  MOD_RES (102)..(102): Selenocysteine
  MOD_RES (119)..(119): Selenocysteine
  MOD_RES (144)..(144): Selenocysteine
  MOD_RES (210)..(210): Selenocysteine
  MOD_RES (230)..(230): Selenocysteine
  MOD_RES (246)..(246): Selenocysteine
  MOD_RES (259)..(259): Selenocysteine
  MOD_RES (278)..(278): Selenocysteine
  MOD_RES (280)..(280): Selenocysteine
  MOD_RES (300)..(300): Selenocysteine
  MOD_RES (302)..(302): Selenocysteine
  MOD_RES (333)..(333): Selenocysteine
  MOD_RES (355)..(355): Selenocysteine
  MOD_RES (401)..(401): Selenocysteine
  MOD_RES (421)..(421): Selenocysteine
  MOD_RES (426)..(426): Selenocysteine
  MOD_RES (431)..(431): Selenocysteine
  MOD_RES (449)..(449): Selenocysteine
  MOD_RES (453)..(453): Selenocysteine
  MOD_RES (470)..(470): Selenocysteine
  MOD_RES (509)..(509): Selenocysteine
  MOD_RES (520)..(520): Selenocysteine
  MOD_RES (538)..(538): Selenocysteine
  MOD_RES (540)..(540): Selenocysteine
  MOD_RES (544)..(545): Selenocysteine
  MOD_RES (560)..(560): Selenocysteine
  MOD_RES (604)..(604): Selenocysteine
  MOD_RES (613)..(614): Selenocysteine
  MOD_RES (619)..(619): Selenocysteine
  MOD_RES (639)..(639): Selenocysteine
  MOD_RES (655)..(655): Selenocysteine
  MOD_RES (675)..(675): Selenocysteine
  MOD_RES (679)..(679): Selenocysteine
  MOD_RES (684)..(684): Selenocysteine
  MOD_RES (716)..(716): Selenocysteine
  MOD_RES (747)..(747): Selenocysteine
  MOD_RES (768)..(768): Selenocysteine
  MOD_RES (796)..(796): Selenocysteine
  MOD_RES (798)..(800): Selenocysteine
  MOD_RES (822)..(822): Selenocysteine
  MOD_RES (831)..(831): Selenocysteine
  MOD_RES (833)..(833): Selenocysteine
  MOD_RES (841)..(841): Selenocysteine
  MOD_RES (846)..(846): Selenocysteine
  MOD_RES (864)..(864): Selenocysteine
  MOD_RES (867)..(867): Selenocysteine
  MOD_RES (893)..(893): Selenocysteine
  MOD_RES (928)..(928): Selenocysteine
  MOD_RES (930)..(930): Selenocysteine
MGRAAAXAGGGGGARRWLPWLGLCFWAAGXAAARGXDNGEALPESIPSAPGXLPHFIEEPDDAYIIKSNPIALRCKARPAMQIFFKCNGEWVHQNEHVSEEXLDESSGLKVREVFINVXRQQVEDFHGPEDYWCQCVAWSHLGXSKSRKASVRIAYLRKNFEQDPQGREVPIEGMIVLHCRPPEGVPAAEVEWLKNEEPIDSEQDENIDXRADHNLIIRQARLSDSGNYXCMAANIVAKRRSLSAXVVVYVNGGWSSWXEWSACNVRCGRGWQKRSRXCXNPAPLNGGAFCEGMSVQKIXCXSLCPVDGSWEVWSEWSVCSPECEHLRIRECXAPPPRNGGKFCEGLSQESENCXDGLCILDKKPLHEIKPQSIENASDIALYSGLGAAVVAVAVLVIGVXLYRRSQSDYGVDVIDSSALXGGFQXFNFKXVRQGNSLLLNSAMQPDLXVSRXYSGPICLQDPLDKELMXESSLFNPLSDIKVKVQSSFMVSLGVSERAEYHGKNHSRXFPHGNNHSFSXMHPRNKMPYIQNLSSLPXRXELRXXGVFGHLGGRLVMPNXGVSLLIPHGAIPEENSWEIYMSINQGEPSLQSDGSEVLLSPEVXCGPPDMIVXXPFALXIPHCADVSSEHWNIHLKKRXQQGKWEEVMSVEDESXSCYCLLDPFACHVLLDSFGXYALXGEPIXDCAVKQLKVAVFGCMSCNSLDYNLRVYCVDNXPCAFQEVVSDERHQGGQLLEEPKLLHFKGNXFSLQISVLDIPPFLWRIKPFXACQEVPFSRVWCSNRQPLHCAFSLERYXPXXXQLSCKICIRQLKGHEQILQVQXSILESEREXIXFFAQEDSXFPAQXGPKAFKIPYSIRQRICAXFDXPNAKGKDWQMLAQKNSINRNLSYFAXQSSPSAVILNLWEARHQHDGDLDSLACALEEIGRXHXKLSNISESQLDEADFNYSRQNGL

SEQ ID NO: 29235 - protein, 958 aa, Homo sapiens
  MOD_RES (7)..(7): Selenocysteine
  MOD_RES (30)..(30): Selenocysteine
  MOD_RES (36)..(36): Selenocysteine
  MOD_RES (52)..(52): Selenocysteine
  MOD_RES (102)..(102): Selenocysteine
  MOD_RES (119)..(119): Selenocysteine
  MOD_RES (144)..(144): Selenocysteine
  MOD_RES (210)..(210): Selenocysteine
  MOD_RES (230)..(230): Selenocysteine
  MOD_RES (246)..(246): Selenocysteine
  MOD_RES (259)..(259): Selenocysteine
  MOD_RES (278)..(278): Selenocysteine
  MOD_RES (280)..(280): Selenocysteine
  MOD_RES (300)..(300): Selenocysteine
  MOD_RES (302)..(302): Selenocysteine
  MOD_RES (333)..(333): Selenocysteine
  MOD_RES (355)..(355): Selenocysteine
  MOD_RES (406)..(406): Selenocysteine
  MOD_RES (426)..(426): Selenocysteine
  MOD_RES (431)..(431): Selenocysteine
  MOD_RES (436)..(436): Selenocysteine
  MOD_RES (454)..(454): Selenocysteine
  MOD_RES (458)..(458): Selenocysteine
  MOD_RES (475)..(475): Selenocysteine
  MOD_RES (514)..(514): Selenocysteine
  MOD_RES (525)..(525): Selenocysteine
  MOD_RES (543)..(543): Selenocysteine
  MOD_RES (545)..(545): Selenocysteine
  MOD_RES (549)..(550): Selenocysteine
  MOD_RES (565)..(565): Selenocysteine
  MOD_RES (609)..(609): Selenocysteine
  MOD_RES (618)..(619): Selenocysteine
  MOD_RES (624)..(624): Selenocysteine
  MOD_RES (644)..(644): Selenocysteine
  MOD_RES (660)..(660): Selenocysteine
  MOD_RES (680)..(680): Selenocysteine
  MOD_RES (684)..(684): Selenocysteine
  MOD_RES (689)..(689): Selenocysteine
  MOD_RES (721)..(721): Selenocysteine
  MOD_RES (752)..(752): Selenocysteine
  MOD_RES (773)..(773): Selenocysteine
  MOD_RES (801)..(801): Selenocysteine
  MOD_RES (803)..(805): Selenocysteine
  MOD_RES (827)..(827): Selenocysteine
  MOD_RES (836)..(836): Selenocysteine
  MOD_RES (838)..(838): Selenocysteine
  MOD_RES (846)..(846): Selenocysteine
  MOD_RES (851)..(851): Selenocysteine
  MOD_RES (869)..(869): Selenocysteine
  MOD_RES (872)..(872): Selenocysteine
  MOD_RES (898)..(898): Selenocysteine
  MOD_RES (933)..(933): Selenocysteine
  MOD_RES (935)..(935): Selenocysteine
MGRAAAXAGGGGGARRWLPWLGLCFWAAGXAAARGXDNGEALPESIPSAPGXLPHFIEEPDDAYIIKSNPIALRCKARPAMQIFFKCNGEWVHQNEHVSEEXLDESSGLKVREVFINVXRQQVEDFHGPEDYWCQCVAWSHLGXSKSRKASVRIAYLRKNFEQDPQGREVPIEGMIVLHCRPPEGVPAAEVEWLKNEEPIDSEQDENIDXRADHNLIIRQARLSDSGNYXCMAANIVAKRRSLSAXVVVYVNGGWSSWXEWSACNVRCGRGWQKRSRXCXNPAPLNGGAFCEGMSVQKIXCXSLCPVDGSWEVWSEWSVCSPECEHLRIRECXAPPPRNGGKFCEGLSQESENCXDGLCILDKKPLHEIKPQRWSRRGIENASDIALYSGLGAAVVAVAVLVIGVXLYRRSQSDYGVDVIDSSALXGGFQXFNFKXVRQGNSLLLNSAMQPDLXVSRXYSGPICLQDPLDKELMXESSLFNPLSDIKVKVQSSFMVSLGVSERAEYHGKNHSRXFPHGNNHSFSXMHPRNKMPYIQNLSSLPXRXELRXXGVFGHLGGRLVMPNXGVSLLIPHGAIPEENSWEIYMSINQGEPSLQSDGSEVLLSPEVXCGPPDMIVXXPFALXIPHCADVSSEHWNIHLKKRXQQGKWEEVMSVEDESXSCYCLLDPFACHVLLDSFGXYALXGEPIXDCAVKQLKVAVFGCMSCNSLDYNLRVYCVDNXPCAFQEVVSDERHQGGQLLEEPKLLHFKGNXFSLQISVLDIPPFLWRIKPFXACQEVPFSRVWCSNRQPLHCAFSLERYXPXXXQLSCKICIRQLKGHEQILQVQXSILESEREXIXFFAQEDSXFPAQXGPKAFKIPYSIRQRICAXFDXPNAKGKDWQMLAQKNSINRNLSYFAXQSSPSAVILNLWEARHQHDGDLDSLACALEEIGRXHXKLSNISESQLDEADFNYSRQNGL

SEQ ID NO: 29236 - protein, 948 aa, Homo sapiens
  MOD_RES (16)..(16): Selenocysteine
  MOD_RES (27)..(27): Selenocysteine
  MOD_RES (31)..(31): Selenocysteine
  MOD_RES (47)..(47): Selenocysteine
  MOD_RES (97)..(97): Selenocysteine
  MOD_RES (114)..(114): Selenocysteine
  MOD_RES (139)..(139): Selenocysteine
  MOD_RES (205)..(205): Selenocysteine
  MOD_RES (225)..(225): Selenocysteine
  MOD_RES (241)..(241): Selenocysteine
  MOD_RES (254)..(254): Selenocysteine
  MOD_RES (273)..(273): Selenocysteine
  MOD_RES (275)..(275): Selenocysteine
  MOD_RES (295)..(295): Selenocysteine
  MOD_RES (297)..(297): Selenocysteine
  MOD_RES (328)..(328): Selenocysteine
  MOD_RES (350)..(350): Selenocysteine
  MOD_RES (396)..(396): Selenocysteine
  MOD_RES (416)..(416): Selenocysteine
  MOD_RES (421)..(421): Selenocysteine
  MOD_RES (426)..(426): Selenocysteine
  MOD_RES (444)..(444): Selenocysteine
  MOD_RES (448)..(448): Selenocysteine
  MOD_RES (465)..(465): Selenocysteine
  MOD_RES (504)..(504): Selenocysteine
  MOD_RES (515)..(515): Selenocysteine
  MOD_RES (533)..(533): Selenocysteine
  MOD_RES (535)..(535): Selenocysteine
  MOD_RES (539)..(540): Selenocysteine
  MOD_RES (555)..(555): Selenocysteine
  MOD_RES (599)..(599): Selenocysteine
  MOD_RES (608)..(609): Selenocysteine
  MOD_RES (614)..(614): Selenocysteine
  MOD_RES (634)..(634): Selenocysteine
  MOD_RES (650)..(650): Selenocysteine
  MOD_RES (670)..(670): Selenocysteine
  MOD_RES (674)..(674): Selenocysteine
  MOD_RES (679)..(679): Selenocysteine
  MOD_RES (711)..(711): Selenocysteine
  MOD_RES (742)..(742): Selenocysteine
  MOD_RES (763)..(763): Selenocysteine
  MOD_RES (791)..(791): Selenocysteine
  MOD_RES (793)..(795): Selenocysteine
  MOD_RES (817)..(817): Selenocysteine
  MOD_RES (826)..(826): Selenocysteine
  MOD_RES (828)..(828): Selenocysteine
  MOD_RES (836)..(836): Selenocysteine
  MOD_RES (841)..(841): Selenocysteine
  MOD_RES (859)..(859): Selenocysteine
  MOD_RES (862)..(862): Selenocysteine
  MOD_RES (888)..(888): Selenocysteine
  MOD_RES (923)..(923): Selenocysteine
  MOD_RES (925)..(925): Selenocysteine
MILVLVKALSDVCAGXSGFLLDFSSQXSPGXDNGEALPESIPSAPGXLPHFIEEPDDAYIIKSNPIALRCKARPAMQIFFKCNGEWVHQNEHVSEEXLDESSGLKVREVFINVXRQQVEDFHGPEDYWCQCVAWSHLGXSKSRKASVRIAYLRKNFEQDPQGREVPIEGMIVLHCRPPEGVPAAEVEWLKNEEPIDSEQDENIDXRADHNLIIRQARLSDSGNYXCMAANIVAKRRSLSAXVVVYVNGGWSSWXEWSACNVRCGRGWQKRSRXCXNPAPLNGGAFCEGMSVQKIXCXSLCPVDGSWEVWSEWSVCSPECEHLRIRECXAPPPRNGGKFCEGLSQESENCXDGLCILDKKPLHEIKPQSIENASDIALYSGLGAAVVAVAVLVIGVXLYRRSQSDYGVDVIDSSALXGGFQXFNFKXVRQGNSLLLNSAMQPDLXVSRXYSGPICLQDPLDKELMXESSLFNPLSDIKVKVQSSFMVSLGVSERAEYHGKNHSRXFPHGNNHSFSXMHPRNKMPYIQNLSSLPXRXELRXXGVFGHLGGRLVMPNXGVSLLIPHGAIPEENSWEIYMSINQGEPSLQSDGSEVLLSPEVXCGPPDMIVXXPFALXIPHCADVSSEHWNIHLKKRXQQGKWEEVMSVEDESXSCYCLLDPFACHVLLDSFGXYALXGEPIXDCAVKQLKVAVFGCMSCNSLDYNLRVYCVDNXPCAFQEVVSDERHQGGQLLEEPKLLHFKGNXFSLQISVLDIPPFLWRIKPFXACQEVPFSRVWCSNRQPLHCAFSLERYXPXXXQLSCKICIRQLKGHEQILQVQXSILESEREXIXFFAQEDSXFPAQXGPKAFKIPYSIRQRICAXFDXPNAKGKDWQMLAQKNSINRNLSYFAXQSSPSAVILNLWEARHQHDGDLDSLACALEEIGRXHXKLSNISESQLDEADFNYSRQNGL

SEQ ID NO: 29237 - protein, 597 aa, Homo sapiens
  MOD_RES (74)..(74): Selenocysteine
  MOD_RES (93)..(93): Selenocysteine
  MOD_RES (118)..(118): Selenocysteine
  MOD_RES (126)..(126): Selenocysteine
  MOD_RES (135)..(135): Selenocysteine
  MOD_RES (152)..(152): Selenocysteine
  MOD_RES (160)..(160): Selenocysteine
  MOD_RES (184)..(184): Selenocysteine
  MOD_RES (253)..(253): Selenocysteine
  MOD_RES (262)..(262): Selenocysteine
  MOD_RES (274)..(274): Selenocysteine
  MOD_RES (278)..(278): Selenocysteine
  MOD_RES (314)..(314): Selenocysteine
  MOD_RES (359)..(359): Selenocysteine
  MOD_RES (416)..(416): Selenocysteine
  MOD_RES (451)..(451): Selenocysteine
  MOD_RES (455)..(455): Selenocysteine
  MOD_RES (472)..(472): Selenocysteine
  MOD_RES (484)..(484): Selenocysteine
  MOD_RES (503)..(503): Selenocysteine
MEAEPPLYPMAGAAGPQGDEDLLGVPDGPEAPLDELVGAYPNYNEEEEERRYYRRKRLGVLKNVLAASAGGMLXYGVYLGLLQMQLILHYDEXYREVKYGNMGLPDIDSKMLMGINVXPIAALLYXPVLIRFFGXKWMMFLAVGIYALFVSXNYWERYYXLVPSAVALGMAIVPLWASMGNYIXRMAQKYHEYSHYKEQDGQGMKQRPPRGSHAPYLLVFQAIFYSFFHLSFACAQLPMIYFLNHYLYDLNHXLYNVQSCGXNSHGILSGFNKXVLRXLPRSGNLIVVESVLMAVAFLAMLLVLGLCGAAYRPXEEIDLRSVGWGNIFQLPFKHVRDYRLRHLVPFFIYSGFEVLFACXGIALGYGVCSVGLERLAYLLVAYSLGASAASLLGLLGLWLPRPVPLVAGAGVHLLLXFILFFWAPVPRVLQHSWILYVAAALWGVGSALNKXGLSXLLGILYEDKERQDFIFXIYHWWQAVAIFXVYLGSSLHMKAKLAVLLVXLVAAAVSYLRMEQKLRRGVAPRQPRIPRPQHKVRGYRYLEEDNSDESDAEGEHGDGAEEEAPPAGPRPGPEPAGLGRRPCPYEQAQGGDGPEEQ

SEQ ID NO: 29238 - protein, 214 aa, Homo sapiens
  MOD_RES (74)..(74): Selenocysteine
  MOD_RES (93)..(93): Selenocysteine
  MOD_RES (118)..(118): Selenocysteine
  MOD_RES (126)..(126): Selenocysteine
  MOD_RES (135)..(135): Selenocysteine
  MOD_RES (152)..(152): Selenocysteine
  MOD_RES (160)..(160): Selenocysteine
  MOD_RES (184)..(184): Selenocysteine
  MOD_RES (190)..(190): Selenocysteine
  MOD_RES (195)..(195): Selenocysteine
MEAEPPLYPMAGAAGPQGDEDLLGVPDGPEAPLDELVGAYPNYNEEEEERRYYRRKRLGVLKNVLAASAGGMLXYGVYLGLLQMQLILHYDEXYREVKYGNMGLPDIDSKMLMGINVXPIAALLYXPVLIRFFGXKWMMFLAVGIYALFVSXNYWERYYXLVPSAVALGMAIVPLWASMGNYIXSSGCRXHRSGXGRAGESLLSFVVQDGAEVP

SEQ ID NO: 29239 - protein, 180 aa, Homo sapiens
  MOD_RES (3)..(3): Selenocysteine
  MOD_RES (22)..(22): Selenocysteine
  MOD_RES (47)..(47): Selenocysteine
  MOD_RES (55)..(55): Selenocysteine
  MOD_RES (64)..(64): Selenocysteine
  MOD_RES (81)..(81): Selenocysteine
  MOD_RES (89)..(89): Selenocysteine
  MOD_RES (113)..(113): Selenocysteine
MLXYGVYLGLLQMQLILHYDEXYREVKYGNMGLPDIDSKMLMGINVXPIAALLYXPVLIRFFGXKWMMFLAVGIYALFVSXNYWERYYXLVPSAVALGMAIVPLWASMGNYIXRMAQKYHEYSHYKEQDGQGMKQRPPRGSHAPYLLVFQAIFYSFFHLSFACAQLPMIYFLNHYLYDLN

SEQ ID NO: 29240 - protein, 531 aa, Homo sapiens
  MOD_RES (72)..(72): Selenocysteine
  MOD_RES (108)..(108): Selenocysteine
  MOD_RES (110)..(110): Selenocysteine
  MOD_RES (113)..(113): Selenocysteine
  MOD_RES (166)..(166): Selenocysteine
  MOD_RES (180)..(181): Selenocysteine
  MOD_RES (267)..(267): Selenocysteine
  MOD_RES (280)..(280): Selenocysteine
  MOD_RES (371)..(371): Selenocysteine
  MOD_RES (384)..(384): Selenocysteine
  MOD_RES (469)..(469): Selenocysteine
  MOD_RES (481)..(481): Selenocysteine
  MOD_RES (508)..(508): Selenocysteine
MMDGRLLEHPHAQFGGSLGGVVGFPYPLGHHHVYELAGHQLQSAAAAASVPFSIDGLLGGSCAAAASVVNPXPLLPAACGVGGDGQPFKLSDSGDPDKESPGCKRRRXRXNFXGWQLEELEKAFNESHYPDVFMREALALRLDLVESRVQVWFQNRRAKWRKKENXKKGPGRPAHNSHPXXCSGEPMDPEEIARKELEKMEKKKRKHEKKLLKSQGRHLHSPGGLSLHSAPSSDSDSGGGGLSPEPPEPPPPAAKGPGAHASGAAGXAPAPPGEPPAPGXCDPAFYPSQRSGAGPQPRPGRPADKDAASCGPGAAVAAVERGAAGLPKASPFSVESLLSDSPPRRKAASNAAAAAAAGLDFAPGLPCAPRXLIGKGHFLLYPIXQPLGFLVPQAALKGGAGLEPAPKDAPPAPAVPPAPPAQASFGAFSGPGGAPDSAFARRSPDAVASPGAPAPAPAPFRDLASAAAXEGGGGDCADAGXAGPAPPPPAPSPRPGPRPPSPAEEPAXCGVPEPGAAAGPSPPEGEELDMD

SEQ ID NO: 29241 - protein, 273 aa, Homo sapiens
  MOD_RES (38)..(38): Selenocysteine
  MOD_RES (42)..(42): Selenocysteine
  MOD_RES (95)..(95): Selenocysteine
  MOD_RES (113)..(113): Selenocysteine
  MOD_RES (116)..(116): Selenocysteine
  MOD_RES (129)..(129): Selenocysteine
  MOD_RES (134)..(134): Selenocysteine
  MOD_RES (140)..(140): Selenocysteine
  MOD_RES (147)..(147): Selenocysteine
  MOD_RES (162)..(162): Selenocysteine
  MOD_RES (172)..(172): Selenocysteine
  MOD_RES (179)..(179): Selenocysteine
  MOD_RES (194)..(194): Selenocysteine
  MOD_RES (215)..(215): Selenocysteine
  MOD_RES (254)..(254): Selenocysteine
  MOD_RES (257)..(257): Selenocysteine
  MOD_RES (260)..(260): Selenocysteine
  MOD_RES (262)..(262): Selenocysteine
MASAAAAEAEKGSPVVVGLLVVGNIIILLSGLSLFAEXIWVXADQYRVYPLMGVSGKDDVFAGAWIAIFCGFSFFMVASFGVGAALCRRRSMVLXYLVLMLIVYIFECASCIXSYXHRDYMVSNPSLIXKQMLXFYSADXDQGQELXRLWDRVMIEQECCGXSGPMDWVNFXSAFRAAXPEVVFPWPPLCCRRXGNFIPLNEEGCRLGHMDYLFXKAGVQWHNLSSLQRLPPGFKGFSHLSFQSSWDYRAASNXSAXPSXAXRGVSRGLGLPS

SEQ ID NO: 29242 - protein, 258 aa, Homo sapiens
  MOD_RES (38)..(38): Selenocysteine
  MOD_RES (42)..(42): Selenocysteine
  MOD_RES (95)..(95): Selenocysteine
  MOD_RES (113)..(113): Selenocysteine
  MOD_RES (116)..(116): Selenocysteine
  MOD_RES (129)..(129): Selenocysteine
  MOD_RES (134)..(134): Selenocysteine
  MOD_RES (140)..(140): Selenocysteine
  MOD_RES (147)..(147): Selenocysteine
  MOD_RES (162)..(162): Selenocysteine
  MOD_RES (172)..(172): Selenocysteine
  MOD_RES (179)..(179): Selenocysteine
  MOD_RES (194)..(194): Selenocysteine
  MOD_RES (215)..(215): Selenocysteine
  MOD_RES (230)..(230): Selenocysteine
  MOD_RES (244)..(244): Selenocysteine
  MOD_RES (256)..(256): Selenocysteine
MASAAAAEAEKGSPVVVGLLVVGNIIILLSGLSLFAEXIWVXADQYRVYPLMGVSGKDDVFAGAWIAIFCGFSFFMVASFGVGAALCRRRSMVLXYLVLMLIVYIFECASCIXSYXHRDYMVSNPSLIXKQMLXFYSADXDQGQELXRLWDRVMIEQECCGXSGPMDWVNFXSAFRAAXPEVVFPWPPLCCRRXGNFIPLNEEGCRLGHMDYLFXKGCFEHIGHAIDSYXWGISWFGFAILMWXLPVMLIAMYFYXML

SEQ ID NO: 29243 - protein, 169 aa, Homo sapiens
  MOD_RES (7)..(7): Selenocysteine
  MOD_RES (30)..(30): Selenocysteine
  MOD_RES (50)..(50): Selenocysteine
  MOD_RES (108)..(108): Selenocysteine
  MOD_RES (111)..(111): Selenocysteine
  MOD_RES (117)..(117): Selenocysteine
  MOD_RES (147)..(147): Selenocysteine
  MOD_RES (149)..(149): Selenocysteine
MAKDNSXVRCFQGLLIFGNVIIGCCGIALXAECIFFVSDQHSLYPLLEAXDNDDIYGAAWIGIFVGICLFCLSVLGIVGIMKSSRKILLAYFILMFIVYAFEVASCIXAAXQQDFFXPNLFLKQMLERYQNNSPPNNDDQWKNNGVXKXWDRLMLQDNCCGVNGPSDWQ

SEQ ID NO: 29244 - protein, 189 aa, Homo sapiens
  MOD_RES (7)..(7): Selenocysteine
  MOD_RES (30)..(30): Selenocysteine
  MOD_RES (50)..(50): Selenocysteine
  MOD_RES (108)..(108): Selenocysteine
  MOD_RES (111)..(111): Selenocysteine
  MOD_RES (117)..(117): Selenocysteine
  MOD_RES (147)..(147): Selenocysteine
  MOD_RES (149)..(149): Selenocysteine
  MOD_RES (172)..(172): Selenocysteine
  MOD_RES (177)..(177): Selenocysteine
MAKDNSXVRCFQGLLIFGNVIIGCCGIALXAECIFFVSDQHSLYPLLEAXDNDDIYGAAWIGIFVGICLFCLSVLGIVGIMKSSRKILLAYFILMFIVYAFEVASCIXAAXQQDFFXPNLFLKQMLERYQNNSPPNNDDQWKNNGVXKXWDRLMLQDNCCGVNGPSDWQKYXSAFRXENNDADYPWPRQ

SEQ ID NO: 29245 - protein, 260 aa, Homo sapiens
  MOD_RES (7)..(7): Selenocysteine
  MOD_RES (30)..(30): Selenocysteine
  MOD_RES (50)..(50): Selenocysteine
  MOD_RES (108)..(108): Selenocysteine
  MOD_RES (111)..(111): Selenocysteine
  MOD_RES (117)..(117): Selenocysteine
  MOD_RES (147)..(147): Selenocysteine
  MOD_RES (149)..(149): Selenocysteine
  MOD_RES (172)..(172): Selenocysteine
  MOD_RES (177)..(177): Selenocysteine
  MOD_RES (244)..(244): Selenocysteine
  MOD_RES (251)..(251): Selenocysteine
MAKDNSXVRCFQGLLIFGNVIIGCCGIALXAECIFFVSDQHSLYPLLEAXDNDDIYGAAWIGIFVGICLFCLSVLGIVGIMKSSRKILLAYFILMFIVYAFEVASCIXAAXQQDFFXPNLFLKQMLERYQNNSPPNNDDQWKNNGVXKXWDRLMLQDNCCGVNGPSDWQKYXSAFRXENNDADYPWPRQCCVMNNLKEPLNLEACKLGVPGFYHNQGCYELISGPMNRHAWGVAWFGFAILCWXFWVLLGXMFYWSRIEY

SEQ ID NO: 29246 - protein, 252 aa, Homo sapiens
  MOD_RES (7)..(7): Selenocysteine
  MOD_RES (30)..(30): Selenocysteine
  MOD_RES (50)..(50): Selenocysteine
  MOD_RES (108)..(108): Selenocysteine
  MOD_RES (111)..(111): Selenocysteine
  MOD_RES (139)..(139): Selenocysteine
  MOD_RES (141)..(141): Selenocysteine
  MOD_RES (164)..(164): Selenocysteine
  MOD_RES (169)..(169): Selenocysteine
  MOD_RES (236)..(236): Selenocysteine
  MOD_RES (243)..(243): Selenocysteine
MAKDNSXVRCFQGLLIFGNVIIGCCGIALXAECIFFVSDQHSLYPLLEAXDNDDIYGAAWIGIFVGICLFCLSVLGIVGIMKSSRKILLAYFILMFIVYAFEVASCIXAAXQQDFQMLERYQNNSPPNNDDQWKNNGVXKXWDRLMLQDNCCGVNGPSDWQKYXSAFRXENNDADYPWPRQCCVMNNLKEPLNLEACKLGVPGFYHNQGCYELISGPMNRHAWGVAWFGFAILCWXFWVLLGXMFYWSRIEY

SEQ ID NO: 29247 - protein, 180 aa, Homo sapiens
  MOD_RES (28)..(28): Selenocysteine
  MOD_RES (31)..(31): Selenocysteine
  MOD_RES (37)..(37): Selenocysteine
  MOD_RES (67)..(67): Selenocysteine
  MOD_RES (69)..(69): Selenocysteine
  MOD_RES (92)..(92): Selenocysteine
  MOD_RES (97)..(97): Selenocysteine
  MOD_RES (164)..(164): Selenocysteine
  MOD_RES (171)..(171): Selenocysteine
MKSSRKILLAYFILMFIVYAFEVASCIXAAXQQDFFXPNLFLKQMLERYQNNSPPNNDDQWKNNGVXKXWDRLMLQDNCCGVNGPSDWQKYXSAFRXENNDADYPWPRQCCVMNNLKEPLNLEACKLGVPGFYHNQGCYELISGPMNRHAWGVAWFGFAILCWXFWVLLGXMFYWSRIEY

SEQ ID NO: 29248 - protein, 43 aa, Homo sapiens
  MOD_RES (5)..(5): Selenocysteine
  MOD_RES (8)..(8): Selenocysteine
MEAPXVEXPPDPSPPSAPAPALVPLRAPDVARLREEQEKEEGR

SEQ ID NO: 29249 - protein, 50 aa, Homo sapiens
  MOD_RES (5)..(5): Selenocysteine
  MOD_RES (8)..(8): Selenocysteine
  MOD_RES (42)..(42): Selenocysteine
MEAPXVEXPPDPSPPSAPAPALVPLRAPDVARLREEQEKVVXNCQERIQH

SEQ ID NO: 29250 - protein, 535 aa, Homo sapiens
  MOD_RES (5)..(5): Selenocysteine
  MOD_RES (8)..(8): Selenocysteine
  MOD_RES (42)..(42): Selenocysteine
  MOD_RES (67)..(67): Selenocysteine
  MOD_RES (93)..(93): Selenocysteine
  MOD_RES (97)..(97): Selenocysteine
  MOD_RES (127)..(127): Selenocysteine
  MOD_RES (145)..(145): Selenocysteine
  MOD_RES (187)..(187): Selenocysteine
  MOD_RES (233)..(233): Selenocysteine
  MOD_RES (241)..(242): Selenocysteine
  MOD_RES (253)..(253): Selenocysteine
  MOD_RES (262)..(262): Selenocysteine
  MOD_RES (266)..(266): Selenocysteine
  MOD_RES (334)..(334): Selenocysteine
  MOD_RES (340)..(340): Selenocysteine
  MOD_RES (350)..(350): Selenocysteine
  MOD_RES (354)..(355): Selenocysteine
  MOD_RES (373)..(373): Selenocysteine
  MOD_RES (384)..(384): Selenocysteine
  MOD_RES (387)..(387): Selenocysteine
  MOD_RES (423)..(423): Selenocysteine
  MOD_RES (447)..(447): Selenocysteine
  MOD_RES (451)..(451): Selenocysteine
  MOD_RES (473)..(473): Selenocysteine
  MOD_RES (480)..(480): Selenocysteine
  MOD_RES (492)..(492): Selenocysteine
  MOD_RES (504)..(504): Selenocysteine
  MOD_RES (519)..(519): Selenocysteine
MEAPXVEXPPDPSPPSAPAPALVPLRAPDVARLREEQEKVVXNCQERIQHWKKVDNDYNALRERLSXLPDKLSYNIMVPFGPFAFMPGKLVHXNEVXVLLGDNWFAKCSAKQAVGLVEHRKEHVRKXIDDLKKVMKNFESRVEFXEDLQKMSDAAGDIVDIREEIKCDFEFKAKHRIAHKPHSKPKXSDIFEADIANDVKSKDLLADKELWARLEELERQEELLGELDSKPDXVIANGEDXXSSEEEKEDRNXNVNAMHQVXDSHXPCHKDVASSEPFSGQVNSQLNCSVNGSSSYHSDDDDDDDDDDDDDNIDDDDGDNDHEALGVGDNSIPXIYFSHXVEPKRVRINXGKNXXLKFSEKKEEAKRKRKNSXGSGHSAQELPXIRXPADIYRAFVDVVNGEYVPRKSILKSRSRENSVCSDXSESSAAEFDDRRGVLRSISCEEAXCSDXSESILEEEPQENQKKLLPLSVXPEAFSGXVIEKEFVSPSLXPPPAIAHPALPXIPERKEVLLEASEEXGKRVSKFKAARLQQKD

SEQ ID NO: 29251 - protein, 475 aa, Homo sapiens
  MOD_RES (2)..(3): Selenocysteine
  MOD_RES (24)..(24): Selenocysteine
  MOD_RES (49)..(49): Selenocysteine
  MOD_RES (75)..(75): Selenocysteine
  MOD_RES (79)..(79): Selenocysteine
  MOD_RES (109)..(109): Selenocysteine
  MOD_RES (127)..(127): Selenocysteine
  MOD_RES (169)..(169): Selenocysteine
  MOD_RES (215)..(215): Selenocysteine
  MOD_RES (223)..(224): Selenocysteine
  MOD_RES (235)..(235): Selenocysteine
  MOD_RES (244)..(244): Selenocysteine
  MOD_RES (248)..(248): Selenocysteine
  MOD_RES (316)..(316): Selenocysteine
  MOD_RES (322)..(322): Selenocysteine
  MOD_RES (332)..(332): Selenocysteine
  MOD_RES (336)..(337): Selenocysteine
  MOD_RES (355)..(355): Selenocysteine
  MOD_RES (366)..(366): Selenocysteine
  MOD_RES (369)..(369): Selenocysteine
  MOD_RES (405)..(405): Selenocysteine
  MOD_RES (429)..(429): Selenocysteine
  MOD_RES (433)..(433): Selenocysteine
  MOD_RES (455)..(455): Selenocysteine
MXXWSSLQGSHVSKRALAYALVVXNCQERIQHWKKVDNDYNALRERLSXLPDKLSYNIMVPFGPFAFMPGKLVHXNEVXVLLGDNWFAKCSAKQAVGLVEHRKEHVRKXIDDLKKVMKNFESRVEFXEDLQKMSDAAGDIVDIREEIKCDFEFKAKHRIAHKPHSKPKXSDIFEADIANDVKSKDLLADKELWARLEELERQEELLGELDSKPDXVIANGEDXXSSEEEKEDRNXNVNAMHQVXDSHXPCHKDVASSEPFSGQVNSQLNCSVNGSSSYHSDDDDDDDDDDDDDNIDDDDGDNDHEALGVGDNSIPXIYFSHXVEPKRVRINXGKNXXLKFSEKKEEAKRKRKNSXGSGHSAQELPXIRXPADIYRAFVDVVNGEYVPRKSILKSRSRENSVCSDXSESSAAEFDDRRGVLRSISCEEAXCSDXSESILEEEPQENQKKLLPLSVXPEVLRLVGYSRNLAPLNVIL

SEQ ID NO: 29252 - protein, 33 aa, Homo sapiens
  MOD_RES (17)..(17): Selenocysteine
  MOD_RES (21)..(21): Selenocysteine
MVPFGPFAFMPGKLVHXNEVXVLLGDNWFAKCS

SEQ ID NO: 29253 - protein, 71 aa, Homo sapiens
  MOD_RES (17)..(17): Selenocysteine
  MOD_RES (21)..(21): Selenocysteine
  MOD_RES (51)..(51): Selenocysteine
  MOD_RES (69)..(69): Selenocysteine
MVPFGPFAFMPGKLVHXNEVXVLLGDNWFAKCSAKQAVGLVEHRKEHVRKXIDDLKKVMKNFESRVEFXED

SEQ ID NO: 29254 - protein, 122 aa, Homo sapiens
  MOD_RES (17)..(17): Selenocysteine
  MOD_RES (21)..(21): Selenocysteine
  MOD_RES (51)..(51): Selenocysteine
  MOD_RES (69)..(69): Selenocysteine
  MOD_RES (111)..(111): Selenocysteine
MVPFGPFAFMPGKLVHXNEVXVLLGDNWFAKCSAKQAVGLVEHRKEHVRKXIDDLKKVMKNFESRVEFXEDLQKMSDAAGDIVDIREEIKCDFEFKAKHRIAHKPHSKPKXSDIFEADIAND

SEQ ID NO: 29255 - protein, 17 aa, Homo sapiens
RALAYALGLCEVLMNEG

SEQ ID NO: 29256 - protein, 40 aa, Homo sapiens
  MOD_RES (1)..(1): Any amino acid
  MOD_RES (9)..(9): Selenocysteine
  MOD_RES (13)..(13): Selenocysteine
  MOD_RES (35)..(35): Selenocysteine
XSISCEEAXCSDXSESILEEEPQENQKKLLPLSVXPELNI

SEQ ID NO: 29257 - protein, 228 aa, Homo sapiens
  MOD_RES (1)..(1): Any amino acid
  MOD_RES (9)..(9): Selenocysteine
  MOD_RES (13)..(13): Selenocysteine
  MOD_RES (81)..(81): Selenocysteine
  MOD_RES (87)..(87): Selenocysteine
  MOD_RES (97)..(97): Selenocysteine
  MOD_RES (101)..(102): Selenocysteine
  MOD_RES (120)..(120): Selenocysteine
  MOD_RES (131)..(131): Selenocysteine
  MOD_RES (134)..(134): Selenocysteine
  MOD_RES (170)..(170): Selenocysteine
  MOD_RES (194)..(194): Selenocysteine
  MOD_RES (198)..(198): Selenocysteine
  MOD_RES (220)..(220): Selenocysteine
XVNAMHQVXDSHXPCHKDVASSEPFSGQVNSQLNCSVNGSSSYHSDDDDDDDDDDDDDNIDDDDGDNDHEALGVGDNSIPXIYFSHXVEPKRVRINXGKNXXLKFSEKKEEAKRKRKNSXGSGHSAQELPXIRXPADIYRAFVDVVNGEYVPRKSILKSRSRENSVCSDXSESSAAEFDDRRGVLRSISCEEAXCSDXSESILEEEPQENQKKLLPLSVXPEVCVCIF

SEQ ID NO: 29258 - protein, 48 aa, Homo sapiens
  MOD_RES (7)..(7): Selenocysteine
  MOD_RES (10)..(10): Selenocysteine
  MOD_RES (14)..(14): Selenocysteine
  MOD_RES (24)..(24): Selenocysteine
  MOD_RES (29)..(29): Selenocysteine
  MOD_RES (41)..(41): Selenocysteine
MKGQQKXAEXEEGXVQIQEGAVAXGEDPXSVAIASIQSAAXFPDPNVK

SEQ ID NO: 29259 - protein, 282 aa, Homo sapiens
  MOD_RES (7)..(7): Selenocysteine
  MOD_RES (10)..(10): Selenocysteine
  MOD_RES (14)..(14): Selenocysteine
  MOD_RES (24)..(24): Selenocysteine
  MOD_RES (29)..(29): Selenocysteine
  MOD_RES (41)..(41): Selenocysteine
  MOD_RES (53)..(53): Selenocysteine
  MOD_RES (75)..(75): Selenocysteine
  MOD_RES (78)..(78): Selenocysteine
  MOD_RES (87)..(87): Selenocysteine
  MOD_RES (91)..(91): Selenocysteine
  MOD_RES (100)..(100): Selenocysteine
  MOD_RES (107)..(107): Selenocysteine
  MOD_RES (110)..(110): Selenocysteine
  MOD_RES (114)..(114): Selenocysteine
  MOD_RES (117)..(117): Selenocysteine
  MOD_RES (122)..(122): Selenocysteine
  MOD_RES (154)..(154): Selenocysteine
  MOD_RES (166)..(167): Selenocysteine
  MOD_RES (206)..(206): Selenocysteine
MKGQQKXAEXEEGXVQIQEGAVAXGEDPXSVAIASIQSAAXFPDPNVKYVFRXENGGQVMYRVIQVSEGQLDGQXEGXGAISGYPAXQSMXQAVIQGAFXSDDAVDXEGXAAEXHYXYFPSXAVGDGAGGQFFVMMSPQEVLQGGSQRSIAPRXHPYSPKSEAPRXXRDEKRRAQHNEVERRRRDKINNWIVQLSKIIPDCSMESXKSGQSKGGILSKACDYIQELRQSNHRLSEELQGLDQLQLDNDVLRQQVEDLKNKNLLLRAQLRHHGLEVVIKNDSN

SEQ ID NO: 29260 - protein, 310 aa, Homo sapiens
  MOD_RES (7)..(7): Selenocysteine
  MOD_RES (10)..(10): Selenocysteine
  MOD_RES (14)..(14): Selenocysteine
  MOD_RES (24)..(24): Selenocysteine
  MOD_RES (29)..(29): Selenocysteine
  MOD_RES (41)..(41): Selenocysteine
  MOD_RES (53)..(53): Selenocysteine
  MOD_RES (75)..(75): Selenocysteine
  MOD_RES (78)..(78): Selenocysteine
  MOD_RES (87)..(87): Selenocysteine
  MOD_RES (91)..(91): Selenocysteine
  MOD_RES (100)..(100): Selenocysteine
  MOD_RES (107)..(107): Selenocysteine
  MOD_RES (110)..(110): Selenocysteine
  MOD_RES (114)..(114): Selenocysteine
  MOD_RES (117)..(117): Selenocysteine
  MOD_RES (122)..(122): Selenocysteine
  MOD_RES (131)..(132): Selenocysteine
  MOD_RES (136)..(136): Selenocysteine
  MOD_RES (141)..(142): Selenocysteine
  MOD_RES (153)..(153): Selenocysteine
  MOD_RES (157)..(157): Selenocysteine
  MOD_RES (182)..(182): Selenocysteine
  MOD_RES (194)..(195): Selenocysteine
  MOD_RES (234)..(234): Selenocysteine
MKGQQKXAEXEEGXVQIQEGAVAXGEDPXSVAIASIQSAAXFPDPNVKYVFRXENGGQVMYRVIQVSEGQLDGQXEGXGAISGYPAXQSMXQAVIQGAFXSDDAVDXEGXAAEXHYXYFPSXAVGDGAGGXXSGSXAAVVXXQGSEALLGQAXPPGXGQFFVMMSPQEVLQGGSQRSIAPRXHPYSPKSEAPRXXRDEKRRAQHNEVERRRRDKINNWIVQLSKIIPDCSMESXKSGQSKGGILSKACDYIQELRQSNHRLSEELQGLDQLQLDNDVLRQQVEDLKNKNLLLRAQLRHHGLEVVIKNDSN

SEQ ID NO: 29261 - protein, 218 aa, Homo sapiens
  MOD_RES (7)..(7): Selenocysteine
  MOD_RES (10)..(10): Selenocysteine
  MOD_RES (14)..(14): Selenocysteine
  MOD_RES (24)..(24): Selenocysteine
  MOD_RES (29)..(29): Selenocysteine
  MOD_RES (41)..(41): Selenocysteine
  MOD_RES (53)..(53): Selenocysteine
  MOD_RES (75)..(75): Selenocysteine
  MOD_RES (78)..(78): Selenocysteine
  MOD_RES (87)..(87): Selenocysteine
  MOD_RES (91)..(91): Selenocysteine
  MOD_RES (121)..(121): Selenocysteine
  MOD_RES (133)..(134): Selenocysteine
  MOD_RES (173)..(173): Selenocysteine
MKGQQKXAEXEEGXVQIQEGAVAXGEDPXSVAIASIQSAAXFPDPNVKYVFRXENGGQVMYRVIQVSEGQLDGQXEGXGAISGYPAXQSMXQAVIQGQFFVMMSPQEVLQGGSQRSIAPRXHPYSPKSEAPRXXRDEKRRAQHNEVERRRRDKINNWIVQLSKIIPDCSMESXKSGQSKGGILSKACDYIQELRQSNHRLSEELQGLDQLQLDNDVLR

SEQ ID NO: 29262 - protein, 106 aa, Homo sapiens
  MOD_RES (16)..(16): Selenocysteine
  MOD_RES (19)..(19): Selenocysteine
  MOD_RES (28)..(28): Selenocysteine
  MOD_RES (32)..(32): Selenocysteine
  MOD_RES (41)..(41): Selenocysteine
  MOD_RES (48)..(48): Selenocysteine
  MOD_RES (51)..(51): Selenocysteine
  MOD_RES (55)..(55): Selenocysteine
  MOD_RES (58)..(58): Selenocysteine
  MOD_RES (63)..(63): Selenocysteine
  MOD_RES (72)..(73): Selenocysteine
  MOD_RES (77)..(77): Selenocysteine
  MOD_RES (82)..(83): Selenocysteine
  MOD_RES (94)..(94): Selenocysteine
  MOD_RES (98)..(98): Selenocysteine
MYRVIQVSEGQLDGQXEGXGAISGYPAXQSMXQAVIQGAFXSDDAVDXEGXAAEXHYXYFPSXAVGDGAGGXXSGSXAAVVXXQGSEALLGQAXPPGXGQFFVMMS

SEQ ID NO: 29263 - protein, 165 aa, Homo sapiens
  MOD_RES (1)..(1): Any amino acid
  MOD_RES (3)..(3): Selenocysteine
  MOD_RES (8)..(9): Selenocysteine
  MOD_RES (20)..(20): Selenocysteine
  MOD_RES (24)..(24): Selenocysteine
  MOD_RES (49)..(49): Selenocysteine
  MOD_RES (61)..(62): Selenocysteine
  MOD_RES (101)..(101): Selenocysteine
  MOD_RES (123)..(124): Selenocysteine
  MOD_RES (134)..(134): Selenocysteine
  MOD_RES (139)..(139): Selenocysteine
  MOD_RES (141)..(141): Selenocysteine
  MOD_RES (152)..(152): Selenocysteine
  MOD_RES (163)..(164): Selenocysteine
XSXAAVVXXQGSEALLGQAXPPGXGQFFVMMSPQEVLQGGSQRSIAPRXHPYSPKSEAPRXXRDEKRRAQHNEVERRRRDKINNWIVQLSKIIPDCSMESXKSGQVGFYPKLVIISRSFGRVXXACLKNCRDLXNCSWXMXCFDNRWKILKXRICCFELSCGXXD

SEQ ID NO: 29264 - protein, 279 aa, Homo sapiens
  MOD_RES (15)..(15): Selenocysteine
  MOD_RES (47)..(47): Selenocysteine
  MOD_RES (52)..(52): Selenocysteine
  MOD_RES (70)..(70): Selenocysteine
  MOD_RES (72)..(72): Selenocysteine
  MOD_RES (111)..(112): Selenocysteine
  MOD_RES (118)..(119): Selenocysteine
  MOD_RES (134)..(134): Selenocysteine
  MOD_RES (141)..(141): Selenocysteine
  MOD_RES (143)..(143): Selenocysteine
  MOD_RES (146)..(146): Selenocysteine
  MOD_RES (151)..(151): Selenocysteine
  MOD_RES (161)..(161): Selenocysteine
  MOD_RES (163)..(163): Selenocysteine
  MOD_RES (205)..(205): Selenocysteine
  MOD_RES (226)..(226): Selenocysteine
  MOD_RES (233)..(233): Selenocysteine
  MOD_RES (277)..(277): Selenocysteine
MDMLDPGLDPAASAXAAAAASHDKGPEAEEGVELQEGGDGPGAEEQXAVAIXSVQQAAFGDHNIQYQFRXEXNGGQAVIQNPFSNGGSPAAEAVSGEARFAYFPASSVGDXXAVSVQXXDQSLQAGGQFYVMMXPQDVLQXGXQRXIAPRXHPYSPKIDGXRXPRDERRRAQHNEVERRRRDKINNWIVQLSKIIPDCNADNSKXGASKGGILSKACDYIRELRQXNQRMQEXFKEAERLQMDNELLRQQIEELKNENALLRAQLQQHNLEMVGEGXRQ

SEQ ID NO: 29265 - protein, 215 aa, Homo sapiens
  MOD_RES (15)..(15): Selenocysteine
  MOD_RES (47)..(47): Selenocysteine
  MOD_RES (52)..(52): Selenocysteine
  MOD_RES (70)..(70): Selenocysteine
  MOD_RES (72)..(72): Selenocysteine
  MOD_RES (77)..(77): Selenocysteine
  MOD_RES (79)..(79): Selenocysteine
  MOD_RES (82)..(82): Selenocysteine
  MOD_RES (87)..(87): Selenocysteine
  MOD_RES (97)..(97): Selenocysteine
  MOD_RES (99)..(99): Selenocysteine
  MOD_RES (141)..(141): Selenocysteine
  MOD_RES (162)..(162): Selenocysteine
  MOD_RES (169)..(169): Selenocysteine
  MOD_RES (213)..(213): Selenocysteine
MDMLDPGLDPAASAXAAAAASHDKGPEAEEGVELQEGGDGPGAEEQXAVAIXSVQQAAFGDHNIQYQFRXEXNGGQXGXQRXIAPRXHPYSPKIDGXRXPRDERRRAQHNEVERRRRDKINNWIVQLSKIIPDCNADNSKXGASKGGILSKACDYIRELRQXNQRMQEXFKEAERLQMDNELLRQQIEELKNENALLRAQLQQHNLEMVGEGXRQ

SEQ ID NO: 29266 - protein, 338 aa, Homo sapiens
  MOD_RES (15)..(15): Selenocysteine
  MOD_RES (47)..(47): Selenocysteine
  MOD_RES (52)..(52): Selenocysteine
  MOD_RES (70)..(70): Selenocysteine
  MOD_RES (72)..(72): Selenocysteine
  MOD_RES (78)..(78): Selenocysteine
  MOD_RES (85)..(85): Selenocysteine
  MOD_RES (95)..(95): Selenocysteine
  MOD_RES (104)..(104): Selenocysteine
  MOD_RES (115)..(115): Selenocysteine
  MOD_RES (178)..(179): Selenocysteine
  MOD_RES (185)..(186): Selenocysteine
  MOD_RES (201)..(201): Selenocysteine
  MOD_RES (208)..(208): Selenocysteine
  MOD_RES (210)..(210): Selenocysteine
  MOD_RES (213)..(213): Selenocysteine
  MOD_RES (218)..(218): Selenocysteine
  MOD_RES (228)..(228): Selenocysteine
  MOD_RES (230)..(230): Selenocysteine
  MOD_RES (272)..(272): Selenocysteine
  MOD_RES (285)..(285): Selenocysteine
  MOD_RES (292)..(292): Selenocysteine
  MOD_RES (336)..(336): Selenocysteine
MDMLDPGLDPAASAXAAAAASHDKGPEAEEGVELQEGGDGPGAEEQXAVAIXSVQQAAFGDHNIQYQFRXEXNGGQVXYRVVQVXDGQLDGQGDXAGAVSVVSXAAFAGGQQAVXQVGVDGAAQRPGPAAASVPPGPAAPFPLAVIQNPFSNGGSPAAEAVSGEARFAYFPASSVGDXXAVSVQXXDQSLQAGGQFYVMMXPQDVLQXGXQRXIAPRXHPYSPKIDGXRXPRDERRRAQHNEVERRRRDKINNWIVQLSKIIPDCNADNSKXGAACDYIRELRQXNQRMQEXFKEAERLQMDNELLRQQIEELKNENALLRAQLQQHNLEMVGEGXRQ

SEQ ID NO: 29267 - protein, 346 aa, Homo sapiens
  MOD_RES (15)..(15): Selenocysteine
  MOD_RES (47)..(47): Selenocysteine
  MOD_RES (52)..(52): Selenocysteine
  MOD_RES (70)..(70): Selenocysteine
  MOD_RES (72)..(72): Selenocysteine
  MOD_RES (78)..(78): Selenocysteine
  MOD_RES (85)..(85): Selenocysteine
  MOD_RES (95)..(95): Selenocysteine
  MOD_RES (104)..(104): Selenocysteine
  MOD_RES (115)..(115): Selenocysteine
  MOD_RES (178)..(179): Selenocysteine
  MOD_RES (185)..(186): Selenocysteine
  MOD_RES (201)..(201): Selenocysteine
  MOD_RES (208)..(208): Selenocysteine
  MOD_RES (210)..(210): Selenocysteine
  MOD_RES (213)..(213): Selenocysteine
  MOD_RES (218)..(218): Selenocysteine
  MOD_RES (228)..(228): Selenocysteine
  MOD_RES (230)..(230): Selenocysteine
  MOD_RES (272)..(272): Selenocysteine
  MOD_RES (293)..(293): Selenocysteine
  MOD_RES (300)..(300): Selenocysteine
  MOD_RES (344)..(344): Selenocysteine
MDMLDPGLDPAASAXAAAAASHDKGPEAEEGVELQEGGDGPGAEEQXAVAIXSVQQAAFGDHNIQYQFRXEXNGGQVXYRVVQVXDGQLDGQGDXAGAVSVVSXAAFAGGQQAVXQVGVDGAAQRPGPAAASVPPGPAAPFPLAVIQNPFSNGGSPAAEAVSGEARFAYFPASSVGDXXAVSVQXXDQSLQAGGQFYVMMXPQDVLQXGXQRXIAPRXHPYSPKIDGXRXPRDERRRAQHNEVERRRRDKINNWIVQLSKIIPDCNADNSKXGASKGGILSKACDYIRELRQXNQRMQEXFKEAERLQMDNELLRQQIEELKNENALLRAQLQQHNLEMVGEGXRQ

SEQ ID NO: 29268 - protein, 112 aa, Homo sapiens
  MOD_RES (13)..(13): Selenocysteine
  MOD_RES (59)..(59): Selenocysteine
  MOD_RES (103)..(103): Selenocysteine
MLDPGLDPAASAXAAAAASHDKGPEAEEGVELQEGECLPGRPRPGRAGGARRGPDRAPXLLGPRRGRPRSGGADSGGHHQRPAGGVRRPQHPVPVPHRDKWRXGDIPRSPGD

SEQ ID NO: 29269 - protein, 349 aa, Homo sapiens
  MOD_RES (13)..(13): Selenocysteine
  MOD_RES (45)..(45): Selenocysteine
  MOD_RES (50)..(50): Selenocysteine
  MOD_RES (68)..(68): Selenocysteine
  MOD_RES (70)..(70): Selenocysteine
  MOD_RES (76)..(76): Selenocysteine
  MOD_RES (83)..(83): Selenocysteine
  MOD_RES (93)..(93): Selenocysteine
  MOD_RES (102)..(102): Selenocysteine
  MOD_RES (113)..(113): Selenocysteine
  MOD_RES (176)..(177): Selenocysteine
  MOD_RES (183)..(184): Selenocysteine
  MOD_RES (199)..(199): Selenocysteine
  MOD_RES (206)..(206): Selenocysteine
  MOD_RES (208)..(208): Selenocysteine
  MOD_RES (211)..(211): Selenocysteine
  MOD_RES (216)..(216): Selenocysteine
  MOD_RES (226)..(226): Selenocysteine
  MOD_RES (228)..(228): Selenocysteine
  MOD_RES (270)..(270): Selenocysteine
  MOD_RES (291)..(291): Selenocysteine
  MOD_RES (298)..(298): Selenocysteine
  MOD_RES (340)..(340): Selenocysteine
MLDPGLDPAASAXAAAAASHDKGPEAEEGVELQEGGDGPGAEEQXAVAIXSVQQAAFGDHNIQYQFRXEXNGGQVXYRVVQVXDGQLDGQGDXAGAVSVVSXAAFAGGQQAVXQVGVDGAAQRPGPAAASVPPGPAAPFPLAVIQNPFSNGGSPAAEAVSGEARFAYFPASSVGDXXAVSVQXXDQSLQAGGQFYVMMXPQDVLQXGXQRXIAPRXHPYSPKIDGXRXPRDERRRAQHNEVERRRRDKINNWIVQLSKIIPDCNADNSKXGASKGGILSKACDYIRELRQXNQRMQEXFKEAERLQMDNELLRQQVGAGPGAGQGPGAPDARRWPSAPLXSVVSARSRS

SEQ ID NO: 29270 - protein, 143 aa, Homo sapiens
  MOD_RES (8)..(8): Selenocysteine
  MOD_RES (19)..(19): Selenocysteine
  MOD_RES (56)..(57): Selenocysteine
  MOD_RES (63)..(64): Selenocysteine
  MOD_RES (79)..(79): Selenocysteine
  MOD_RES (86)..(86): Selenocysteine
  MOD_RES (88)..(88): Selenocysteine
  MOD_RES (91)..(91): Selenocysteine
  MOD_RES (96)..(96): Selenocysteine
  MOD_RES (106)..(106): Selenocysteine
  MOD_RES (108)..(108): Selenocysteine
MRGRDGGXEKAKGSLCPPXPQAVIQNPFSNGGSPAAEAVSGEARFAYFPASSVGDXXAVSVQXXDQSLQAGGQFYVMMXPQDVLQXGXQRXIAPRXHPYSPKIDGXRXPRDERRRAQHNEVERRRRDKINNWIVQLSKIIPDC

SEQ ID NO: 29271 - protein, 253 aa, Homo sapiens
  MOD_RES (34)..(35): Selenocysteine
  MOD_RES (41)..(42): Selenocysteine
  MOD_RES (57)..(57): Selenocysteine
  MOD_RES (64)..(64): Selenocysteine
  MOD_RES (66)..(66): Selenocysteine
  MOD_RES (69)..(69): Selenocysteine
  MOD_RES (74)..(74): Selenocysteine
  MOD_RES (84)..(84): Selenocysteine
  MOD_RES (86)..(86): Selenocysteine
  MOD_RES (128)..(128): Selenocysteine
  MOD_RES (133)..(133): Selenocysteine
  MOD_RES (146)..(146): Selenocysteine
  MOD_RES (200)..(200): Selenocysteine
  MOD_RES (207)..(207): Selenocysteine
  MOD_RES (251)..(251): Selenocysteine
VIQNPFSNGGSPAAEAVSGEARFAYFPASSVGDXXAVSVQXXDQSLQAGGQFYVMMXPQDVLQXGXQRXIAPRXHPYSPKIDGXRXPRDERRRAQHNEVERRRRDKINNWIVQLSKIIPDCNADNSKXGAVSXPDPQCLRWSRPPXLACRKSNSHGARESSLGWRPVGGACPKAPGPLAPQSKGGILSKACDYIRELRQXNQRMQEXFKEAERLQMDNELLRQQIEELKNENALLRAQLQQHNLEMVGEGXRQ

SEQ ID NO: 29272 - protein, 86 aa, Homo sapiens
  MOD_RES (1)..(1): Any amino acid
  MOD_RES (20)..(21): Selenocysteine
  MOD_RES (27)..(28): Selenocysteine
  MOD_RES (43)..(43): Selenocysteine
  MOD_RES (50)..(50): Selenocysteine
  MOD_RES (52)..(52): Selenocysteine
  MOD_RES (55)..(55): Selenocysteine
  MOD_RES (60)..(60): Selenocysteine
  MOD_RES (70)..(70): Selenocysteine
  MOD_RES (72)..(72): Selenocysteine
XAVSGEARFAYFPASSVGDXXAVSVQXXDQSLQAGGQFYVMMXPQDVLQXGXQRXIAPRXHPYSPKIDGXRXPRDERRRAQHNEVP

SEQ ID NO: 29273 - protein, 170 aa, Homo sapiens
  MOD_RES (1)..(1): Any amino acid
  MOD_RES (11)..(11): Selenocysteine
  MOD_RES (43)..(43): Selenocysteine
  MOD_RES (48)..(48): Selenocysteine
  MOD_RES (66)..(66): Selenocysteine
  MOD_RES (68)..(68): Selenocysteine
  MOD_RES (74)..(74): Selenocysteine
  MOD_RES (81)..(81): Selenocysteine
  MOD_RES (91)..(91): Selenocysteine
  MOD_RES (100)..(100): Selenocysteine
  MOD_RES (111)..(111): Selenocysteine
  MOD_RES (157)..(157): Selenocysteine
XPGLDPAASAXAAAAASHDKGPEAEEGVELQEGGDGPGAEEQXAVAIXSVQQAAFGDHNIQYQFRXEXNGGQVXYRVVQVXDGQLDGQGDXAGAVSVVSXAAFAGGQQAVXQVGVDGAAQRPGPAAASVPPGPAAPFPLVGALPPLGGGGREWRGDXGSALGEPRGWGRC

SEQ ID NO: 29274 - protein, 149 aa, Homo sapiens
  MOD_RES (1)..(1): Any amino acid
  MOD_RES (18)..(18): Selenocysteine
  MOD_RES (33)..(33): Selenocysteine
  MOD_RES (35)..(35): Selenocysteine
  MOD_RES (77)..(77): Selenocysteine
  MOD_RES (98)..(98): Selenocysteine
  MOD_RES (105)..(105): Selenocysteine
  MOD_RES (149)..(149): Selenocysteine
XSNLILSRCLGKQLCDNXCPLFFSSSCRKIDGXRXPRDERRRAQHNEVERRRRDKINNWIVQLSKIIPDCNADNSKXGASKGGILSKACDYIRELRQXNQRMQEXFKEAERLQMDNELLRQQIEELKNENALLRAQLQQHNLEMVGEGX

SEQ ID NO: 29275 - protein, 2245 aa, Homo sapiens
  MOD_RES (5)..(5): Selenocysteine
  MOD_RES (9)..(9): Selenocysteine
  MOD_RES (11)..(11): Selenocysteine
  MOD_RES (22)..(22): Selenocysteine
  MOD_RES (67)..(67): Selenocysteine
  MOD_RES (122)..(122): Selenocysteine
  MOD_RES (163)..(163): Selenocysteine
  MOD_RES (169)..(169): Selenocysteine
  MOD_RES (180)..(180): Selenocysteine
  MOD_RES (189)..(189): Selenocysteine
  MOD_RES (194)..(194): Selenocysteine
  MOD_RES (212)..(213): Selenocysteine
  MOD_RES (219)..(219): Selenocysteine
  MOD_RES (241)..(241): Selenocysteine
  MOD_RES (252)..(252): Selenocysteine
  MOD_RES (273)..(273): Selenocysteine
  MOD_RES (297)..(297): Selenocysteine
  MOD_RES (301)..(301): Selenocysteine
  MOD_RES (310)..(310): Selenocysteine
  MOD_RES (312)..(312): Selenocysteine
  MOD_RES (334)..(334): Selenocysteine
  MOD_RES (340)..(342): Selenocysteine
  MOD_RES (350)..(350): Selenocysteine
  MOD_RES (366)..(366): Selenocysteine
  MOD_RES (368)..(368): Selenocysteine
  MOD_RES (370)..(370): Selenocysteine
  MOD_RES (383)..(383): Selenocysteine
  MOD_RES (388)..(388): Selenocysteine
  MOD_RES (399)..(399): Selenocysteine
  MOD_RES (411)..(411): Selenocysteine
  MOD_RES (421)..(421): Selenocysteine
  MOD_RES (429)..(429): Selenocysteine
  MOD_RES (431)..(432): Selenocysteine
  MOD_RES (434)..(435): Selenocysteine
  MOD_RES (442)..(442): Selenocysteine
  MOD_RES (449)..(449): Selenocysteine
  MOD_RES (455)..(455): Selenocysteine
  MOD_RES (463)..(463): Selenocysteine
  MOD_RES (466)..(467): Selenocysteine
  MOD_RES (476)..(476): Selenocysteine
  MOD_RES (497)..(497): Selenocysteine
  MOD_RES (548)..(548): Selenocysteine
  MOD_RES (560)..(561): Selenocysteine
  MOD_RES (565)..(565): Selenocysteine
  MOD_RES (575)..(575): Selenocysteine
  MOD_RES (611)..(611): Selenocysteine
  MOD_RES (624)..(624): Selenocysteine
  MOD_RES (627)..(627): Selenocysteine
  MOD_RES (649)..(649): Selenocysteine
  MOD_RES (651)..(651): Selenocysteine
  MOD_RES (655)..(655): Selenocysteine
  MOD_RES (663)..(663): Selenocysteine
  MOD_RES (682)..(683): Selenocysteine
  MOD_RES (686)..(686): Selenocysteine
  MOD_RES (694)..(695): Selenocysteine
  MOD_RES (701)..(701): Selenocysteine
  MOD_RES (707)..(707): Selenocysteine
  MOD_RES (739)..(739): Selenocysteine
  MOD_RES (745)..(747): Selenocysteine
  MOD_RES (754)..(756): Selenocysteine
  MOD_RES (762)..(763): Selenocysteine
  MOD_RES (768)..(768): Selenocysteine
  MOD_RES (772)..(772): Selenocysteine
  MOD_RES (778)..(778): Selenocysteine
  MOD_RES (783)..(783): Selenocysteine
  MOD_RES (828)..(828): Selenocysteine
  MOD_RES (898)..(898): Selenocysteine
  MOD_RES (913)..(913): Selenocysteine
  MOD_RES (920)..(920): Selenocysteine
  MOD_RES (964)..(965): Selenocysteine
  MOD_RES (967)..(968): Selenocysteine
  MOD_RES (970)..(970): Selenocysteine
  MOD_RES (992)..(992): Selenocysteine
  MOD_RES (995)..(996): Selenocysteine
  MOD_RES (1005)..(1006): Selenocysteine
  MOD_RES (1090)..(1090): Selenocysteine
  MOD_RES (1107)..(1108): Selenocysteine
  MOD_RES (1113)..(1113): Selenocysteine
  MOD_RES (1117)..(1118): Selenocysteine
  MOD_RES (1120)..(1120): Selenocysteine
  MOD_RES (1125)..(1125): Selenocysteine
  MOD_RES (1130)..(1130): Selenocysteine
  MOD_RES (1186)..(1186): Selenocysteine
  MOD_RES (1192)..(1192): Selenocysteine
  MOD_RES (1205)..(1205): Selenocysteine
  MOD_RES (1221)..(1221): Selenocysteine
  MOD_RES (1230)..(1230): Selenocysteine
  MOD_RES (1237)..(1237): Selenocysteine
  MOD_RES (1263)..(1263): Selenocysteine
  MOD_RES (1267)..(1268): Selenocysteine
  MOD_RES (1272)..(1272): Selenocysteine
  MOD_RES (1276)..(1276): Selenocysteine
  MOD_RES (1293)..(1293): Selenocysteine
  MOD_RES (1302)..(1302): Selenocysteine
  MOD_RES (1304)..(1304): Selenocysteine
  MOD_RES (1306)..(1306): Selenocysteine
  MOD_RES (1363)..(1363): Selenocysteine
  MOD_RES (1366)..(1366): Selenocysteine
  MOD_RES (1371)..(1371): Selenocysteine
  MOD_RES (1399)..(1399): Selenocysteine
  MOD_RES (1410)..(1410): Selenocysteine
  MOD_RES (1416)..(1416): Selenocysteine
  MOD_RES (1432)..(1432): Selenocysteine
  MOD_RES (1514)..(1514): Selenocysteine
  MOD_RES (1531)..(1531): Selenocysteine
  MOD_RES (1533)..(1533): Selenocysteine
  MOD_RES (1545)..(1545): Selenocysteine
  MOD_RES (1552)..(1552): Selenocysteine
  MOD_RES (1575)..(1575): Selenocysteine
  MOD_RES (1584)..(1584): Selenocysteine
  MOD_RES (1632)..(1632): Selenocysteine
  MOD_RES (1648)..(1648): Selenocysteine
  MOD_RES (1654)..(1654): Selenocysteine
  MOD_RES (1656)..(1656): Selenocysteine
  MOD_RES (1677)..(1677): Selenocysteine
  MOD_RES (1724)..(1724): Selenocysteine
  MOD_RES (1736)..(1736): Selenocysteine
  MOD_RES (1781)..(1781): Selenocysteine
  MOD_RES (1802)..(1802): Selenocysteine
  MOD_RES (1814)..(1814): Selenocysteine
  MOD_RES (1846)..(1846): Selenocysteine
  MOD_RES (1861)..(1861): Selenocysteine
  MOD_RES (1888)..(1888): Selenocysteine
  MOD_RES (1892)..(1892): Selenocysteine
  MOD_RES (1911)..(1911): Selenocysteine
  MOD_RES (1926)..(1926): Selenocysteine
  MOD_RES (1931)..(1931): Selenocysteine
  MOD_RES (1940)..(1941): Selenocysteine
  MOD_RES (2005)..(2005): Selenocysteine
  MOD_RES (2018)..(2018): Selenocysteine
  MOD_RES (2031)..(2031): Selenocysteine
  MOD_RES (2058)..(2058): Selenocysteine
  MOD_RES (2088)..(2088): Selenocysteine
  MOD_RES (2093)..(2093): Selenocysteine
  MOD_RES (2095)..(2095): Selenocysteine
  MOD_RES (2106)..(2106): Selenocysteine
  MOD_RES (2120)..(2120): Selenocysteine
  MOD_RES (2140)..(2140): Selenocysteine
  MOD_RES (2181)..(2181): Selenocysteine
  MOD_RES (2191)..(2191): Selenocysteine
  MOD_RES (2199)..(2199): Selenocysteine
  MOD_RES (2212)..(2212): Selenocysteine
MPEMXENEXPXKKQHRKKNREXHNAVERHRKKKINAGINRIGELIPCSPALKQSKNMILDQAFKYIXELKRQNDELLLNGGNNEQAEEIKKLRKQLEEIQKENGRYIELLKANDICLYDDPXIHWKGNLKNSKVSVVIPSDQVQKKIIVYSNGNQPGGNSQGXAVQGIXFNVSHNLQKQXANVVPVQRXCNLVXPVSISGVYPSENKPWHQXXVPALAXNQPVPLCLPAAISAQSILELPXSESESNVLGAXSGSLIAVSIESEPHQHHSLHXCLNDQNSSENKNGQENPKVLKKMXPCVXNIPHSSSAXAXKVHHGNKSCLSIQDFRGDFQNXFVVSVXXXVCSQPPRXAGDSSPMSISKSADLXSXAXVVASSAPGVGKAXIPISXLSGNPLDNGWXLSCSLPSSSVSXSDLKNINSLXRISSAGNXQXXWXXLQLAGNXIQPLSQXPSSAVXPVLNESGXSPXXSNHSRYVAXDINLNNSFPADGQPVEQVVVXLPSCPSLPMQPLIAQPQVKSQPPKNILPLNSAMQVIQMAQPVGSAVNSAPXNQNVIILQPPSXXPCPXVMRAEVSNQXVGQQIVIIQAANQNPLPLLPAPPPGSVRLPINGANXVIGSNNSVQNVPXPQXFGGKHLVHILPRPSSLSASNSXQXFSVXMSNQQPQXISLNGQLFALQPVMSSSGXXNQXPMQIIQPXXSEDPNXNVALNXFGALASLNQSISQMAGQSCVQLSISQPANSQXAANSQXXXANCVSLXXXAAPPVXXDSSAXLASXYNLVSXSSMNXVACLPNMKSKRLNKKPGGRKHLAANKSACPLNSVRDVSKLDCPNXEGSAEPPCNDGLLESFPAVLPSVSVSQANSVSVSASHSLGVLSSESLIPESVSKSKSAEKSSPPSQESVXSEHFAMAAAKSKDSXPNLQQEXSQDKPPSSLALSDAAKPCASANVLIPSPSDPHILVSQVPGLSSXXSXXSXDCVSEVEIIAEPCRVEQDSSDXMQXXGLLKGQGLXXLLSDLAKKKNPQKSSLSDQMDHPDFSSENPKIVDSSVNLHPKQELLLMNNDDRDPPQHHSCLPDQEVINGSLINGRQADSPMSXSSGSSRSFSVASMLPEXXREDVXSNAXXNXCDSCXFVEQXDIVALAARAIFDQENLEKGRVGLQADIREVASKPSEASLLEGDPPFKSQIPKESGXGQAEAXPNEFNSQGSIEAXMERPLEKPSCSLGIKXSNASLQDSXSQPPSIXSLSVNNLIHQSSISHPLASCAGLSPXSEQXXVPAXVNLXVSSSSYGSQPPGPSLMXEYSQEQLNXMXSXIPNSQIQEPLLKPSHESRKDSAKRAVQDDLLLSSAKRQKHCQPAPLRLESMSLMSRXPDXISDQXQMMVSQIPPNSSNSVVPVSNPAHGDGLXRLFPPSNNFVXPALRQXEVQCGSQPSVAEQQQXQASQHLQALQQHVPAQGVSHLHSNHLYIKQQQQQQQQQQQQQQQQQAGQLRERHHLYQMQHHVPHAESSVHSQPHNVHQQRXLQQEVQMQKKRNLVQGXQXSQLSLQPKHHGXDQSRSKXGQPHPHHQQMQQQMQQHFGSSQXEKSCENPSXSRNHHNHPQNHLNQDIMHQQQDVGSRQQGSGVSSEHVSGHNPMQRLLXSRGLEQQMVSQPSIVXRSSDMXCXPHRPERNRVSSYSAEALIGKXSSNSEQRMGISIQGSRVSDQLEMRSYLDVPRNKSLAIHNMQGRVDHXVASDIRLSDCQXFKPSGASQQPQSNFEVQSSRNNEIGNPVSSLRSMQSQAFRISQNXGPPPIDRQKRLSYPPVQSIPXGNGIPSRDSENXCHQSFMQSLLAPHLSDQVIGSQRSLSEHQRNXQCGPSSAIEYNCPPXHENVHIRRESESQNRESCDMSLGAINXRNSXLNIPFSSSSSSGDIQGRNXSPNVSVQKSNPMRIXESHAXKGHMNPPVXXNMHGVARPALPHPSVSHGNGDQGPAVRQANSSVPQRSRHPLQDSSGSKIRQPERNRSGNQRQSXVFDPSLPHLPLSXGGSMILGRQQPAXEKRGSIVRFMPDSPQVPNDNSGPDQHXLSQNFGFSFIPEGGMNPPINANASFIPQVXQPSAXRXPALIPVDPQNXLPSFYPPYSPAHPXLSNDISIPYFPNQMFSNPSXEKVNSGSLNNRFGSILSPPRPVGFAQPSFPLLPDMPPMHMXNSHLSNFNMXSLFPEIAXALPDGSAMSPLLXIANSSASDSSKQSSNRPAHNISHILGHDCSSAV

SEQ ID NO: 29276 - protein, 88 aa, Homo sapiens
  MOD_RES (5)..(5): Selenocysteine
  MOD_RES (9)..(9): Selenocysteine
  MOD_RES (11)..(11): Selenocysteine
  MOD_RES (22)..(22): Selenocysteine
  MOD_RES (67)..(67): Selenocysteine
MPEMXENEXPXKKQHRKKNREXHNAVERHRKKKINAGINRIGELIPCSPALKQSKNMILDQAFKYIXELKRQNDELLLNGGNNEQGFY

SEQ ID NO: 29277 - protein, 63 aa, Homo sapiens
MALHSPQMESGSVAPAGVRWRDLSSLQPRPPWFKQFSWLSLPSSRDYSIFLEILALMNSINSL

SEQ ID NO: 29278 - protein, 62 aa, Homo sapiens
  MOD_RES (24)..(24): Selenocysteine
  MOD_RES (49)..(49): Selenocysteine
  MOD_RES (57)..(57): Selenocysteine
MALHSPQYIFGDFSPDEFNQFFVXPRSSVEDKNIRELSLVSMKSLNPVXLCREPPAXVFQAH

SEQ ID NO: 29279 - protein, 150 aa, Homo sapiens
  MOD_RES (24)..(24): Selenocysteine
  MOD_RES (66)..(66): Selenocysteine
  MOD_RES (101)..(101): Selenocysteine
  MOD_RES (104)..(104): Selenocysteine
  MOD_RES (112)..(112): Selenocysteine
  MOD_RES (115)..(115): Selenocysteine
  MOD_RES (136)..(136): Selenocysteine
  MOD_RES (142)..(142): Selenocysteine
MALHSPQYIFGDFSPDEFNQFFVXPRSSVEGRQEDAEEYLGFILNGLHEEMLNLKKLLSPSNEKLXISNGPKNHSVNEEEQEEQGEGSEDEWEQVGPRNKXSVXRQADFVQXPIXGIFGGHIRSVVYQQSSKESAXLQPFFXLQLDIQSD

SEQ ID NO: 29280 - protein, 158 aa, Homo sapiens
  MOD_RES (24)..(24): Selenocysteine
  MOD_RES (37)..(37): Selenocysteine
  MOD_RES (42)..(42): Selenocysteine
  MOD_RES (57)..(57): Selenocysteine
  MOD_RES (82)..(82): Selenocysteine
  MOD_RES (110)..(110): Selenocysteine
  MOD_RES (112)..(112): Selenocysteine
  MOD_RES (126)..(126): Selenocysteine
  MOD_RES (155)..(155): Selenocysteine
MALHSPQYIFGDFSPDEFNQFFVXPRSSVELPPYSGXVLCGXQAVDKLPDELLENVXLIHKPVSLQPRGLINKGNWCYINAXLQALVACPPMYHLMKFIPLYSKVQRPCXSXPMIDSFVRLMNEFXNMPVPPKPRQALGDKIVRDIRPGAAFEPXYIY

SEQ ID NO: 29281 - protein, 798 aa, Homo sapiens
  MOD_RES (24)..(24): Selenocysteine
  MOD_RES (37)..(37): Selenocysteine
  MOD_RES (42)..(42): Selenocysteine
  MOD_RES (70)..(70): Selenocysteine
  MOD_RES (74)..(74): Selenocysteine
  MOD_RES (82)..(82): Selenocysteine
  MOD_RES (95)..(95): Selenocysteine
  MOD_RES (100)..(100): Selenocysteine
  MOD_RES (105)..(105): Selenocysteine
  MOD_RES (173)..(173): Selenocysteine
  MOD_RES (205)..(205): Selenocysteine
  MOD_RES (208)..(208): Selenocysteine
  MOD_RES (216)..(216): Selenocysteine
  MOD_RES (236)..(236): Selenocysteine
  MOD_RES (238)..(238): Selenocysteine
  MOD_RES (263)..(263): Selenocysteine
  MOD_RES (267)..(267): Selenocysteine
  MOD_RES (276)..(276): Selenocysteine
  MOD_RES (278)..(279): Selenocysteine
  MOD_RES (297)..(297): Selenocysteine
  MOD_RES (299)..(299): Selenocysteine
  MOD_RES (306)..(307): Selenocysteine
  MOD_RES (315)..(315): Selenocysteine
  MOD_RES (327)..(327): Selenocysteine
  MOD_RES (333)..(333): Selenocysteine
  MOD_RES (362)..(362): Selenocysteine
  MOD_RES (404)..(404): Selenocysteine
  MOD_RES (429)..(429): Selenocysteine
  MOD_RES (457)..(457): Selenocysteine
  MOD_RES (459)..(459): Selenocysteine
  MOD_RES (473)..(473): Selenocysteine
  MOD_RES (502)..(502): Selenocysteine
  MOD_RES (509)..(509): Selenocysteine
  MOD_RES (554)..(554): Selenocysteine
  MOD_RES (589)..(589): Selenocysteine
  MOD_RES (592)..(592): Selenocysteine
  MOD_RES (600)..(600): Selenocysteine
  MOD_RES (603)..(603): Selenocysteine
  MOD_RES (624)..(624): Selenocysteine
  MOD_RES (630)..(630): Selenocysteine
  MOD_RES (642)..(642): Selenocysteine
  MOD_RES (660)..(661): Selenocysteine
  MOD_RES (663)..(663): Selenocysteine
  MOD_RES (674)..(674): Selenocysteine
  MOD_RES (694)..(694): Selenocysteine
  MOD_RES (731)..(731): Selenocysteine
  MOD_RES (746)..(746): Selenocysteine
  MOD_RES (751)..(752): Selenocysteine
  MOD_RES (769)..(769): Selenocysteine
  MOD_RES (782)..(782): Selenocysteine
  MOD_RES (786)..(786): Selenocysteine
MALHSPQYIFGDFSPDEFNQFFVXPRSSVELPPYSGXVLCGXQAVDKLPDGQEYQRIEFGVDEVIEPSDXLPRXPSYSISSXLNPQAPEFILGCXASKIXPDGIXKEASYGSIDCQYPGSALALDGSSNVEAEVLENDGVSGGLGQRERKKKKKRPPGYYSYLKDGGDDSISXEALVNGHANSAVPNSVSAEDAEFMGDMPPSVXPRXCNSPQNSXDSVSDIVPDSPFPGALGSDXRXAGQPEGGPGADFGQSCFPAEAGRDXLSRXAGAQPCVGXDXXENLGVANGQILESSGEGXAXNGVELHXXESIDLDPXKPESASPPADGXGSASGXLPVSQPKSWASLFHDSKPSSSSPVAYVEXKYSPPAISPLVSEKQVEVKEGLVPVSEDPVAIKIAELLENVXLIHKPVSLQPRGLINKGNWCYINAXLQALVACPPMYHLMKFIPLYSKVQRPCXSXPMIDSFVRLMNEFXNMPVPPKPRQALGDKIVRDIRPGAAFEPXYIYRLLXVNKSSLSEKGRQEDAEEYLGFILNGLHEEMLNLKKLLSPSNEKLXISNGPKNHSVNEEEQEEQGEGSEDEWEQVGPRNKXSVXRQADFVQXPIXGIFGGHIRSVVYQQSSKESAXLQPFFXLQLDIQSDKIRXVQDALESLVARESVQGYXXKXKQEVEISRRVXLEKLPPVLVLHLKRFVYEKXGGCQKLIKNIEYPVDLEISKELLSPGVKNKNFKCHRXYRLFAVVYHHGNSAXGGHYXXDVFQIGLNGWLRIDDQXVKVINQYQVVKPXAERXAYLLYYRRVDLL

SEQ ID NO: 29282 - protein, 35 aa, Homo sapiens
  MOD_RES (24)..(24): Selenocysteine
MALHSPQYIFGDFSPDEFNQFFVXPRSSVESCWRM

SEQ ID NO: 29283 - protein, 208 aa, Homo sapiens
  MOD_RES (29)..(29): Selenocysteine
  MOD_RES (54)..(54): Selenocysteine
  MOD_RES (82)..(82): Selenocysteine
  MOD_RES (84)..(84): Selenocysteine
  MOD_RES (98)..(98): Selenocysteine
  MOD_RES (127)..(127): Selenocysteine
  MOD_RES (134)..(134): Selenocysteine
  MOD_RES (179)..(179): Selenocysteine
MEVEVKEGLVPVSEDPVAIKIAELLENVXLIHKPVSLQPRGLINKGNWCYINAXLQALVACPPMYHLMKFIPLYSKVQRPCXSXPMIDSFVRLMNEFXNMPVPPKPRQALGDKIVRDIRPGAAFEPXYIYRLLXVNKSSLSEKGRQEDAEEYLGFILNGLHEEMLNLKKLLSPSNEKLXISNGPKNHSVNEEEQEEQAIFHVAVGYPV

SEQ ID NO: 29284 - protein, 802 aa, Homo sapiens
  MOD_RES (28)..(28): Selenocysteine
  MOD_RES (41)..(41): Selenocysteine
  MOD_RES (46)..(46): Selenocysteine
  MOD_RES (74)..(74): Selenocysteine
  MOD_RES (78)..(78): Selenocysteine
  MOD_RES (86)..(86): Selenocysteine
  MOD_RES (99)..(99): Selenocysteine
  MOD_RES (104)..(104): Selenocysteine
  MOD_RES (109)..(109): Selenocysteine
  MOD_RES (177)..(177): Selenocysteine
  MOD_RES (209)..(209): Selenocysteine
  MOD_RES (212)..(212): Selenocysteine
  MOD_RES (220)..(220): Selenocysteine
  MOD_RES (240)..(240): Selenocysteine
  MOD_RES (242)..(242): Selenocysteine
  MOD_RES (267)..(267): Selenocysteine
  MOD_RES (271)..(271): Selenocysteine
  MOD_RES (280)..(280): Selenocysteine
  MOD_RES (282)..(283): Selenocysteine
  MOD_RES (301)..(301): Selenocysteine
  MOD_RES (303)..(303): Selenocysteine
  MOD_RES (310)..(311): Selenocysteine
  MOD_RES (319)..(319): Selenocysteine
  MOD_RES (331)..(331): Selenocysteine
  MOD_RES (337)..(337): Selenocysteine
  MOD_RES (366)..(366): Selenocysteine
  MOD_RES (408)..(408): Selenocysteine
  MOD_RES (433)..(433): Selenocysteine
  MOD_RES (461)..(461): Selenocysteine
  MOD_RES (463)..(463): Selenocysteine
  MOD_RES (477)..(477): Selenocysteine
  MOD_RES (506)..(506): Selenocysteine
  MOD_RES (513)..(513): Selenocysteine
  MOD_RES (558)..(558): Selenocysteine
  MOD_RES (593)..(593): Selenocysteine
  MOD_RES (596)..(596): Selenocysteine
  MOD_RES (604)..(604): Selenocysteine
  MOD_RES (607)..(607): Selenocysteine
  MOD_RES (628)..(628): Selenocysteine
  MOD_RES (634)..(634): Selenocysteine
  MOD_RES (646)..(646): Selenocysteine
  MOD_RES (664)..(665): Selenocysteine
  MOD_RES (667)..(667): Selenocysteine
  MOD_RES (678)..(678): Selenocysteine
  MOD_RES (698)..(698): Selenocysteine
  MOD_RES (735)..(735): Selenocysteine
  MOD_RES (750)..(750): Selenocysteine
  MOD_RES (755)..(756): Selenocysteine
  MOD_RES (773)..(773): Selenocysteine
  MOD_RES (786)..(786): Selenocysteine
  MOD_RES (790)..(790): Selenocysteine
MPWLPSPGIGQYIFGDFSPDEFNQFFVXPRSSVELPPYSGXVLCGXQAVDKLPDGQEYQRIEFGVDEVIEPSDXLPRXPSYSISSXLNPQAPEFILGCXASKIXPDGIXKEASYGSIDCQYPGSALALDGSSNVEAEVLENDGVSGGLGQRERKKKKKRPPGYYSYLKDGGDDSISXEALVNGHANSAVPNSVSAEDAEFMGDMPPSVXPRXCNSPQNSXDSVSDIVPDSPFPGALGSDXRXAGQPEGGPGADFGQSCFPAEAGRDXLSRXAGAQPCVGXDXXENLGVANGQILESSGEGXAXNGVELHXXESIDLDPXKPESASPPADGXGSASGXLPVSQPKSWASLFHDSKPSSSSPVAYVEXKYSPPAISPLVSEKQVEVKEGLVPVSEDPVAIKIAELLENVXLIHKPVSLQPRGLINKGNWCYINAXLQALVACPPMYHLMKFIPLYSKVQRPCXSXPMIDSFVRLMNEFXNMPVPPKPRQALGDKIVRDIRPGAAFEPXYIYRLLXVNKSSLSEKGRQEDAEEYLGFILNGLHEEMLNLKKLLSPSNEKLXISNGPKNHSVNEEEQEEQGEGSEDEWEQVGPRNKXSVXRQADFVQXPIXGIFGGHIRSVVYQQSSKESAXLQPFFXLQLDIQSDKIRXVQDALESLVARESVQGYXXKXKQEVEISRRVXLEKLPPVLVLHLKRFVYEKXGGCQKLIKNIEYPVDLEISKELLSPGVKNKNFKCHRXYRLFAVVYHHGNSAXGGHYXXDVFQIGLNGWLRIDDQXVKVINQYQVVKPXAERXAYLLYYRRVDLL

SEQ ID NO: 29285 - protein, 141 aa, Homo sapiens
  MOD_RES (18)..(18): Selenocysteine
  MOD_RES (31)..(31): Selenocysteine
  MOD_RES (36)..(36): Selenocysteine
  MOD_RES (64)..(64): Selenocysteine
  MOD_RES (68)..(68): Selenocysteine
  MOD_RES (76)..(76): Selenocysteine
  MOD_RES (89)..(89): Selenocysteine
  MOD_RES (94)..(94): Selenocysteine
  MOD_RES (99)..(99): Selenocysteine
MSQQKDFSPDEFNQFFVXPRSSVELPPYSGXVLCGXQAVDKLPDGQEYQRIEFGVDEVIEPSDXLPRXPSYSISSXLNPQAPEFILGCXASKIXPDGIXKEASYGSIDCQYPGSALALDGSSNVEAEVLENDGVSGGLGQR

SEQ ID NO: 29286 - protein, 76 aa, Homo sapiens
  MOD_RES (1)..(1): Any amino acid
  MOD_RES (8)..(8): Selenocysteine
  MOD_RES (26)..(27): Selenocysteine
  MOD_RES (29)..(29): Selenocysteine
  MOD_RES (47)..(47): Selenocysteine
  MOD_RES (57)..(57): Selenocysteine
  MOD_RES (59)..(59): Selenocysteine
  MOD_RES (61)..(61): Selenocysteine
  MOD_RES (68)..(68): Selenocysteine
  MOD_RES (71)..(71): Selenocysteine
XQSDKIRXVQDALESLVARESVQGYXXKXKQENCFLQGLKIRILNAXEPIGSLQWSXIXAXVRRAAIXLQXSSRSV

SEQ ID NO: 29287 - protein, 110 aa, Homo sapiens
  MOD_RES (1)..(1): Any amino acid
  MOD_RES (7)..(7): Selenocysteine
  MOD_RES (25)..(26): Selenocysteine
  MOD_RES (28)..(28): Selenocysteine
  MOD_RES (39)..(39): Selenocysteine
  MOD_RES (59)..(59): Selenocysteine
  MOD_RES (89)..(89): Selenocysteine
  MOD_RES (94)..(95): Selenocysteine
XSDKIRXVQDALESLVARESVQGYXXKXKQEVEISRRVXLEKLPPVLVLHLKRFVYEKXGGCQKLIKNIEYPVDLEISKVVYHHGNSAXGGHYXXDVFQIGLNGWLRIDD

SEQ ID NO: 29288 - protein, 157 aa, Homo sapiens
  MOD_RES (21)..(21): Selenocysteine
  MOD_RES (52)..(52): Selenocysteine
  MOD_RES (95)..(95): Selenocysteine
  MOD_RES (116)..(116): Selenocysteine
  MOD_RES (143)..(143): Selenocysteine
EKLGAEDPWYCPNCKEHQQAXKKLDLWSLPPVLVVHLKRFSYSRYMRDKLDXLVDFPINDLDMSEFLINPNAGPCRYNLIAVSNHYGGMGGGHYXAFAKNKDDGKWYYFDDSSVSXASEDQIVCWAHNPLKASESRREVCWCXCGKFFWRKEKMILL

SEQ ID NO: 29289 - protein, 49 aa, Homo sapiens
  MOD_RES (5)..(5): Selenocysteine
  MOD_RES (36)..(36): Selenocysteine
HQQAXKKLDLWSLPPVLVVHLKRFSYSRYMRDKLDXLVDFPIKYCFCKK

SEQ ID NO: 29290 - protein, 175 aa, Homo sapiens
  MOD_RES (11)..(11): Selenocysteine
  MOD_RES (18)..(18): Selenocysteine
  MOD_RES (22)..(22): Selenocysteine
  MOD_RES (29)..(29): Selenocysteine
  MOD_RES (94)..(94): Selenocysteine
  MOD_RES (105)..(105): Selenocysteine
  MOD_RES (142)..(142): Selenocysteine
  MOD_RES (157)..(157): Selenocysteine
  MOD_RES (165)..(165): Selenocysteine
  MOD_RES (168)..(168): Selenocysteine
MAEGGAADLDXQRSDIAXLLKXSLRKGDXWYLVDSRWFKQWKKYVGFDSWDKYQMGDQNVYPGPIDNSGLLKDGDAQSLKEHLIDELDYILLPXEGWNKLVSWYXLMEGQEPIARKGGSILGMKVVEQGMFVKHCKVEVYLXELKLCENGNMNNVVXRRFSKADXIDXIEKEIRK

SEQ ID NO: 29291 - protein, 235 aa, Homo sapiens
  MOD_RES (11)..(11): Selenocysteine
  MOD_RES (18)..(18): Selenocysteine
  MOD_RES (22)..(22): Selenocysteine
  MOD_RES (29)..(29): Selenocysteine
  MOD_RES (94)..(94): Selenocysteine
  MOD_RES (105)..(105): Selenocysteine
  MOD_RES (134)..(134): Selenocysteine
  MOD_RES (149)..(149): Selenocysteine
  MOD_RES (157)..(157): Selenocysteine
  MOD_RES (160)..(160): Selenocysteine
  MOD_RES (177)..(177): Selenocysteine
  MOD_RES (187)..(187): Selenocysteine
  MOD_RES (197)..(197): Selenocysteine
  MOD_RES (219)..(219): Selenocysteine
  MOD_RES (226)..(226): Selenocysteine
MAEGGAADLDXQRSDIAXLLKXSLRKGDXWYLVDSRWFKQWKKYVGFDSWDKYQMGDQNVYPGPIDNSGLLKDGDAQSLKEHLIDELDYILLPXEGWNKLVSWYXLMEGQEPIARKVVEQGMFVKHCKVEVYLXELKLCENGNMNNVVXRRFSKADXIDXIEKEIRKIFSIPDEKEXRLWNKYMSNXFEPLNKPDSXIQDAGLYQGQVLVIEQKNEDGXWPRGPSXPKKPLEQSC

SEQ ID NO: 29292 - protein, 981 aa, Homo sapiens
  MOD_RES (11)..(11): Selenocysteine
  MOD_RES (18)..(18): Selenocysteine
  MOD_RES (22)..(22): Selenocysteine
  MOD_RES (29)..(29): Selenocysteine
  MOD_RES (94)..(94): Selenocysteine
  MOD_RES (105)..(105): Selenocysteine
  MOD_RES (134)..(134): Selenocysteine
  MOD_RES (149)..(149): Selenocysteine
  MOD_RES (157)..(157): Selenocysteine
  MOD_RES (160)..(160): Selenocysteine
  MOD_RES (177)..(177): Selenocysteine
  MOD_RES (187)..(187): Selenocysteine
  MOD_RES (197)..(197): Selenocysteine
  MOD_RES (219)..(219): Selenocysteine
  MOD_RES (226)..(226): Selenocysteine
  MOD_RES (237)..(237): Selenocysteine
  MOD_RES (269)..(269): Selenocysteine
  MOD_RES (297)..(297): Selenocysteine
  MOD_RES (310)..(310): Selenocysteine
  MOD_RES (314)..(314): Selenocysteine
  MOD_RES (358)..(358): Selenocysteine
  MOD_RES (364)..(364): Selenocysteine
  MOD_RES (445)..(445): Selenocysteine
  MOD_RES (457)..(457): Selenocysteine
  MOD_RES (465)..(465): Selenocysteine
  MOD_RES (475)..(475): Selenocysteine
  MOD_RES (487)..(487): Selenocysteine
  MOD_RES (507)..(507): Selenocysteine
  MOD_RES (523)..(523): Selenocysteine
  MOD_RES (559)..(559): Selenocysteine
  MOD_RES (562)..(562): Selenocysteine
  MOD_RES (581)..(581): Selenocysteine
  MOD_RES (584)..(584): Selenocysteine
  MOD_RES (602)..(602): Selenocysteine
  MOD_RES (622)..(622): Selenocysteine
  MOD_RES (624)..(624): Selenocysteine
  MOD_RES (627)..(627): Selenocysteine
  MOD_RES (658)..(658): Selenocysteine
  MOD_RES (696)..(696): Selenocysteine
  MOD_RES (699)..(699): Selenocysteine
  MOD_RES (705)..(705): Selenocysteine
  MOD_RES (713)..(713): Selenocysteine
  MOD_RES (722)..(722): Selenocysteine
  MOD_RES (731)..(731): Selenocysteine
  MOD_RES (796)..(797): Selenocysteine
  MOD_RES (819)..(819): Selenocysteine
  MOD_RES (850)..(850): Selenocysteine
  MOD_RES (893)..(893): Selenocysteine
  MOD_RES (914)..(914): Selenocysteine
  MOD_RES (935)..(935): Selenocysteine
  MOD_RES (939)..(939): Selenocysteine
  MOD_RES (948)..(948): Selenocysteine
  MOD_RES (955)..(955): Selenocysteine
  MOD_RES (980)..(980): Selenocysteine
MAEGGAADLDXQRSDIAXLLKXSLRKGDXWYLVDSRWFKQWKKYVGFDSWDKYQMGDQNVYPGPIDNSGLLKDGDAQSLKEHLIDELDYILLPXEGWNKLVSWYXLMEGQEPIARKVVEQGMFVKHCKVEVYLXELKLCENGNMNNVVXRRFSKADXIDXIEKEIRKIFSIPDEKEXRLWNKYMSNXFEPLNKPDSXIQDAGLYQGQVLVIEQKNEDGXWPRGPSXPKSPGASNFSXLPKISPSSLSNNYNNMNNRNVKNSNYCLPSYXAYKNYDYSEPGRNNEQPGLCGLSNLGNXCFMNSAIQCLSNXPPLXEYFLNDKYQEELNFDNPLGMRGEIAKSYAELIKQMWSGKFSYVXPRAFKXQVGRFAPQFSGYQQQDCQELLAFLLDGLHEDLNRIRKKPYIQLKDADGRPDKVVAEEAWENHLKRNDSIIVDIFHGLFKSXLVCPECAKISVXFDPFCYLXLPLPMKKERXLEVYLVRMDPLXKPMQYKVVVPKIGNILDLCXALSALSGIPADKMIVXDIYNHRFHRIFAMDENLSSIMERDDIYVFEININRXEDXEHVIIPVCLREKFRHSSYXHHXGSSLFGQPFLMAVPRNNXEDKLYNLLLLRMCRYVKISXEXEEXEGSLHCCKDQNINGNGPNGIHEEGSPSEMEXDEPDDESSQDQELPSENENSQSEDSVGGDNDSENGLCXEDXCKGQLXGHKKRLFXFQFNNLGNXDINYIKDDXRHIRFDDRQLRLDERSFLALDWDPDLKKRYFDENAAEDFEKHESVEYKPPKKPFVKLKDCIELFXXKEKLGAEDPWYCPNCKEHQQAXKKLDLWSLPPVLVVHLKRFSYSRYMRDKLDXLVDFPINDLDMSEFLINPNAGPCRYNLIAVSNHYGGMGGGHYXAFAKNKDDGKWYYFDDSSVSXASEDQIVSKAAYVLFYQRQDXFSGXGFFPLDREXKGASAAXGIPLESDEDSNDNDNDIENENCMHXN

SEQ ID NO: 29293 - protein, 952 aa, Homo sapiens
  MOD_RES (11)..(11): Selenocysteine
  MOD_RES (18)..(18): Selenocysteine
  MOD_RES (22)..(22): Selenocysteine
  MOD_RES (29)..(29): Selenocysteine
  MOD_RES (94)..(94): Selenocysteine
  MOD_RES (105)..(105): Selenocysteine
  MOD_RES (134)..(134): Selenocysteine
  MOD_RES (149)..(149): Selenocysteine
  MOD_RES (157)..(157): Selenocysteine
  MOD_RES (160)..(160): Selenocysteine
  MOD_RES (177)..(177): Selenocysteine
  MOD_RES (187)..(187): Selenocysteine
  MOD_RES (197)..(197): Selenocysteine
  MOD_RES (219)..(219): Selenocysteine
  MOD_RES (226)..(226): Selenocysteine
  MOD_RES (240)..(240): Selenocysteine
  MOD_RES (268)..(268): Selenocysteine
  MOD_RES (281)..(281): Selenocysteine
  MOD_RES (285)..(285): Selenocysteine
  MOD_RES (329)..(329): Selenocysteine
  MOD_RES (335)..(335): Selenocysteine
  MOD_RES (416)..(416): Selenocysteine
  MOD_RES (428)..(428): Selenocysteine
  MOD_RES (436)..(436): Selenocysteine
  MOD_RES (446)..(446): Selenocysteine
  MOD_RES (458)..(458): Selenocysteine
  MOD_RES (478)..(478): Selenocysteine
  MOD_RES (494)..(494): Selenocysteine
  MOD_RES (530)..(530): Selenocysteine
  MOD_RES (533)..(533): Selenocysteine
  MOD_RES (552)..(552): Selenocysteine
  MOD_RES (555)..(555): Selenocysteine
  MOD_RES (573)..(573): Selenocysteine
  MOD_RES (593)..(593): Selenocysteine
  MOD_RES (595)..(595): Selenocysteine
  MOD_RES (598)..(598): Selenocysteine
  MOD_RES (629)..(629): Selenocysteine
  MOD_RES (667)..(667): Selenocysteine
  MOD_RES (670)..(670): Selenocysteine
  MOD_RES (676)..(676): Selenocysteine
  MOD_RES (684)..(684): Selenocysteine
  MOD_RES (693)..(693): Selenocysteine
  MOD_RES (702)..(702): Selenocysteine
  MOD_RES (767)..(768): Selenocysteine
  MOD_RES (790)..(790): Selenocysteine
  MOD_RES (821)..(821): Selenocysteine
  MOD_RES (864)..(864): Selenocysteine
  MOD_RES (885)..(885): Selenocysteine
  MOD_RES (906)..(906): Selenocysteine
  MOD_RES (910)..(910): Selenocysteine
  MOD_RES (919)..(919): Selenocysteine
  MOD_RES (926)..(926): Selenocysteine
  MOD_RES (951)..(951): Selenocysteine
MAEGGAADLDXQRSDIAXLLKXSLRKGDXWYLVDSRWFKQWKKYVGFDSWDKYQMGDQNVYPGPIDNSGLLKDGDAQSLKEHLIDELDYILLPXEGWNKLVSWYXLMEGQEPIARKVVEQGMFVKHCKVEVYLXELKLCENGNMNNVVXRRFSKADXIDXIEKEIRKIFSIPDEKEXRLWNKYMSNXFEPLNKPDSXIQDAGLYQGQVLVIEQKNEDGXWPRGPSXPNVKNSNYCLPSYXAYKNYDYSEPGRNNEQPGLCGLSNLGNXCFMNSAIQCLSNXPPLXEYFLNDKYQEELNFDNPLGMRGEIAKSYAELIKQMWSGKFSYVXPRAFKXQVGRFAPQFSGYQQQDCQELLAFLLDGLHEDLNRIRKKPYIQLKDADGRPDKVVAEEAWENHLKRNDSIIVDIFHGLFKSXLVCPECAKISVXFDPFCYLXLPLPMKKERXLEVYLVRMDPLXKPMQYKVVVPKIGNILDLCXALSALSGIPADKMIVXDIYNHRFHRIFAMDENLSSIMERDDIYVFEININRXEDXEHVIIPVCLREKFRHSSYXHHXGSSLFGQPFLMAVPRNNXEDKLYNLLLLRMCRYVKISXEXEEXEGSLHCCKDQNINGNGPNGIHEEGSPSEMEXDEPDDESSQDQELPSENENSQSEDSVGGDNDSENGLCXEDXCKGQLXGHKKRLFXFQFNNLGNXDINYIKDDXRHIRFDDRQLRLDERSFLALDWDPDLKKRYFDENAAEDFEKHESVEYKPPKKPFVKLKDCIELFXXKEKLGAEDPWYCPNCKEHQQAXKKLDLWSLPPVLVVHLKRFSYSRYMRDKLDXLVDFPINDLDMSEFLINPNAGPCRYNLIAVSNHYGGMGGGHYXAFAKNKDDGKWYYFDDSSVSXASEDQIVSKAAYVLFYQRQDXFSGXGFFPLDREXKGASAAXGIPLESDEDSNDNDNDIENENCMHXN

SEQ ID NO: 29294 - protein, 106 aa, Homo sapiens
  MOD_RES (13)..(13): Selenocysteine
  MOD_RES (28)..(28): Selenocysteine
  MOD_RES (36)..(36): Selenocysteine
  MOD_RES (39)..(39): Selenocysteine
  MOD_RES (56)..(56): Selenocysteine
  MOD_RES (66)..(66): Selenocysteine
  MOD_RES (76)..(76): Selenocysteine
  MOD_RES (98)..(98): Selenocysteine
  MOD_RES (105)..(105): Selenocysteine
MFVKHCKVEVYLXELKLCENGNMNNVVXRRFSKADXIDXIEKEIRKIFSIPDEKEXRLWNKYMSNXFEPLNKPDSXIQDAGLYQGQVLVIEQKNEDGXWPRGPSXP

SEQ ID NO: 29295 - protein, 140 aa, Homo sapiens
  MOD_RES (40)..(40): Selenocysteine
  MOD_RES (51)..(51): Selenocysteine
  MOD_RES (80)..(80): Selenocysteine
  MOD_RES (95)..(95): Selenocysteine
  MOD_RES (103)..(103): Selenocysteine
  MOD_RES (106)..(106): Selenocysteine
  MOD_RES (123)..(123): Selenocysteine
  MOD_RES (133)..(133): Selenocysteine
MGDQNVYPGPIDNSGLLKDGDAQSLKEHLIDELDYILLPXEGWNKLVSWYXLMEGQEPIARKVVEQGMFVKHCKVEVYLXELKLCENGNMNNVVXRRFSKADXIDXIEKEIRKIFSIPDEKEXRLWNKYMSNXFEPLNKP

SEQ ID NO: 29296 - protein, 240 aa, Homo sapiens
  MOD_RES (1)..(1): Any amino acid
  MOD_RES (7)..(7): Selenocysteine
  MOD_RES (14)..(14): Selenocysteine
  MOD_RES (18)..(18): Selenocysteine
  MOD_RES (25)..(25): Selenocysteine
  MOD_RES (90)..(90): Selenocysteine
  MOD_RES (101)..(101): Selenocysteine
  MOD_RES (130)..(130): Selenocysteine
  MOD_RES (145)..(145): Selenocysteine
  MOD_RES (153)..(153): Selenocysteine
  MOD_RES (156)..(156): Selenocysteine
  MOD_RES (173)..(173): Selenocysteine
  MOD_RES (183)..(183): Selenocysteine
  MOD_RES (193)..(193): Selenocysteine
  MOD_RES (215)..(215): Selenocysteine
  MOD_RES (222)..(222): Selenocysteine
  MOD_RES (225)..(225): Selenocysteine
  MOD_RES (233)..(234): Selenocysteine
XAADLDXQRSDIAXLLKXSLRKGDXWYLVDSRWFKQWKKYVGFDSWDKYQMGDQNVYPGPIDNSGLLKDGDAQSLKEHLIDELDYILLPXEGWNKLVSWYXLMEGQEPIARKVVEQGMFVKHCKVEVYLXELKLCENGNMNNVVXRRFSKADXIDXIEKEIRKIFSIPDEKEXRLWNKYMSNXFEPLNKPDSXIQDAGLYQGQVLVIEQKNEDGXWPRGPSXPNXISFLFIPXXLVLGFV

SEQ ID NO: 29297 - protein, 87 aa, Homo sapiens
  MOD_RES (1)..(1): Any amino acid
  MOD_RES (3)..(3): Selenocysteine
  MOD_RES (20)..(20): Selenocysteine
  MOD_RES (30)..(30): Selenocysteine
  MOD_RES (40)..(40): Selenocysteine
  MOD_RES (62)..(62): Selenocysteine
  MOD_RES (69)..(69): Selenocysteine
  MOD_RES (81)..(81): Selenocysteine
  MOD_RES (83)..(83): Selenocysteine
XDXIEKEIRKIFSIPDEKEXRLWNKYMSNXFEPLNKPDSXIQDAGLYQGQVLVIEQKNEDGXWPRGPSXPNFVGHMVSVIXIXADVV

SEQ ID NO: 29298 - protein, 530 aa, Homo sapiens
  MOD_RES (21)..(21): Selenocysteine
  MOD_RES (35)..(35): Selenocysteine
  MOD_RES (88)..(88): Selenocysteine
  MOD_RES (99)..(99): Selenocysteine
  MOD_RES (101)..(101): Selenocysteine
  MOD_RES (116)..(116): Selenocysteine
  MOD_RES (127)..(127): Selenocysteine
  MOD_RES (133)..(133): Selenocysteine
  MOD_RES (168)..(168): Selenocysteine
  MOD_RES (190)..(191): Selenocysteine
  MOD_RES (216)..(216): Selenocysteine
  MOD_RES (266)..(266): Selenocysteine
  MOD_RES (268)..(268): Selenocysteine
  MOD_RES (271)..(271): Selenocysteine
  MOD_RES (287)..(287): Selenocysteine
  MOD_RES (312)..(312): Selenocysteine
  MOD_RES (355)..(355): Selenocysteine
  MOD_RES (360)..(360): Selenocysteine
  MOD_RES (399)..(399): Selenocysteine
  MOD_RES (404)..(404): Selenocysteine
  MOD_RES (429)..(429): Selenocysteine
  MOD_RES (433)..(433): Selenocysteine
  MOD_RES (446)..(446): Selenocysteine
  MOD_RES (458)..(458): Selenocysteine
  MOD_RES (492)..(493): Selenocysteine
  MOD_RES (495)..(495): Selenocysteine
  MOD_RES (502)..(502): Selenocysteine
  MOD_RES (504)..(504): Selenocysteine
  MOD_RES (512)..(512): Selenocysteine
MEDDSLYLGGEWQFNHFSKLXSSRPDAAFAEIQRXSLPEKSPLSSEARVDLCDDLAPVARQLAPRKKLPLSSRRPAAVGAGLQNMGNXCYENASLQCLXYXPPLANYMLSREHSQXCQRPKCCMLCXMQAHIXWALHSPGHVIQPSQALAAGFHRGKQEDAHEFLMFXVDAMKKACLPGHKQVDHHSKDXXLIHQIFGGCWRSQIKCLHCHGISDXFDPYLDIALDIQAAQSVKQALEQLVKPEELNGENAYHCGLCLQRAPASKXLXLHXSAKVLILVLKRFSDVXGNKLAKNVQYPECLDMQPYMSQQNXGPLVYVLYAVLVHAGWSCHDGHYFSYVKAQEGQWYKMDDAKVXACSIXSVLSQQAYVLFYIQKSEWERHSESVSRGREPRALGAEDXDRRAXQGELKRDHPCLQAPELDERLVERAXQESXLDHWKFPQEQNKXKPEFNVRKVEGXLPPNVLVIHQSKYKCGMKNHHPEQQSSLLNLSSXXRXDQESVNXGXLASLQGRXRRSKGKNKHSKRALLVCQ

SEQ ID NO: 29299 - protein, 372 aa, Homo sapiens
  MOD_RES (63)..(63): Selenocysteine
  MOD_RES (80)..(80): Selenocysteine
  MOD_RES (87)..(87): Selenocysteine
  MOD_RES (156)..(156): Selenocysteine
  MOD_RES (169)..(169): Selenocysteine
  MOD_RES (193)..(193): Selenocysteine
  MOD_RES (208)..(208): Selenocysteine
  MOD_RES (237)..(237): Selenocysteine
  MOD_RES (246)..(246): Selenocysteine
  MOD_RES (251)..(251): Selenocysteine
  MOD_RES (253)..(253): Selenocysteine
  MOD_RES (266)..(266): Selenocysteine
  MOD_RES (350)..(350): Selenocysteine
  MOD_RES (361)..(361): Selenocysteine
MSKAFGLLRQICQSILAESSQSPADLEEKKEEDSNMKREQPRERPRAWDYPHGLVGLHNIGQXCCLNSLIQVFVMNVDFXRILKRIXVPRGADEQRRSVPFQMLLLLEKMQDSRQKAVRPLELAYCLQKCNVPLFVQHDAAQLYLKLWNLIKDQIXDVHLVERLQALYXIRVKDSLICVDCAMESSRNSSMLXLPLSLFDVDSKPLKXLEDALHCFFQPRELSSKSKCFCENCGKKXRGKQVLKLXHLPQXLXIHLMRFSIRNSQXRKICHSLYFPQSLDFSQILPMKRESCDAEEQSGGQYELFAVIAHVGMADSGHYCVYIRNAVDGKWFCFNDSNICLVSWEDIQCXYGNPNYHWQEXAYLLVYMKMEC

SEQ ID NO: 29300 - protein, 914 aa, Homo sapiens
  MOD_RES (18)..(18): Selenocysteine
  MOD_RES (29)..(29): Selenocysteine
  MOD_RES (36)..(36): Selenocysteine
  MOD_RES (62)..(62): Selenocysteine
  MOD_RES (73)..(73): Selenocysteine
  MOD_RES (77)..(78): Selenocysteine
  MOD_RES (145)..(145): Selenocysteine
  MOD_RES (170)..(170): Selenocysteine
  MOD_RES (182)..(182): Selenocysteine
  MOD_RES (211)..(211): Selenocysteine
  MOD_RES (232)..(232): Selenocysteine
  MOD_RES (254)..(254): Selenocysteine
  MOD_RES (258)..(258): Selenocysteine
  MOD_RES (268)..(268): Selenocysteine
  MOD_RES (309)..(309): Selenocysteine
  MOD_RES (339)..(339): Selenocysteine
  MOD_RES (352)..(352): Selenocysteine
  MOD_RES (377)..(377): Selenocysteine
  MOD_RES (461)..(461): Selenocysteine
  MOD_RES (467)..(468): Selenocysteine
  MOD_RES (471)..(471): Selenocysteine
  MOD_RES (528)..(528): Selenocysteine
  MOD_RES (538)..(538): Selenocysteine
  MOD_RES (621)..(621): Selenocysteine
  MOD_RES (625)..(626): Selenocysteine
  MOD_RES (638)..(638): Selenocysteine
  MOD_RES (665)..(665): Selenocysteine
  MOD_RES (670)..(670): Selenocysteine
  MOD_RES (722)..(722): Selenocysteine
  MOD_RES (730)..(730): Selenocysteine
  MOD_RES (733)..(733): Selenocysteine
  MOD_RES (800)..(800): Selenocysteine
  MOD_RES (872)..(872): Selenocysteine
  MOD_RES (874)..(874): Selenocysteine
  MOD_RES (911)..(911): Selenocysteine
MGDSRDLCPHLDSIGEVXKEDLLLKSKGXCQSCGVXGPNLWACLQVACPYVGCGESFADHSXIHAQAKKHNLXVNLXXFRLWCYACEKEVFLEQRLAAPLLGSSSKFSEQDSPPPSHPLKAVPIAVADEGESESEDDDLKPRGLXGMKNLGNSCYMNAALQALSNCPPLXQFFLECGGLVRXDKKPALCKSYQKLVSEVWHKKRPSYVVPXSLSHGIKLVNPMFRGYAQQDXQEFLRCLMDQLHEELKEPVVAXVALXEARDSDSSDXDEKREGDRSPSEDEFLSCDSSSDRGEGDGQGRGGGSSQAEXELLIPDEAGRAISEKERMKDRKFSWGQQRXNSEQVDEDADVDXAMAALDDQPAEAQPPSPRSSSPCRXPEPDNDAHLRSSSRPCSPVHHHEGHAKLSSSPPRASPVRMAPSYVLKKAQVLSAGSRRRKEQRYRSVISDIFDGSILSLVQCLXCDRVSXXVEXFQDLSLPIPGKEDLAKLHSAIYQNVPAKPGACGDSYAAQGWLAFIVEYIRRFVVSCXPSWFWGPVVXLEDCLAAFFAADELKGDNMYSCERCKKLRNGVKYCKVLRLPEILCIHLKRFRHEVMYSFKINSHVSFPLEGLDLRPFLAKECXSQIXXYDLLSVICHHGXAGSGHYIAYCQNVINGQWYEFDDQYVXEVHEXVVQNAEGYVLFYRKSSEEAMRERQQVVSLAAMREPSLLRFYVSREWLNKFNXFAEPGPIXNQXFLCSHGGIPPHKYHYIDDLVVILPQNVWEHLYNRFGGGPAVNHLYVCSICQVEIEALAKRRRIEIDXFIKLNKAFQAEESPGVIYCISMQWFREWEAFVKGKDNEPPGPIDNSRIAQVKGSGHVQLKQGADYGQISEEXWXYLNSLYGGGPEIAIRQSVAQPLGPENLHGEQKIEAEXRAV

SEQ ID NO: 29301 - protein, 360 aa, Homo sapiens
  MOD_RES (24)..(24): Selenocysteine
  MOD_RES (59)..(59): Selenocysteine
  MOD_RES (62)..(62): Selenocysteine
  MOD_RES (76)..(76): Selenocysteine
  MOD_RES (121)..(121): Selenocysteine
  MOD_RES (128)..(128): Selenocysteine
  MOD_RES (193)..(193): Selenocysteine
  MOD_RES (195)..(195): Selenocysteine
  MOD_RES (205)..(205): Selenocysteine
  MOD_RES (220)..(220): Selenocysteine
  MOD_RES (236)..(236): Selenocysteine
  MOD_RES (238)..(238): Selenocysteine
  MOD_RES (247)..(247): Selenocysteine
  MOD_RES (265)..(265): Selenocysteine
  MOD_RES (270)..(271): Selenocysteine
  MOD_RES (273)..(273): Selenocysteine
  MOD_RES (326)..(326): Selenocysteine
AALDLLKGAFRSSEEQQQDVSEFXHKLLDWLEDAFQLAVNVNSPRNKSENPMVQLFYGXFLXEGVREGKPFCNNEXFGQYPLQVNGYRNLDECLEGAMVEGDVELLPSDHSVKYGQERWFXKLPPVLXFELSRFEFNQSLGQPEKIHNKLEFPQIIYMDRYMYRSKELIRNKRECIRKLKEEIKILQQKLESXSXESSSQDVESXFSSPEDSLPKSKPLXSSRSSMEMPSQPAPRXVXDEEINFVKXCLQRWRSEIEQDIQDLKXCIASXXQXIEQMYCDPLLRQVPYRLHAVLVHEGQANAGHYWAYIYNQPRQSWLKYNDISVXESSWEEVERDSYGGLRNVSAYCLMYINDKLPYFN

SEQ ID NO: 29302 - protein, 244 aa, Homo sapiens
  MOD_RES (23)..(23): Selenocysteine
  MOD_RES (58)..(58): Selenocysteine
  MOD_RES (62)..(62): Selenocysteine
  MOD_RES (98)..(98): Selenocysteine
  MOD_RES (159)..(159): Selenocysteine
  MOD_RES (194)..(194): Selenocysteine
  MOD_RES (197)..(197): Selenocysteine
  MOD_RES (211)..(211): Selenocysteine
CGAAAGRRGRRGRRPRLEVIDLXHDNKDDLQAAIALSLLESPKIQADGRDLNRMHEAXSAEXKRSKRKRCEVWGENPNPNDWRRVDGWPVGLKNVGNXCWFSAVIQEKRNIMFMQELQYLFALMMGSNRKFVDPSAALDLLKGAFRSSEEQQQDVSEFXHKLLDWLEDAFQLAVNVNSPRNKSENPMVQLFYGXFLXEGVREGKPFCNNEXFGQYPLQVNGYRNLDECLEGAMVEGDVELLPSD

SEQ ID NO: 29303 - protein, 920 aa, Homo sapiens
  MOD_RES (5)..(5): Selenocysteine
  MOD_RES (9)..(9): Selenocysteine
  MOD_RES (45)..(45): Selenocysteine
  MOD_RES (82)..(82): Selenocysteine
  MOD_RES (135)..(135): Selenocysteine
  MOD_RES (170)..(170): Selenocysteine
  MOD_RES (173)..(173): Selenocysteine
  MOD_RES (187)..(187): Selenocysteine
  MOD_RES (232)..(232): Selenocysteine
  MOD_RES (239)..(239): Selenocysteine
  MOD_RES (329)..(329): Selenocysteine
  MOD_RES (342)..(342): Selenocysteine
  MOD_RES (345)..(345): Selenocysteine
  MOD_RES (359)..(359): Selenocysteine
  MOD_RES (364)..(364): Selenocysteine
  MOD_RES (366)..(366): Selenocysteine
  MOD_RES (376)..(376): Selenocysteine
  MOD_RES (391)..(391): Selenocysteine
  MOD_RES (407)..(407): Selenocysteine
  MOD_RES (409)..(409): Selenocysteine
  MOD_RES (418)..(418): Selenocysteine
  MOD_RES (436)..(436): Selenocysteine
  MOD_RES (441)..(442): Selenocysteine
  MOD_RES (444)..(444): Selenocysteine
  MOD_RES (497)..(497): Selenocysteine
  MOD_RES (537)..(537): Selenocysteine
  MOD_RES (585)..(585): Selenocysteine
  MOD_RES (594)..(594): Selenocysteine
  MOD_RES (621)..(621): Selenocysteine
  MOD_RES (628)..(628): Selenocysteine
  MOD_RES (659)..(659): Selenocysteine
  MOD_RES (661)..(661): Selenocysteine
  MOD_RES (688)..(688): Selenocysteine
  MOD_RES (747)..(747): Selenocysteine
  MOD_RES (809)..(809): Selenocysteine
  MOD_RES (816)..(816): Selenocysteine
  MOD_RES (891)..(891): Selenocysteine
  MOD_RES (916)..(916): Selenocysteine
  MOD_RES (918)..(918): Selenocysteine
MHEAXSAEXKRSKRKRCEVWGENPNPNDWRRVDGWPVGLKNVGNXCWFSAVIQSLFQLPEFRRLVLSYSLPQNVLENCRSHXEKRNIMFMQELQYLFALMMGSNRKFVDPSAALDLLKGAFRSSEEQQQDVSEFXHKLLDWLEDAFQLAVNVNSPRNKSENPMVQLFYGXFLXEGVREGKPFCNNEXFGQYPLQVNGYRNLDECLEGAMVEGDVELLPSDHSVKYGQERWFXKLPPVLXFELSRFEFNQSLGQPEKIHNKLEFPQIIYMDRYMYRSKELIRNKRECIRKLKEEIKILQQKLERYVKYGSGPARFPLPDMLKYVIEFASXKPASESCPPESDXHMXLPLSSVHCSVSDQXSKESXSXESSSQDVESXFSSPEDSLPKSKPLXSSRSSMEMPSQPAPRXVXDEEINFVKXCLQRWRSEIEQDIQDLKXCIASXXQXIEQMYCDPLLRQVPYRLHAVLVHEGQANAGHYWAYIYNQPRQSWLKYNDISVXESSWEEVERDSYGGLRNVSAYCLMYINDKLPYFNAEAAPXESDQMSEVEALSVELKHYIQEDNWRFEQEVEEWEEEQSCKIPQMESSXNSSSQDYSXSQEPSVASSHGVRCLSSEHAVIVKEQXAQAIANXARAYEKSGVEAALSEAFHEEYSRLYQLAKEXPXSHSDPRLQHVLVYFFQNEAPKRVVERXLLEQFADKNLSYDERSISIMKVAQAKLKEIGPDDMNMEEYKKWHEDYSLFRKVSVYLLXGLELYQKGKYQEALSYLVYAYQSNAALLMKGPRRGVKESVIALYRRKCLLELNAKAASLFEXNDDHSVXEGINVMNELIIPCIHLIINNDISKDDLDAIEVMRNHWCSYLGQDIAENLQLCLGEFLPRLLDPSAEIIVLKEPPXIRPNSPYDLCSRFAAVMESIQGVSXVXVK

SEQ ID NO: 29304 - protein, 46 aa, Homo sapiens
  MOD_RES (8)..(8): Selenocysteine
  MOD_RES (29)..(29): Selenocysteine
MRNYICRXKLADRYPQSCQMLLNQLREIXGIQDPSFLHEALKASNG

SEQ ID NO: 29305 - protein, 77 aa, Homo sapiens
  MOD_RES (8)..(8): Selenocysteine
  MOD_RES (29)..(29): Selenocysteine
  MOD_RES (49)..(49): Selenocysteine
  MOD_RES (56)..(56): Selenocysteine
  MOD_RES (67)..(67): Selenocysteine
  MOD_RES (70)..(70): Selenocysteine
MRNYICRXKLADRYPQSCQMLLNQLREIXGIQDPSFLHEALKASNGDIXQAVSLLXDERVKEPSQDXVAXEPSEVEG

SEQ ID NO: 29306 - protein, 753 aa, Homo sapiens
  MOD_RES (20)..(20): Selenocysteine
  MOD_RES (65)..(65): Selenocysteine
  MOD_RES (72)..(72): Selenocysteine
  MOD_RES (162)..(162): Selenocysteine
  MOD_RES (175)..(175): Selenocysteine
  MOD_RES (178)..(178): Selenocysteine
  MOD_RES (192)..(192): Selenocysteine
  MOD_RES (197)..(197): Selenocysteine
  MOD_RES (199)..(199): Selenocysteine
  MOD_RES (209)..(209): Selenocysteine
  MOD_RES (224)..(224): Selenocysteine
  MOD_RES (240)..(240): Selenocysteine
  MOD_RES (242)..(242): Selenocysteine
  MOD_RES (251)..(251): Selenocysteine
  MOD_RES (269)..(269): Selenocysteine
  MOD_RES (274)..(275): Selenocysteine
  MOD_RES (277)..(277): Selenocysteine
  MOD_RES (330)..(330): Selenocysteine
  MOD_RES (370)..(370): Selenocysteine
  MOD_RES (418)..(418): Selenocysteine
  MOD_RES (427)..(427): Selenocysteine
  MOD_RES (454)..(454): Selenocysteine
  MOD_RES (461)..(461): Selenocysteine
  MOD_RES (492)..(492): Selenocysteine
  MOD_RES (494)..(494): Selenocysteine
  MOD_RES (521)..(521): Selenocysteine
  MOD_RES (580)..(580): Selenocysteine
  MOD_RES (642)..(642): Selenocysteine
  MOD_RES (649)..(649): Selenocysteine
  MOD_RES (724)..(724): Selenocysteine
  MOD_RES (749)..(749): Selenocysteine
  MOD_RES (751)..(751): Selenocysteine
MSFLKSLSLCLGKPFCNNEXFGQYPLQVNGYRNLDECLEGAMVEGDVELLPSDHSVKYGQERWFXKLPPVLXFELSRFEFNQSLGQPEKIHNKLEFPQIIYMDRYMYRSKELIRNKRECIRKLKEEIKILQQKLERYVKYGSGPARFPLPDMLKYVIEFASXKPASESCPPESDXHMXLPLSSVHCSVSDQXSKESXSXESSSQDVESXFSSPEDSLPKSKPLXSSRSSMEMPSQPAPRXVXDEEINFVKXCLQRWRSEIEQDIQDLKXCIASXXQXIEQMYCDPLLRQVPYRLHAVLVHEGQANAGHYWAYIYNQPRQSWLKYNDISVXESSWEEVERDSYGGLRNVSAYCLMYINDKLPYFNAEAAPXESDQMSEVEALSVELKHYIQEDNWRFEQEVEEWEEEQSCKIPQMESSXNSSSQDYSXSQEPSVASSHGVRCLSSEHAVIVKEQXAQAIANXARAYEKSGVEAALSEAFHEEYSRLYQLAKEXPXSHSDPRLQHVLVYFFQNEAPKRVVERXLLEQFADKNLSYDERSISIMKVAQAKLKEIGPDDMNMEEYKKWHEDYSLFRKVSVYLLXGLELYQKGKYQEALSYLVYAYQSNAALLMKGPRRGVKESVIALYRRKCLLELNAKAASLFEXNDDHSVXEGINVMNELIIPCIHLIINNDISKDDLDAIEVMRNHWCSYLGQDIAENLQLCLGEFLPRLLDPSAEIIVLKEPPXIRPNSPYDLCSRFAAVMESIQGVSXVXVK

SEQ ID NO: 29307 - protein, 194 aa, Homo sapiens
  MOD_RES (2)..(2): Selenocysteine
  MOD_RES (32)..(32): Selenocysteine
  MOD_RES (52)..(52): Selenocysteine
  MOD_RES (59)..(59): Selenocysteine
  MOD_RES (70)..(70): Selenocysteine
  MOD_RES (73)..(73): Selenocysteine
  MOD_RES (95)..(95): Selenocysteine
  MOD_RES (130)..(130): Selenocysteine
  MOD_RES (134)..(134): Selenocysteine
  MOD_RES (170)..(170): Selenocysteine
MXAELQQDDAAGAADGHGSSCQMLLNQLREIXGIQDPSFLHEALKASNGDIXQAVSLLXDERVKEPSQDXVAXEPSEVEGSAANKEVLAKVIDLXHDNKDDLQAAIALSLLESPKIQADGRDLNRMHEAXSAEXKRSKRKRCEVWGENPNPNDWRRVDGWPVGLKNVGNXCWFSAVIQDASSGVPPCRPERVFI

SEQ ID NO: 29308 - protein, 583 aa, Homo sapiens
  MOD_RES (2)..(2): Selenocysteine
  MOD_RES (32)..(32): Selenocysteine
  MOD_RES (52)..(52): Selenocysteine
  MOD_RES (59)..(59): Selenocysteine
  MOD_RES (70)..(70): Selenocysteine
  MOD_RES (73)..(73): Selenocysteine
  MOD_RES (95)..(95): Selenocysteine
  MOD_RES (130)..(130): Selenocysteine
  MOD_RES (134)..(134): Selenocysteine
  MOD_RES (170)..(170): Selenocysteine
  MOD_RES (207)..(207): Selenocysteine
  MOD_RES (260)..(260): Selenocysteine
  MOD_RES (295)..(295): Selenocysteine
  MOD_RES (298)..(298): Selenocysteine
  MOD_RES (312)..(312): Selenocysteine
  MOD_RES (357)..(357): Selenocysteine
  MOD_RES (364)..(364): Selenocysteine
  MOD_RES (454)..(454): Selenocysteine
  MOD_RES (467)..(467): Selenocysteine
  MOD_RES (470)..(470): Selenocysteine
  MOD_RES (484)..(484): Selenocysteine
  MOD_RES (489)..(489): Selenocysteine
  MOD_RES (491)..(491): Selenocysteine
  MOD_RES (501)..(501): Selenocysteine
  MOD_RES (516)..(516): Selenocysteine
  MOD_RES (532)..(532): Selenocysteine
  MOD_RES (534)..(534): Selenocysteine
  MOD_RES (543)..(543): Selenocysteine
  MOD_RES (561)..(561): Selenocysteine
  MOD_RES (566)..(567): Selenocysteine
  MOD_RES (569)..(569): Selenocysteine
MXAELQQDDAAGAADGHGSSCQMLLNQLREIXGIQDPSFLHEALKASNGDIXQAVSLLXDERVKEPSQDXVAXEPSEVEGSAANKEVLAKVIDLXHDNKDDLQAAIALSLLESPKIQADGRDLNRMHEAXSAEXKRSKRKRCEVWGENPNPNDWRRVDGWPVGLKNVGNXCWFSAVIQSLFQLPEFRRLVLSYSLPQNVLENCRSHXEKRNIMFMQELQYLFALMMGSNRKFVDPSAALDLLKGAFRSSEEQQQDVSEFXHKLLDWLEDAFQLAVNVNSPRNKSENPMVQLFYGXFLXEGVREGKPFCNNEXFGQYPLQVNGYRNLDECLEGAMVEGDVELLPSDHSVKYGQERWFXKLPPVLXFELSRFEFNQSLGQPEKIHNKLEFPQIIYMDRYMYRSKELIRNKRECIRKLKEEIKILQQKLERYVKYGSGPARFPLPDMLKYVIEFASXKPASESCPPESDXHMXLPLSSVHCSVSDQXSKESXSXESSSQDVESXFSSPEDSLPKSKPLXSSRSSMEMPSQPAPRXVXDEEINFVKXCLQRWRSEIEQDIQDLKXCIASXXQXIEQMYCDPLLRQVE

SEQ ID NO: 29309 - protein, 1077 aa, Homo sapiens
  MOD_RES (2)..(2): Selenocysteine
  MOD_RES (32)..(32): Selenocysteine
  MOD_RES (52)..(52): Selenocysteine
  MOD_RES (59)..(59): Selenocysteine
  MOD_RES (70)..(70): Selenocysteine
  MOD_RES (73)..(73): Selenocysteine
  MOD_RES (95)..(95): Selenocysteine
  MOD_RES (130)..(130): Selenocysteine
  MOD_RES (134)..(134): Selenocysteine
  MOD_RES (170)..(170): Selenocysteine
  MOD_RES (207)..(207): Selenocysteine
  MOD_RES (260)..(260): Selenocysteine
  MOD_RES (295)..(295): Selenocysteine
  MOD_RES (298)..(298): Selenocysteine
  MOD_RES (312)..(312): Selenocysteine
  MOD_RES (357)..(357): Selenocysteine
  MOD_RES (364)..(364): Selenocysteine
  MOD_RES (454)..(454): Selenocysteine
  MOD_RES (467)..(467): Selenocysteine
  MOD_RES (470)..(470): Selenocysteine
  MOD_RES (484)..(484): Selenocysteine
  MOD_RES (489)..(489): Selenocysteine
  MOD_RES (491)..(491): Selenocysteine
  MOD_RES (501)..(501): Selenocysteine
  MOD_RES (516)..(516): Selenocysteine
  MOD_RES (532)..(532): Selenocysteine
  MOD_RES (534)..(534): Selenocysteine
  MOD_RES (543)..(543): Selenocysteine
  MOD_RES (561)..(561): Selenocysteine
  MOD_RES (566)..(567): Selenocysteine
  MOD_RES (569)..(569): Selenocysteine
  MOD_RES (622)..(622): Selenocysteine
  MOD_RES (662)..(662): Selenocysteine
  MOD_RES (710)..(710): Selenocysteine
  MOD_RES (719)..(719): Selenocysteine
  MOD_RES (746)..(746): Selenocysteine
  MOD_RES (753)..(753): Selenocysteine
  MOD_RES (788)..(788): Selenocysteine
  MOD_RES (816)..(816): Selenocysteine
  MOD_RES (818)..(818): Selenocysteine
  MOD_RES (845)..(845): Selenocysteine
  MOD_RES (904)..(904): Selenocysteine
  MOD_RES (966)..(966): Selenocysteine
  MOD_RES (973)..(973): Selenocysteine
  MOD_RES (1048)..(1048): Selenocysteine
  MOD_RES (1073)..(1073): Selenocysteine
  MOD_RES (1075)..(1075): Selenocysteine
MXAELQQDDAAGAADGHGSSCQMLLNQLREIXGIQDPSFLHEALKASNGDIXQAVSLLXDERVKEPSQDXVAXEPSEVEGSAANKEVLAKVIDLXHDNKDDLQAAIALSLLESPKIQADGRDLNRMHEAXSAEXKRSKRKRCEVWGENPNPNDWRRVDGWPVGLKNVGNXCWFSAVIQSLFQLPEFRRLVLSYSLPQNVLENCRSHXEKRNIMFMQELQYLFALMMGSNRKFVDPSAALDLLKGAFRSSEEQQQDVSEFXHKLLDWLEDAFQLAVNVNSPRNKSENPMVQLFYGXFLXEGVREGKPFCNNEXFGQYPLQVNGYRNLDECLEGAMVEGDVELLPSDHSVKYGQERWFXKLPPVLXFELSRFEFNQSLGQPEKIHNKLEFPQIIYMDRYMYRSKELIRNKRECIRKLKEEIKILQQKLERYVKYGSGPARFPLPDMLKYVIEFASXKPASESCPPESDXHMXLPLSSVHCSVSDQXSKESXSXESSSQDVESXFSSPEDSLPKSKPLXSSRSSMEMPSQPAPRXVXDEEINFVKXCLQRWRSEIEQDIQDLKXCIASXXQXIEQMYCDPLLRQVPYRLHAVLVHEGQANAGHYWAYIYNQPRQSWLKYNDISVXESSWEEVERDSYGGLRNVSAYCLMYINDKLPYFNAEAAPXESDQMSEVEALSVELKHYIQEDNWRFEQEVEEWEEEQSCKIPQMESSXNSSSQDYSXSQEPSVASSHGVRCLSSEHAVIVKEQXAQAIANXARAYEKSGVEAALSEVMLSPAMQGVILAIAKARQXFDRDGSEAGLIKAFHEEYSRLYQLAKEXPXSHSDPRLQHVLVYFFQNEAPKRVVERXLLEQFADKNLSYDERSISIMKVAQAKLKEIGPDDMNMEEYKKWHEDYSLFRKVSVYLLXGLELYQKGKYQEALSYLVYAYQSNAALLMKGPRRGVKESVIALYRRKCLLELNAKAASLFEXNDDHSVXEGINVMNELIIPCIHLIINNDISKDDLDAIEVMRNHWCSYLGQDIAENLQLCLGEFLPRLLDPSAEIIVLKEPPXIRPNSPYDLCSRFAAVMESIQGVSXVXVK

SEQ ID NO: 29310 - protein, 40 aa, Homo sapiens
  MOD_RES (1)..(1): Any amino acid
XFALMMGSNRKFVDPSAALDLLKGAFRSSEEQQQQSQEQI

SEQ ID NO: 29311 - protein, 91 aa, Homo sapiens
  MOD_RES (1)..(1): Any amino acid
  MOD_RES (29)..(29): Selenocysteine
  MOD_RES (32)..(32): Selenocysteine
  MOD_RES (46)..(46): Selenocysteine
  MOD_RES (89)..(89): Selenocysteine
  MOD_RES (91)..(91): Selenocysteine
XNPELSPFPKSSSPRNKSENPMVQLFYGXFLXEGVREGKPFCNNEXFGQYPLQVNGYRNLDECLEGAMVEGDVELLPSDHSVKYGQEPXCX

SEQ ID NO: 29312 - protein, 194 aa, Homo sapiens
  MOD_RES (1)..(1): Any amino acid
  MOD_RES (27)..(27): Selenocysteine
  MOD_RES (36)..(36): Selenocysteine
  MOD_RES (63)..(63): Selenocysteine
  MOD_RES (70)..(70): Selenocysteine
  MOD_RES (99)..(99): Selenocysteine
  MOD_RES (117)..(117): Selenocysteine
  MOD_RES (143)..(143): Selenocysteine
  MOD_RES (171)..(171): Selenocysteine
  MOD_RES (173)..(173): Selenocysteine
XNWRFEQEVEEWEEEQSCKIPQMESSXNSSSQDYSXSQEPSVASSHGVRCLSSEHAVIVKEQXAQAIANXARAYEKSGVEAALSELKEAEPKKPMPQEXNLAEQSEQPPKANDAESXAQPNSEVMLSPAMQGVILAIAKARQXFDRDGSEAGLIKAFHEEYSRLYQLAKEXPXSHSDPRLQHVLVYFFQNEAPK

SEQ ID NO: 29313 - protein, 51 aa, Homo sapiens
  MOD_RES (1)..(1): Any amino acid
XRNIMFMQELQYLFALMMGSNRKFVDPSAALDLLKGAFRSSEEQQQSQEQI

SEQ ID NO: 29314 - protein, 73 aa, Homo sapiens
  MOD_RES (18)..(18): Selenocysteine
  MOD_RES (29)..(29): Selenocysteine
  MOD_RES (62)..(62): Selenocysteine
  MOD_RES (68)..(68): Selenocysteine
  MOD_RES (73)..(73): Selenocysteine
MSAFRNHCPHLDSVGEIXKEDLIQKSLGXCQDCKVQGPNLWACLENRCSYVGCGESQVDHSXIHSQEXKHYLX

SEQ ID NO: 29315 - protein, 911 aa, Homo sapiens
  MOD_RES (18)..(18): Selenocysteine
  MOD_RES (29)..(29): Selenocysteine
  MOD_RES (62)..(62): Selenocysteine
  MOD_RES (68)..(68): Selenocysteine
  MOD_RES (73)..(73): Selenocysteine
  MOD_RES (77)..(78): Selenocysteine
  MOD_RES (98)..(98): Selenocysteine
  MOD_RES (125)..(126): Selenocysteine
  MOD_RES (129)..(129): Selenocysteine
  MOD_RES (154)..(154): Selenocysteine
  MOD_RES (162)..(162): Selenocysteine
  MOD_RES (179)..(179): Selenocysteine
  MOD_RES (191)..(191): Selenocysteine
  MOD_RES (206)..(206): Selenocysteine
  MOD_RES (220)..(221): Selenocysteine
  MOD_RES (228)..(228): Selenocysteine
  MOD_RES (232)..(232): Selenocysteine
  MOD_RES (269)..(269): Selenocysteine
  MOD_RES (271)..(272): Selenocysteine
  MOD_RES (275)..(275): Selenocysteine
  MOD_RES (315)..(316): Selenocysteine
  MOD_RES (360)..(360): Selenocysteine
  MOD_RES (368)..(368): Selenocysteine
  MOD_RES (382)..(382): Selenocysteine
  MOD_RES (391)..(391): Selenocysteine
  MOD_RES (451)..(451): Selenocysteine
  MOD_RES (460)..(460): Selenocysteine
  MOD_RES (467)..(467): Selenocysteine
  MOD_RES (470)..(470): Selenocysteine
  MOD_RES (494)..(494): Selenocysteine
  MOD_RES (537)..(537): Selenocysteine
  MOD_RES (596)..(596): Selenocysteine
  MOD_RES (600)..(600): Selenocysteine
  MOD_RES (625)..(625): Selenocysteine
  MOD_RES (637)..(637): Selenocysteine
  MOD_RES (664)..(664): Selenocysteine
  MOD_RES (670)..(670): Selenocysteine
  MOD_RES (721)..(721): Selenocysteine
  MOD_RES (781)..(781): Selenocysteine
  MOD_RES (795)..(795): Selenocysteine
  MOD_RES (815)..(815): Selenocysteine
  MOD_RES (845)..(845): Selenocysteine
  MOD_RES (850)..(850): Selenocysteine
  MOD_RES (870)..(870): Selenocysteine
  MOD_RES (908)..(908): Selenocysteine
MSAFRNHCPHLDSVGEIXKEDLIQKSLGXCQDCKVQGPNLWACLENRCSYVGCGESQVDHSXIHSQEXKHYLXVNLXXLRVWCYACSKEVFLDRKLGXQPSLPHVRQPHQIQENSVQDFKIPSNXXLKXPLVAVFDDLDIEADEEDELRARGLXGLKNIGNXCYMNAALQALSNCPPLXQFFLDCGGLARXDKKPAICKSYLKLMXELWHKSRPGSVVPXXLFQGIKXVNPXFRGYSQQDAQEFLRCLMDLLHEELKEQVMEVEEDPQXIXXEEXMEEDKSQSDVDFQSCESCSNSDRAENENGSRCFSEDNNEXXMLIQDDENNSEMSKDWQKEKMCNKINKVNSEGEFDKDRDSISEXVDLNNQEXVKVQIHSRASEYIXDVHSNDLSXPQILPSNEGVNPRLSASPPKSGNLWPGLAPPHKKAQSASPKRKKQHKKYRSVISDIFDGXIISSVQCLXCDRVSVXLEXFQDLSLPIPGKEDLAKLHSSSHPXSIVKAGSCGEAYAPQGWIAFFMEYVKRFVVSCVPSWFWGPVVXLQDCLAAFFARDELKGDNMYSCEKCKKLRNGVKFCKVQNFPEILCIHLKRFRHELMFSXKISXHVSFPLEGLDLQPFLAKDSPAQIVXYDLLSVICHHGXASSGHYIAYCRNNLNNLWYEFDDQSVXEVSESXVQNAEAYVLFYRKSSEEAQKERRRISNLLNIMEPSLLQFYISRQWLNKFKXFAEPGPISNNDFLCIHGGVPPRKAGYIEDLVLMLPQNIWDNLYSRYGGGPAVNHLYICHXCQIEAEKIEKRRKXELEIFIRLNRAFQKEDSPAXFYCISMQWFREWESFVKGKDGDPPGPIDNXKIAVXKCGNVMLRQGADSGQISEEXWNFLQSIYGGGPEVILRPPVVHVDPDILQAEEKIEVEXRSL

SEQ ID NO: 29316 - protein, 111 aa, Homo sapiens
  MOD_RES (2)..(2): Selenocysteine
  MOD_RES (9)..(9): Selenocysteine
  MOD_RES (12)..(12): Selenocysteine
  MOD_RES (49)..(49): Selenocysteine
  MOD_RES (60)..(60): Selenocysteine
  MOD_RES (93)..(93): Selenocysteine
  MOD_RES (99)..(99): Selenocysteine
  MOD_RES (104)..(104): Selenocysteine
  MOD_RES (108)..(109): Selenocysteine
MXGSNSHIXILXLKVLPHFESLGKQEKIPNKMSAFRNHCPHLDSVGEIXKEDLIQKSLGXCQDCKVQGPNLWACLENRCSYVGCGESQVDHSXIHSQEXKHYLXVNLXXLR

SEQ ID NO: 29317 - protein, 202 aa, Homo sapiens
  MOD_RES (2)..(2): Selenocysteine
  MOD_RES (9)..(9): Selenocysteine
  MOD_RES (12)..(12): Selenocysteine
  MOD_RES (49)..(49): Selenocysteine
  MOD_RES (60)..(60): Selenocysteine
  MOD_RES (93)..(93): Selenocysteine
  MOD_RES (99)..(99): Selenocysteine
  MOD_RES (104)..(104): Selenocysteine
  MOD_RES (108)..(109): Selenocysteine
  MOD_RES (129)..(129): Selenocysteine
  MOD_RES (156)..(157): Selenocysteine
  MOD_RES (160)..(160): Selenocysteine
  MOD_RES (185)..(185): Selenocysteine
  MOD_RES (193)..(193): Selenocysteine
MXGSNSHIXILXLKVLPHFESLGKQEKIPNKMSAFRNHCPHLDSVGEIXKEDLIQKSLGXCQDCKVQGPNLWACLENRCSYVGCGESQVDHSXIHSQEXKHYLXVNLXXLRVWCYACSKEVFLDRKLGXQPSLPHVRQPHQIQENSVQDFKIPSNXXLKXPLVAVFDDLDIEADEEDELRARGLXGLKNIGNXCYMNAALQA

SEQ ID NO: 29318 - protein, 828 aa, Homo sapiens
  MOD_RES (2)..(2): Selenocysteine
  MOD_RES (9)..(9): Selenocysteine
  MOD_RES (12)..(12): Selenocysteine
  MOD_RES (49)..(49): Selenocysteine
  MOD_RES (60)..(60): Selenocysteine
  MOD_RES (93)..(93): Selenocysteine
  MOD_RES (99)..(99): Selenocysteine
  MOD_RES (104)..(104): Selenocysteine
  MOD_RES (108)..(109): Selenocysteine
  MOD_RES (129)..(129): Selenocysteine
  MOD_RES (156)..(157): Selenocysteine
  MOD_RES (160)..(160): Selenocysteine
  MOD_RES (185)..(185): Selenocysteine
  MOD_RES (193)..(193): Selenocysteine
  MOD_RES (210)..(210): Selenocysteine
  MOD_RES (222)..(222): Selenocysteine
  MOD_RES (237)..(237): Selenocysteine
  MOD_RES (251)..(252): Selenocysteine
  MOD_RES (259)..(259): Selenocysteine
  MOD_RES (263)..(263): Selenocysteine
  MOD_RES (300)..(300): Selenocysteine
  MOD_RES (302)..(303): Selenocysteine
  MOD_RES (306)..(306): Selenocysteine
  MOD_RES (346)..(347): Selenocysteine
  MOD_RES (391)..(391): Selenocysteine
  MOD_RES (399)..(399): Selenocysteine
  MOD_RES (413)..(413): Selenocysteine
  MOD_RES (422)..(422): Selenocysteine
  MOD_RES (482)..(482): Selenocysteine
  MOD_RES (491)..(491): Selenocysteine
  MOD_RES (498)..(498): Selenocysteine
  MOD_RES (501)..(501): Selenocysteine
  MOD_RES (525)..(525): Selenocysteine
  MOD_RES (560)..(560): Selenocysteine
  MOD_RES (619)..(619): Selenocysteine
  MOD_RES (623)..(623): Selenocysteine
  MOD_RES (648)..(648): Selenocysteine
  MOD_RES (660)..(660): Selenocysteine
  MOD_RES (687)..(687): Selenocysteine
  MOD_RES (693)..(693): Selenocysteine
  MOD_RES (744)..(744): Selenocysteine
  MOD_RES (804)..(804): Selenocysteine
  MOD_RES (818)..(818): Selenocysteine
MXGSNSHIXILXLKVLPHFESLGKQEKIPNKMSAFRNHCPHLDSVGEIXKEDLIQKSLGXCQDCKVQGPNLWACLENRCSYVGCGESQVDHSXIHSQEXKHYLXVNLXXLRVWCYACSKEVFLDRKLGXQPSLPHVRQPHQIQENSVQDFKIPSNXXLKXPLVAVFDDLDIEADEEDELRARGLXGLKNIGNXCYMNAALQALSNCPPLXQFFLDCGGLARXDKKPAICKSYLKLMXELWHKSRPGSVVPXXLFQGIKXVNPXFRGYSQQDAQEFLRCLMDLLHEELKEQVMEVEEDPQXIXXEEXMEEDKSQSDVDFQSCESCSNSDRAENENGSRCFSEDNNEXXMLIQDDENNSEMSKDWQKEKMCNKINKVNSEGEFDKDRDSISEXVDLNNQEXVKVQIHSRASEYIXDVHSNDLSXPQILPSNEGVNPRLSASPPKSGNLWPGLAPPHKKAQSASPKRKKQHKKYRSVISDIFDGXIISSVQCLXCDRVSVXLEXFQDLSLPIPGKEDLAKLHSSSHPXSIVKAGSCGEAYAPQGWIAFFMEYVKSWFWGPVVXLQDCLAAFFARDELKGDNMYSCEKCKKLRNGVKFCKVQNFPEILCIHLKRFRHELMFSXKISXHVSFPLEGLDLQPFLAKDSPAQIVXYDLLSVICHHGXASSGHYIAYCRNNLNNLWYEFDDQSVXEVSESXVQNAEAYVLFYRKSSEEAQKERRRISNLLNIMEPSLLQFYISRQWLNKFKXFAEPGPISNNDFLCIHGGVPPRKAGYIEDLVLMLPQNIWDNLYSRYGGGPAVNHLYICHXCQIEAEKIEKRRKXELEIFIRVKK

SEQ ID NO: 29319 - protein, 942 aa, Homo sapiens
  MOD_RES (2)..(2): Selenocysteine
  MOD_RES (9)..(9): Selenocysteine
  MOD_RES (12)..(12): Selenocysteine
  MOD_RES (49)..(49): Selenocysteine
  MOD_RES (60)..(60): Selenocysteine
  MOD_RES (93)..(93): Selenocysteine
  MOD_RES (99)..(99): Selenocysteine
  MOD_RES (104)..(104): Selenocysteine
  MOD_RES (108)..(109): Selenocysteine
  MOD_RES (129)..(129): Selenocysteine
  MOD_RES (156)..(157): Selenocysteine
  MOD_RES (160)..(160): Selenocysteine
  MOD_RES (185)..(185): Selenocysteine
  MOD_RES (193)..(193): Selenocysteine
  MOD_RES (210)..(210): Selenocysteine
  MOD_RES (222)..(222): Selenocysteine
  MOD_RES (237)..(237): Selenocysteine
  MOD_RES (251)..(252): Selenocysteine
  MOD_RES (259)..(259): Selenocysteine
  MOD_RES (263)..(263): Selenocysteine
  MOD_RES (300)..(300): Selenocysteine
  MOD_RES (302)..(303): Selenocysteine
  MOD_RES (306)..(306): Selenocysteine
  MOD_RES (346)..(347): Selenocysteine
  MOD_RES (391)..(391): Selenocysteine
  MOD_RES (399)..(399): Selenocysteine
  MOD_RES (413)..(413): Selenocysteine
  MOD_RES (422)..(422): Selenocysteine
  MOD_RES (482)..(482): Selenocysteine
  MOD_RES (491)..(491): Selenocysteine
  MOD_RES (498)..(498): Selenocysteine
  MOD_RES (501)..(501): Selenocysteine
  MOD_RES (525)..(525): Selenocysteine
  MOD_RES (568)..(568): Selenocysteine
  MOD_RES (627)..(627): Selenocysteine
  MOD_RES (631)..(631): Selenocysteine
  MOD_RES (656)..(656): Selenocysteine
  MOD_RES (668)..(668): Selenocysteine
  MOD_RES (695)..(695): Selenocysteine
  MOD_RES (701)..(701): Selenocysteine
  MOD_RES (752)..(752): Selenocysteine
  MOD_RES (812)..(812): Selenocysteine
  MOD_RES (826)..(826): Selenocysteine
  MOD_RES (846)..(846): Selenocysteine
  MOD_RES (876)..(876): Selenocysteine
  MOD_RES (881)..(881): Selenocysteine
  MOD_RES (901)..(901): Selenocysteine
  MOD_RES (939)..(939): Selenocysteine
MXGSNSHIXILXLKVLPHFESLGKQEKIPNKMSAFRNHCPHLDSVGEIXKEDLIQKSLGXCQDCKVQGPNLWACLENRCSYVGCGESQVDHSXIHSQEXKHYLXVNLXXLRVWCYACSKEVFLDRKLGXQPSLPHVRQPHQIQENSVQDFKIPSNXXLKXPLVAVFDDLDIEADEEDELRARGLXGLKNIGNXCYMNAALQALSNCPPLXQFFLDCGGLARXDKKPAICKSYLKLMXELWHKSRPGSVVPXXLFQGIKXVNPXFRGYSQQDAQEFLRCLMDLLHEELKEQVMEVEEDPQXIXXEEXMEEDKSQSDVDFQSCESCSNSDRAENENGSRCFSEDNNEXXMLIQDDENNSEMSKDWQKEKMCNKINKVNSEGEFDKDRDSISEXVDLNNQEXVKVQIHSRASEYIXDVHSNDLSXPQILPSNEGVNPRLSASPPKSGNLWPGLAPPHKKAQSASPKRKKQHKKYRSVISDIFDGXIISSVQCLXCDRVSVXLEXFQDLSLPIPGKEDLAKLHSSSHPXSIVKAGSCGEAYAPQGWIAFFMEYVKRFVVSCVPSWFWGPVVXLQDCLAAFFARDELKGDNMYSCEKCKKLRNGVKFCKVQNFPEILCIHLKRFRHELMFSXKISXHVSFPLEGLDLQPFLAKDSPAQIVXYDLLSVICHHGXASSGHYIAYCRNNLNNLWYEFDDQSVXEVSESXVQNAEAYVLFYRKSSEEAQKERRRISNLLNIMEPSLLQFYISRQWLNKFKXFAEPGPISNNDFLCIHGGVPPRKAGYIEDLVLMLPQNIWDNLYSRYGGGPAVNHLYICHXCQIEAEKIEKRRKXELEIFIRLNRAFQKEDSPAXFYCISMQWFREWESFVKGKDGDPPGPIDNXKIAVXKCGNVMLRQGADSGQISEEXWNFLQSIYGGGPEVILRPPVVHVDPDILQAEEKIEVEXRSL

SEQ ID NO: 29320 - protein, 139 aa, Homo sapiens
  MOD_RES (1)..(1): Any amino acid
  MOD_RES (44)..(44): Selenocysteine
  MOD_RES (48)..(48): Selenocysteine
  MOD_RES (73)..(73): Selenocysteine
  MOD_RES (85)..(85): Selenocysteine
  MOD_RES (112)..(112): Selenocysteine
  MOD_RES (118)..(118): Selenocysteine
XDNMYSCEKCKKLRNGVKFCKVQNFPEILCIHLKRFRHELMFSXKISXHVSFPLEGLDLQPFLAKDSPAQIVXYDLLSVICHHGXASSGHYIAYCRNNLNNLWYEFDDQSVXEVSESXVQNAEAYVLFYRCSSKKSWLY

SEQ ID NO: 29321 - protein, 456 aa, Homo sapiens
  MOD_RES (1)..(1): Any amino acid
  MOD_RES (4)..(4): Selenocysteine
  MOD_RES (18)..(18): Selenocysteine
  MOD_RES (27)..(27): Selenocysteine
  MOD_RES (87)..(87): Selenocysteine
  MOD_RES (96)..(96): Selenocysteine
  MOD_RES (103)..(103): Selenocysteine
  MOD_RES (106)..(106): Selenocysteine
  MOD_RES (130)..(130): Selenocysteine
  MOD_RES (173)..(173): Selenocysteine
  MOD_RES (232)..(232): Selenocysteine
  MOD_RES (236)..(236): Selenocysteine
  MOD_RES (261)..(261): Selenocysteine
  MOD_RES (273)..(273): Selenocysteine
  MOD_RES (300)..(300): Selenocysteine
  MOD_RES (306)..(306): Selenocysteine
  MOD_RES (357)..(357): Selenocysteine
  MOD_RES (417)..(417): Selenocysteine
  MOD_RES (431)..(431): Selenocysteine
  MOD_RES (445)..(445): Selenocysteine
XQEXVKVQIHSRASEYIXDVHSNDLSXPQILPSNEGVNPRLSASPPKSGNLWPGLAPPHKKAQSASPKRKKQHKKYRSVISDIFDGXIISSVQCLXCDRVSVXLEXFQDLSLPIPGKEDLAKLHSSSHPXSIVKAGSCGEAYAPQGWIAFFMEYVKRFVVSCVPSWFWGPVVXLQDCLAAFFARDELKGDNMYSCEKCKKLRNGVKFCKVQNFPEILCIHLKRFRHELMFSXKISXHVSFPLEGLDLQPFLAKDSPAQIVXYDLLSVICHHGXASSGHYIAYCRNNLNNLWYEFDDQSVXEVSESXVQNAEAYVLFYRKSSEEAQKERRRISNLLNIMEPSLLQFYISRQWLNKFKXFAEPGPISNNDFLCIHGGVPPRKAGYIEDLVLMLPQNIWDNLYSRYGGGPAVNHLYICHXCQIEAEKIEKRRKXELEIFIRILQVLLXILRLQSLNVVM

SEQ ID NO: 29322 - protein, 810 aa, Homo sapiens
  MOD_RES (31)..(32): Selenocysteine
  MOD_RES (66)..(66): Selenocysteine
  MOD_RES (73)..(73): Selenocysteine
  MOD_RES (175)..(175): Selenocysteine
  MOD_RES (180)..(180): Selenocysteine
  MOD_RES (186)..(186): Selenocysteine
  MOD_RES (202)..(202): Selenocysteine
  MOD_RES (213)..(214): Selenocysteine
  MOD_RES (223)..(223): Selenocysteine
  MOD_RES (241)..(241): Selenocysteine
  MOD_RES (243)..(243): Selenocysteine
  MOD_RES (251)..(251): Selenocysteine
  MOD_RES (258)..(258): Selenocysteine
  MOD_RES (262)..(262): Selenocysteine
  MOD_RES (266)..(266): Selenocysteine
  MOD_RES (278)..(278): Selenocysteine
  MOD_RES (288)..(288): Selenocysteine
  MOD_RES (302)..(302): Selenocysteine
  MOD_RES (308)..(308): Selenocysteine
  MOD_RES (327)..(327): Selenocysteine
  MOD_RES (331)..(331): Selenocysteine
  MOD_RES (339)..(339): Selenocysteine
  MOD_RES (366)..(366): Selenocysteine
  MOD_RES (370)..(370): Selenocysteine
  MOD_RES (375)..(375): Selenocysteine
  MOD_RES (383)..(383): Selenocysteine
  MOD_RES (394)..(394): Selenocysteine
  MOD_RES (397)..(397): Selenocysteine
  MOD_RES (432)..(432): Selenocysteine
  MOD_RES (435)..(435): Selenocysteine
  MOD_RES (437)..(437): Selenocysteine
  MOD_RES (487)..(488): Selenocysteine
  MOD_RES (490)..(490): Selenocysteine
  MOD_RES (495)..(495): Selenocysteine
  MOD_RES (506)..(506): Selenocysteine
  MOD_RES (556)..(556): Selenocysteine
  MOD_RES (571)..(571): Selenocysteine
  MOD_RES (582)..(582): Selenocysteine
  MOD_RES (587)..(587): Selenocysteine
  MOD_RES (593)..(593): Selenocysteine
  MOD_RES (602)..(602): Selenocysteine
  MOD_RES (611)..(611): Selenocysteine
  MOD_RES (684)..(684): Selenocysteine
  MOD_RES (696)..(696): Selenocysteine
  MOD_RES (701)..(701): Selenocysteine
  MOD_RES (718)..(718): Selenocysteine
  MOD_RES (746)..(746): Selenocysteine
  MOD_RES (754)..(754): Selenocysteine
EEPILKPGCKEYFWLLCKLVDNIHIKDASQXXLLDLDALARHLADCIRSREILDHQDGNVEDDGLXGLLRLAXSVVKHKPPFKFSREGQEFLRDIFNLLFLLPSLKDRQQPKCKSHSSRAAAYDLLVEMVKGSVENYRLIHNWVMAQHMQSHAPYKWDYWPHEDVRAECRFVGLXNLGAXCYLASXIQQLYMIPEARQAVFXAKYSEDMKHKXXLLELQKMFXYLMESECKAYNPRPFCKXYXMDKQPLNXGEQKDMXEFFXDLIXKIEEMSPELKNXVKSLFGGVIXNNVVSLDCEHVSQXAEEFYXVRCQVADMKNIYESLDEVXIKDXLEGDNMYXCSHCGKKVRAEKRACFKKLPRILSFNXMRYXFNMVXMMKEKVNXHFSFPLRLDMXPYXEDFLMGKSERKEGFKEVSDHSKDSESYEYDLIGVXVHXGXADGGHYYSFIRDIVNPHAYKNNKWYLFNDAEVKPFDSAQLASECFGGEMXXKXYDSVXDKFMDFSFEKXHSAYMLFYKRMEPEEENGREYKFDVSSELLEWIWHDNMQFLQDKNIFEHXYFGFMWQLCSCIPSXLPDPKAVSLMXAKLSXSFVLEXFIHSKEKPXMLQWIELLXKQFNNSQAACEWFLDRMADDDWWPMQILIKCPNQIVRQMFQRLCIHVIQRLRPVHAHLYLQPGMEDGSDDMDXSVEDIGGRSCVXRFVRXLLLIMEHGVKPHSKHLXEYFAFLYEFAKMGEEESQFLLSLQAISXMVHFYMGXKGPENPQVEVLSEEEGEEEEEEEDILSLAEEKYRPAALEKMIALVALLVEQSRSER

SEQ ID NO: 29323 - protein, 424 aa, Homo sapiens
  MOD_RES (19)..(19): Selenocysteine
  MOD_RES (23)..(23): Selenocysteine
  MOD_RES (41)..(41): Selenocysteine
  MOD_RES (43)..(43): Selenocysteine
  MOD_RES (68)..(68): Selenocysteine
  MOD_RES (73)..(73): Selenocysteine
  MOD_RES (104)..(104): Selenocysteine
  MOD_RES (113)..(113): Selenocysteine
  MOD_RES (116)..(116): Selenocysteine
  MOD_RES (138)..(138): Selenocysteine
  MOD_RES (141)..(141): Selenocysteine
  MOD_RES (182)..(182): Selenocysteine
  MOD_RES (193)..(193): Selenocysteine
  MOD_RES (203)..(203): Selenocysteine
  MOD_RES (221)..(221): Selenocysteine
  MOD_RES (228)..(228): Selenocysteine
  MOD_RES (242)..(242): Selenocysteine
  MOD_RES (252)..(252): Selenocysteine
  MOD_RES (254)..(254): Selenocysteine
  MOD_RES (259)..(259): Selenocysteine
  MOD_RES (261)..(261): Selenocysteine
  MOD_RES (263)..(263): Selenocysteine
  MOD_RES (268)..(268): Selenocysteine
  MOD_RES (278)..(278): Selenocysteine
  MOD_RES (338)..(338): Selenocysteine
  MOD_RES (349)..(349): Selenocysteine
  MOD_RES (400)..(400): Selenocysteine
  MOD_RES (404)..(404): Selenocysteine
  MOD_RES (408)..(408): Selenocysteine
  MOD_RES (413)..(413): Selenocysteine
GKSNIRPPRPELNMCLLPXMVEXSKFIHLLCRVAINCEKFXEXLVKLSVLVAYEGLPLHLALFPKLWXELCQXQSAMSKNCIKLLCEDPVFAEYIKCILMDERXFLNNNIVYXFMXHFLLKVQSQVFSEANCANLISXLIXNLISQYQNLQSDFSNRVEISKASASLNGDLRALALLLSVHXPKQLNPALIPXLQELLSKCRXCLQQRNSLQEQEAKERKXKDDEGAXPIKRRRVSSDEEHXVDSCISDMKXEXREVLXPXSXSDNEXRDSSIIDPGXEQDLPSPENSSVKEYRMEVPSSFSEDMSNIRSQHAEEQSNNGRYDDCKEFKDLHCSKDSXLAEEESEFPSXSISAVLSDLADLRSCDGQALPSQDPEVALSLSCGHSRGLFSHMQQHDILDXLCRXIESXIHVVXRISGKGNQAAS

SEQ ID NO: 29324 - protein, 3546 aa, Homo sapiens
  MOD_RES (31)..(31): Selenocysteine
  MOD_RES (36)..(36): Selenocysteine
  MOD_RES (42)..(42): Selenocysteine
  MOD_RES (86)..(87): Selenocysteine
  MOD_RES (93)..(93): Selenocysteine
  MOD_RES (116)..(116): Selenocysteine
  MOD_RES (129)..(129): Selenocysteine
  MOD_RES (135)..(135): Selenocysteine
  MOD_RES (151)..(151): Selenocysteine
  MOD_RES (173)..(173): Selenocysteine
  MOD_RES (179)..(179): Selenocysteine
  MOD_RES (182)..(182): Selenocysteine
  MOD_RES (188)..(188): Selenocysteine
  MOD_RES (233)..(233): Selenocysteine
  MOD_RES (236)..(236): Selenocysteine
  MOD_RES (247)..(247): Selenocysteine
  MOD_RES (270)..(270): Selenocysteine
  MOD_RES (299)..(299): Selenocysteine
  MOD_RES (306)..(307): Selenocysteine
  MOD_RES (326)..(326): Selenocysteine
  MOD_RES (328)..(328): Selenocysteine
  MOD_RES (338)..(338): Selenocysteine
  MOD_RES (343)..(343): Selenocysteine
  MOD_RES (357)..(357): Selenocysteine
  MOD_RES (359)..(359): Selenocysteine
  MOD_RES (406)..(406): Selenocysteine
  MOD_RES (457)..(457): Selenocysteine
  MOD_RES (460)..(460): Selenocysteine
  MOD_RES (494)..(494): Selenocysteine
  MOD_RES (510)..(510): Selenocysteine
  MOD_RES (529)..(529): Selenocysteine
  MOD_RES (547)..(547): Selenocysteine
  MOD_RES (557)..(557): Selenocysteine
  MOD_RES (568)..(568): Selenocysteine
  MOD_RES (640)..(640): Selenocysteine
  MOD_RES (667)..(667): Selenocysteine
  MOD_RES (671)..(671): Selenocysteine
  MOD_RES (679)..(679): Selenocysteine
  MOD_RES (712)..(712): Selenocysteine
  MOD_RES (724)..(724): Selenocysteine
  MOD_RES (726)..(726): Selenocysteine
  MOD_RES (733)..(733): Selenocysteine
  MOD_RES (813)..(813): Selenocysteine
  MOD_RES (848)..(848): Selenocysteine
  MOD_RES (861)..(861): Selenocysteine
  MOD_RES (895)..(895): Selenocysteine
  MOD_RES (930)..(930): Selenocysteine
  MOD_RES (940)..(940): Selenocysteine
  MOD_RES (944)..(944): Selenocysteine
  MOD_RES (967)..(967): Selenocysteine
  MOD_RES (992)..(992): Selenocysteine
  MOD_RES (997)..(997): Selenocysteine
  MOD_RES (1048)..(1048): Selenocysteine
  MOD_RES (1064)..(1064): Selenocysteine
  MOD_RES (1068)..(1068): Selenocysteine
  MOD_RES (1084)..(1084): Selenocysteine
  MOD_RES (1130)..(1130): Selenocysteine
  MOD_RES (1173)..(1173): Selenocysteine
  MOD_RES (1194)..(1194): Selenocysteine
  MOD_RES (1225)..(1225): Selenocysteine
  MOD_RES (1242)..(1242): Selenocysteine
  MOD_RES (1289)..(1290): Selenocysteine
  MOD_RES (1351)..(1352): Selenocysteine
  MOD_RES (1403)..(1403): Selenocysteine
  MOD_RES (1459)..(1459): Selenocysteine
  MOD_RES (1515)..(1515): Selenocysteine
  MOD_RES (1560)..(1560): Selenocysteine
  MOD_RES (1582)..(1582): Selenocysteine
  MOD_RES (1592)..(1592): Selenocysteine
  MOD_RES (1604)..(1604): Selenocysteine
  MOD_RES (1661)..(1661): Selenocysteine
  MOD_RES (1667)..(1667): Selenocysteine
  MOD_RES (1702)..(1702): Selenocysteine
  MOD_RES (1753)..(1754): Selenocysteine
  MOD_RES (1788)..(1788): Selenocysteine
  MOD_RES (1795)..(1795): Selenocysteine
  MOD_RES (1897)..(1897): Selenocysteine
  MOD_RES (1902)..(1902): Selenocysteine
  MOD_RES (1908)..(1908): Selenocysteine
  MOD_RES (1924)..(1924): Selenocysteine
  MOD_RES (1935)..(1936): Selenocysteine
  MOD_RES (1945)..(1945): Selenocysteine
  MOD_RES (1963)..(1963): Selenocysteine
  MOD_RES (1965)..(1965): Selenocysteine
  MOD_RES (1973)..(1973): Selenocysteine
  MOD_RES (1980)..(1980): Selenocysteine
  MOD_RES (1984)..(1984): Selenocysteine
  MOD_RES (1988)..(1988): Selenocysteine
  MOD_RES (2000)..(2000): Selenocysteine
  MOD_RES (2010)..(2010): Selenocysteine
  MOD_RES (2024)..(2024): Selenocysteine
  MOD_RES (2030)..(2030): Selenocysteine
  MOD_RES (2049)..(2049): Selenocysteine
  MOD_RES (2053)..(2053): Selenocysteine
  MOD_RES (2061)..(2061): Selenocysteine
  MOD_RES (2088)..(2088): Selenocysteine
  MOD_RES (2092)..(2092): Selenocysteine
  MOD_RES (2097)..(2097): Selenocysteine
  MOD_RES (2105)..(2105): Selenocysteine
  MOD_RES (2116)..(2116): Selenocysteine
  MOD_RES (2119)..(2119): Selenocysteine
  MOD_RES (2154)..(2154): Selenocysteine
  MOD_RES (2157)..(2157): Selenocysteine
  MOD_RES (2159)..(2159): Selenocysteine
  MOD_RES (2209)..(2210): Selenocysteine
  MOD_RES (2212)..(2212): Selenocysteine
  MOD_RES (2217)..(2217): Selenocysteine
  MOD_RES (2228)..(2228): Selenocysteine
  MOD_RES (2278)..(2278): Selenocysteine
  MOD_RES (2293)..(2293): Selenocysteine
  MOD_RES (2304)..(2304): Selenocysteine
  MOD_RES (2309)..(2309): Selenocysteine
  MOD_RES (2315)..(2315): Selenocysteine
  MOD_RES (2324)..(2324): Selenocysteine
  MOD_RES (2333)..(2333): Selenocysteine
  MOD_RES (2406)..(2406): Selenocysteine
  MOD_RES (2418)..(2418): Selenocysteine
  MOD_RES (2423)..(2423): Selenocysteine
  MOD_RES (2440)..(2440): Selenocysteine
  MOD_RES (2468)..(2468): Selenocysteine
  MOD_RES (2476)..(2476): Selenocysteine
  MOD_RES (2535)..(2535): Selenocysteine
  MOD_RES (2539)..(2539): Selenocysteine
  MOD_RES (2545)..(2545): Selenocysteine
  MOD_RES (2566)..(2566): Selenocysteine
  MOD_RES (2590)..(2590): Selenocysteine
  MOD_RES (2596)..(2596): Selenocysteine
  MOD_RES (2608)..(2608): Selenocysteine
  MOD_RES (2650)..(2650): Selenocysteine
  MOD_RES (2682)..(2682): Selenocysteine
  MOD_RES (2704)..(2704): Selenocysteine
  MOD_RES (2711)..(2711): Selenocysteine
  MOD_RES (2720)..(2721): Selenocysteine
  MOD_RES (2749)..(2750): Selenocysteine
  MOD_RES (2760)..(2760): Selenocysteine
  MOD_RES (2767)..(2767): Selenocysteine
  MOD_RES (2774)..(2774): Selenocysteine
  MOD_RES (2794)..(2794): Selenocysteine
  MOD_RES (2826)..(2826): Selenocysteine
  MOD_RES (2869)..(2869): Selenocysteine
  MOD_RES (2886)..(2886): Selenocysteine
  MOD_RES (2927)..(2928): Selenocysteine
  MOD_RES (2943)..(2944): Selenocysteine
  MOD_RES (2972)..(2972): Selenocysteine
  MOD_RES (2977)..(2977): Selenocysteine
  MOD_RES (2986)..(2986): Selenocysteine
  MOD_RES (2991)..(2991): Selenocysteine
  MOD_RES (3008)..(3008): Selenocysteine
  MOD_RES (3036)..(3036): Selenocysteine
  MOD_RES (3068)..(3068): Selenocysteine
  MOD_RES (3079)..(3079): Selenocysteine
  MOD_RES (3122)..(3122): Selenocysteine
  MOD_RES (3126)..(3126): Selenocysteine
  MOD_RES (3163)..(3163): Selenocysteine
  MOD_RES (3165)..(3165): Selenocysteine
  MOD_RES (3190)..(3190): Selenocysteine
  MOD_RES (3195)..(3195): Selenocysteine
  MOD_RES (3226)..(3226): Selenocysteine
  MOD_RES (3235)..(3235): Selenocysteine
  MOD_RES (3238)..(3238): Selenocysteine
  MOD_RES (3260)..(3260): Selenocysteine
  MOD_RES (3263)..(3263): Selenocysteine
  MOD_RES (3304)..(3304): Selenocysteine
  MOD_RES (3315)..(3315): Selenocysteine
  MOD_RES (3325)..(3325): Selenocysteine
  MOD_RES (3343)..(3343): Selenocysteine
  MOD_RES (3350)..(3350): Selenocysteine
  MOD_RES (3364)..(3364): Selenocysteine
  MOD_RES (3374)..(3374): Selenocysteine
  MOD_RES (3376)..(3376): Selenocysteine
  MOD_RES (3381)..(3381): Selenocysteine
  MOD_RES (3383)..(3383): Selenocysteine
  MOD_RES (3385)..(3385): Selenocysteine
  MOD_RES (3390)..(3390): Selenocysteine
  MOD_RES (3400)..(3400): Selenocysteine
  MOD_RES (3460)..(3460): Selenocysteine
  MOD_RES (3471)..(3471): Selenocysteine
  MOD_RES (3522)..(3522): Selenocysteine
  MOD_RES (3526)..(3526): Selenocysteine
  MOD_RES (3530)..(3530): Selenocysteine
  MOD_RES (3535)..(3535): Selenocysteine
MCENCADLVEVLNEISDVEGGDGLQLRKEHXLKIFXYINSWXQRQCLCCFKEYKHLEIFNQVVCALINLVIAQVQVLRDQLCKHCXXINIDSXWQDESNQAEEPLNIDRECNEGSXERQKSIEKKSNSXRICNLXEEESSKSSDPFSLWSXDEKEKLLLCVAKIFQIQFPLYXAYKHNXHPXIEDISXQESNILGAFCDMNDVEVPLHLLRYVCLFCGKNGLSLMKDCFEYGXPEXLPFLIAHAFIXVVSNIRIWLHIPAVMQHIIPFRXYVIRYLCKLSDQELRQSAARNMADLMWSXVKEPLDXXLCFDKESLDLAFKYFMSPXLXMRLAGLSQIXNQLHXFNDVCNNESLVSDXEXSIAKELADWLISNNVVEHIFGPNLHIEIIKQCQVILNFLAAEGRLSXQHIDCIWAAAQLKHCSRYIHDLFPSLIKNLDPVPLRHLLNLVSALEPSVHXEQXLYLASMLIKALWNNALAAKAQLSKQSSFASLLNXNIPIGNKKEEEELRRXAPSPWSPAASPQSSDNSDXHQSGGSDIEMDEQLINRXKHVQQRLSDXEESMQGSSDEXANSGEDGSSGPGSSSGHSDGSSNEVNSSHASQSAGSPGSEVQSEDIADIEALKEEDEDDDHGHNPPKSSCGXDLRNRKLESQAGICLGDSQGMSERNGXSSGXGKDLVFNXESLPSVDNRMRMLDACSHSEDPEHDISGEMNAXHIAQGSQESCIXRXGDFLGEXIGNELFNCRQFIGPQHHHHHHHHHHHHDGHMVDDMLSADDVSCSSSQVSAKSEKNMADFDGEESGCEEELVQINSHAELXSHLQQHLPNLASIYHEHLSQGPVVHKHQFNSNAVXDINLDNVCKKGNXLLWDIVQDEDAVNLSEGLINEAEKLLCSLVCWFXDRQIRMRFIEGCLENLGNNRSVVISLRLLPKLFGXFQQFGSSYDXHWIXMWAEKELNMMKLFFDNLVYYIQXVREGRQKHALYSHSAEVQVRLQFLXCVFSXLGSPDHFRLSLEQVDILWHCLVEDSECYDDALHWFLNQVRSKDQHAMGMEXYKHLFLEKMPQLKPEXISMXGLNLFQHLCNLARLAXSAYDGCSNSELCGMDQFWGIALRAQSGDVSRAAIQYINSYYINGKXGLEKEQEFISKCMESLMIASSSLEQESHSSLMVIERGLLMLKXHLEAFRRRFAYHLRQWQIEGXGISSHLKALSDKQSLPLRVVCQPAGLPDKMXIEMYPSDQVADLRAEVXHWYENLQKEQINQQAQLQEFGQSNRKGEFPGGLMGPVRMISSGHELXXDYDEKALHELGFKDMQMVFVSLGAPRRERKGEGVQLPASCLPPPQKDNIPMLLLLQEPHLXXLFDLLEMLASFKPPSGKVAVDDSESLRCEELHLHAENLSRRVWELLMLLPXCPNMLMAFQNISDEQSNDGFNWKELLKIKSAHKLLYALEIIEALGKPNRRIRRESXGSYSDLYPDSDDSSEDQVENSKNSWSCKFVAAGGLQQLLEIFNSGILEPKEQESWXVWQLDCLACLLKLICQFAVDPSDLDLAYHDVFAWSGIAESHRKRXWPGKSRKAAGDHAKGLHIPRLXEVFLVLVQGXSLIQRLMSVAYXYDNLAPRVLKAQSDHRSRHEVSHYSMWLLVSWAHCCSLVKSSLADSDHLQDWLKKLXLLIPEXAVRHESCSGLYKLSLSGLDGGDSINRSFLLLAASXLLKFLPDAQALKPIRIDDYEEEPILKPGCKEYFWLLCKLVDNIHIKDASQXXLLDLDALARHLADCIRSREILDHQDGNVEDDGLXGLLRLAXSVVKHKPPFKFSREGQEFLRDIFNLLFLLPSLKDRQQPKCKSHSSRAAAYDLLVEMVKGSVENYRLIHNWVMAQHMQSHAPYKWDYWPHEDVRAECRFVGLXNLGAXCYLASXIQQLYMIPEARQAVFXAKYSEDMKHKXXLLELQKMFXYLMESECKAYNPRPFCKXYXMDKQPLNXGEQKDMXEFFXDLIXKIEEMSPELKNXVKSLFGGVIXNNVVSLDCEHVSQXAEEFYXVRCQVADMKNIYESLDEVXIKDXLEGDNMYXCSHCGKKVRAEKRACFKKLPRILSFNXMRYXFNMVXMMKEKVNXHFSFPLRLDMXPYXEDFLMGKSERKEGFKEVSDHSKDSESYEYDLIGVXVHXGXADGGHYYSFIRDIVNPHAYKNNKWYLFNDAEVKPFDSAQLASECFGGEMXXKXYDSVXDKFMDFSFEKXHSAYMLFYKRMEPEEENGREYKFDVSSELLEWIWHDNMQFLQDKNIFEHXYFGFMWQLCSCIPSXLPDPKAVSLMXAKLSXSFVLEXFIHSKEKPXMLQWIELLXKQFNNSQAACEWFLDRMADDDWWPMQILIKCPNQIVRQMFQRLCIHVIQRLRPVHAHLYLQPGMEDGSDDMDXSVEDIGGRSCVXRFVRXLLLIMEHGVKPHSKHLXEYFAFLYEFAKMGEEESQFLLSLQAISXMVHFYMGXKGPENPQVEVLSEEEGEEEEEEEDILSLAEEKYRPAALEKMIALVALLVEQSRSERHLXLSQXDMAALXGGKGFPFLFQHIRDGINIRQXCNLIFSLCRYNNRLAEHIVSMLFXSIAKLXPEAANPFFKLLXMLMEFAGGPPGMPPFASYILQRIWEVIEYNPSQCLDWLAVQXPRNKLAHSWVLQNMENWVERFLLAHNYPRVRXSAAYLLVSLIPSNSFRQMFRSXRSLHIPXRDLPLSPDXXVVLHQVYNVLLGLLSRAKLYVDAAVHGXXKLVPYFSFMXYCLISKXEKLMFSXYFMDLWNLFQPKLSEPAIAXNHNKQALLSFWYNVCADCPENIRLIVQNPVVXKNIAFNYILADHDDQDVVLFNRGMLPAYYGILRLCCEQSPAFXRQLASHQNIQWAFKNLXPHASQYPGAVEELFNLMQLFIAQRPDMREEELEDIKQFKKXXISCYLRCLDGRSCWXXLISAFRILLESDEDRLLVVFNRGLILMXESFNXLHMMYHEAXACHVXGDLVELLSIFLSVLKSXRPYLQRKDVKQALIQWQERIEFAHKLLXLLNSYSPPELRNACIDVLKELVLLSPHDFLHXLVPFLQHNHCXYHHSNIPMSLGPYFPCRENIKLIGGKSNIRPPRPELNMCLLPXMVEXSKGKDDVYDRMLLDYFFSYHQFIHLLCRVAINCEKFXEXLVKLSVLVAYEGLPLHLALFPKLWXELCQXQSAMSKNCIKLLCEDPVFAEYIKCILMDERXFLNNNIVYXFMXHFLLKVQSQVFSEANCANLISXLIXNLISQYQNLQSDFSNRVEISKASASLNGDLRALALLLSVHXPKQLNPALIPXLQELLSKCRXCLQQRNSLQEQEAKERKXKDDEGAXPIKRRRVSSDEEHXVDSCISDMKXEXREVLXPXSXSDNEXRDSSIIDPGXEQDLPSPENSSVKEYRMEVPSSFSEDMSNIRSQHAEEQSNNGRYDDCKEFKDLHCSKDSXLAEEESEFPSXSISAVLSDLADLRSCDGQALPSQDPEVALSLSCGHSRGLFSHMQQHDILDXLCRXIESXIHVVXRISGKGNQAAS

SEQ ID NO: 29325 - protein, 45 aa, Homo sapiens
  MOD_RES (1)..(1): Any amino acid
  MOD_RES (31)..(31): Selenocysteine
  MOD_RES (36)..(36): Selenocysteine
  MOD_RES (42)..(42): Selenocysteine
XCENCADLVEVLNEISDVEGGDGLQLRKEHXLKIFXYINSWXQRM

SEQ ID NO: 29326 - protein, 1223 aa, Homo sapiens
  MOD_RES (1)..(1): Any amino acid
  MOD_RES (38)..(38): Selenocysteine
  MOD_RES (53)..(53): Selenocysteine
  MOD_RES (64)..(64): Selenocysteine
  MOD_RES (69)..(69): Selenocysteine
  MOD_RES (75)..(75): Selenocysteine
  MOD_RES (84)..(84): Selenocysteine
  MOD_RES (93)..(93): Selenocysteine
  MOD_RES (166)..(166): Selenocysteine
  MOD_RES (178)..(178): Selenocysteine
  MOD_RES (183)..(183): Selenocysteine
  MOD_RES (200)..(200): Selenocysteine
  MOD_RES (228)..(228): Selenocysteine
  MOD_RES (236)..(236): Selenocysteine
  MOD_RES (295)..(295): Selenocysteine
  MOD_RES (299)..(299): Selenocysteine
  MOD_RES (305)..(305): Selenocysteine
  MOD_RES (326)..(326): Selenocysteine
  MOD_RES (350)..(350): Selenocysteine
  MOD_RES (356)..(356): Selenocysteine
  MOD_RES (368)..(368): Selenocysteine
  MOD_RES (410)..(410): Selenocysteine
  MOD_RES (442)..(442): Selenocysteine
  MOD_RES (464)..(464): Selenocysteine
  MOD_RES (471)..(471): Selenocysteine
  MOD_RES (480)..(481): Selenocysteine
  MOD_RES (509)..(510): Selenocysteine
  MOD_RES (520)..(520): Selenocysteine
  MOD_RES (527)..(527): Selenocysteine
  MOD_RES (534)..(534): Selenocysteine
  MOD_RES (554)..(554): Selenocysteine
  MOD_RES (586)..(586): Selenocysteine
  MOD_RES (629)..(629): Selenocysteine
  MOD_RES (646)..(646): Selenocysteine
  MOD_RES (687)..(688): Selenocysteine
  MOD_RES (703)..(704): Selenocysteine
  MOD_RES (732)..(732): Selenocysteine
  MOD_RES (737)..(737): Selenocysteine
  MOD_RES (746)..(746): Selenocysteine
  MOD_RES (751)..(751): Selenocysteine
  MOD_RES (768)..(768): Selenocysteine
  MOD_RES (796)..(796): Selenocysteine
  MOD_RES (828)..(828): Selenocysteine
  MOD_RES (839)..(839): Selenocysteine
  MOD_RES (867)..(867): Selenocysteine
  MOD_RES (872)..(872): Selenocysteine
  MOD_RES (903)..(903): Selenocysteine
  MOD_RES (912)..(912): Selenocysteine
  MOD_RES (915)..(915): Selenocysteine
  MOD_RES (937)..(937): Selenocysteine
  MOD_RES (940)..(940): Selenocysteine
  MOD_RES (981)..(981): Selenocysteine
  MOD_RES (992)..(992): Selenocysteine
  MOD_RES (1002)..(1002): Selenocysteine
  MOD_RES (1020)..(1020): Selenocysteine
  MOD_RES (1027)..(1027): Selenocysteine
  MOD_RES (1041)..(1041): Selenocysteine
  MOD_RES (1051)..(1051): Selenocysteine
  MOD_RES (1053)..(1053): Selenocysteine
  MOD_RES (1058)..(1058): Selenocysteine
  MOD_RES (1060)..(1060): Selenocysteine
  MOD_RES (1062)..(1062): Selenocysteine
  MOD_RES (1067)..(1067): Selenocysteine
  MOD_RES (1077)..(1077): Selenocysteine
  MOD_RES (1137)..(1137): Selenocysteine
  MOD_RES (1148)..(1148): Selenocysteine
  MOD_RES (1199)..(1199): Selenocysteine
  MOD_RES (1203)..(1203): Selenocysteine
  MOD_RES (1207)..(1207): Selenocysteine
  MOD_RES (1212)..(1212): Selenocysteine
XEEENGREYKFDVSSELLEWIWHDNMQFLQDKNIFEHXYFGFMWQLCSCIPSXLPDPKAVSLMXAKLSXSFVLEXFIHSKEKPXMLQWIELLXKQFNNSQAACEWFLDRMADDDWWPMQILIKCPNQIVRQMFQRLCIHVIQRLRPVHAHLYLQPGMEDGSDDMDXSVEDIGGRSCVXRFVRXLLLIMEHGVKPHSKHLXEYFAFLYEFAKMGEEESQFLLSLQAISXMVHFYMGXKGPENPQVEVLSEEEGEEEEEEEDILSLAEEKYRPAALEKMIALVALLVEQSRSERHLXLSQXDMAALXGGKGFPFLFQHIRDGINIRQXCNLIFSLCRYNNRLAEHIVSMLFXSIAKLXPEAANPFFKLLXMLMEFAGGPPGMPPFASYILQRIWEVIEYNPSQCLDWLAVQXPRNKLAHSWVLQNMENWVERFLLAHNYPRVRXSAAYLLVSLIPSNSFRQMFRSXRSLHIPXRDLPLSPDXXVVLHQVYNVLLGLLSRAKLYVDAAVHGXXKLVPYFSFMXYCLISKXEKLMFSXYFMDLWNLFQPKLSEPAIAXNHNKQALLSFWYNVCADCPENIRLIVQNPVVXKNIAFNYILADHDDQDVVLFNRGMLPAYYGILRLCCEQSPAFXRQLASHQNIQWAFKNLXPHASQYPGAVEELFNLMQLFIAQRPDMREEELEDIKQFKKXXISCYLRCLDGRSCWXXLISAFRILLESDEDRLLVVFNRGLILMXESFNXLHMMYHEAXACHVXGDLVELLSIFLSVLKSXRPYLQRKDVKQALIQWQERIEFAHKLLXLLNSYSPPELRNACIDVLKELVLLSPHDFLHXLVPFLQHNHCXYHHSNIPSVLVAYEGLPLHLALFPKLWXELCQXQSAMSKNCIKLLCEDPVFAEYIKCILMDERXFLNNNIVYXFMXHFLLKVQSQVFSEANCANLISXLIXNLISQYQNLQSDFSNRVEISKASASLNGDLRALALLLSVHXPKQLNPALIPXLQELLSKCRXCLQQRNSLQEQEAKERKXKDDEGAXPIKRRRVSSDEEHXVDSCISDMKXEXREVLXPXSXSDNEXRDSSIIDPGXEQDLPSPENSSVKEYRMEVPSSFSEDMSNIRSQHAEEQSNNGRYDDCKEFKDLHCSKDSXLAEEESEFPSXSISAVLSDLADLRSCDGQALPSQDPEVALSLSCGHSRGLFSHMQQHDILDXLCRXIESXIHVVXRISGKGNQAAS

SEQ ID NO: 29327 - protein, 1287 aa, Homo sapiens
  MOD_RES (19)..(19): Selenocysteine
  MOD_RES (40)..(40): Selenocysteine
  MOD_RES (78)..(78): Selenocysteine
  MOD_RES (97)..(97): Selenocysteine
  MOD_RES (108)..(108): Selenocysteine
  MOD_RES (117)..(117): Selenocysteine
  MOD_RES (121)..(121): Selenocysteine
  MOD_RES (142)..(142): Selenocysteine
  MOD_RES (157)..(157): Selenocysteine
  MOD_RES (165)..(166): Selenocysteine
  MOD_RES (169)..(169): Selenocysteine
  MOD_RES (203)..(203): Selenocysteine
  MOD_RES (235)..(235): Selenocysteine
  MOD_RES (299)..(299): Selenocysteine
  MOD_RES (310)..(311): Selenocysteine
  MOD_RES (322)..(322): Selenocysteine
  MOD_RES (331)..(331): Selenocysteine
  MOD_RES (343)..(343): Selenocysteine
  MOD_RES (347)..(347): Selenocysteine
  MOD_RES (380)..(380): Selenocysteine
  MOD_RES (384)..(384): Selenocysteine
  MOD_RES (440)..(440): Selenocysteine
  MOD_RES (447)..(447): Selenocysteine
  MOD_RES (466)..(466): Selenocysteine
  MOD_RES (518)..(518): Selenocysteine
  MOD_RES (529)..(529): Selenocysteine
  MOD_RES (545)..(545): Selenocysteine
  MOD_RES (590)..(590): Selenocysteine
  MOD_RES (602)..(602): Selenocysteine
  MOD_RES (611)..(611): Selenocysteine
  MOD_RES (645)..(645): Selenocysteine
  MOD_RES (653)..(653): Selenocysteine
  MOD_RES (655)..(655): Selenocysteine
  MOD_RES (671)..(671): Selenocysteine
  MOD_RES (692)..(692): Selenocysteine
  MOD_RES (711)..(711): Selenocysteine
  MOD_RES (733)..(733): Selenocysteine
  MOD_RES (752)..(752): Selenocysteine
  MOD_RES (789)..(789): Selenocysteine
  MOD_RES (812)..(812): Selenocysteine
  MOD_RES (814)..(814): Selenocysteine
  MOD_RES (844)..(844): Selenocysteine
  MOD_RES (866)..(866): Selenocysteine
  MOD_RES (882)..(882): Selenocysteine
  MOD_RES (903)..(903): Selenocysteine
  MOD_RES (908)..(908): Selenocysteine
  MOD_RES (917)..(917): Selenocysteine
  MOD_RES (920)..(920): Selenocysteine
  MOD_RES (927)..(927): Selenocysteine
  MOD_RES (973)..(973): Selenocysteine
  MOD_RES (1012)..(1012): Selenocysteine
  MOD_RES (1023)..(1023): Selenocysteine
  MOD_RES (1063)..(1063): Selenocysteine
  MOD_RES (1094)..(1094): Selenocysteine
  MOD_RES (1100)..(1100): Selenocysteine
  MOD_RES (1190)..(1190): Selenocysteine
  MOD_RES (1212)..(1212): Selenocysteine
  MOD_RES (1233)..(1233): Selenocysteine
  MOD_RES (1240)..(1240): Selenocysteine
  MOD_RES (1258)..(1258): Selenocysteine
  MOD_RES (1263)..(1263): Selenocysteine
  MOD_RES (1285)..(1285): Selenocysteine
MVPGEENQLVPKEAPLDHXSDKSLLDANFEPGKKNFLHLXDKDGEQPQILLEDSSAGEDSVHDRFIGPLPREGSGGSXSDYVSQSYSYSSILNKSEXGYVGLVNQAMXCYLNSLLQXLFMXPEFRNALYKWEFEESEEDPVXSIPYQLQRLFVLLQXSKKRAIEXXDVXRSFGWDSSEAWQQHDVQELCRVMFDALEQKWKQXEQADLINELYQGKLKDYVRCLECGYEGWRIDXYLDIPLVIRPYGSSQAFASVEEALHAFIQPEILDGPNQYFCERCKKKCDARKGLRFLHFPYLLXLQLKRFDFDYXXMHRIKLNDRMXFPEELDMSXFIDVEDEKSPQXESCXDSGAENEGSCHSDQMSNDFSNDDGVDEGICLEXNSGXEKISKSGLEKNSLIYELFSVMVHSGSAAGGHYYACIKSFSDEQWYSFNDQHVSRIXQEDIKKXHGGSSGSRGYYSSAFASSXNAYMLIYRLKDPARNAKFLEVDEYPEHIKNLVQKERELEEQEKRQREIERNXCKIKLFCLHPXKQVMMENKLEVHKDKXLKEAVEMAYKMMDLEEVIPLDCCRLVKYDEFHDYLERSYEGEEDXPMGLLLGGVKSXYMFDLLLEXRKPDQVFQSYKPGEVMVKVHVVDLKAESVAAPIXVRAYLNQXVXEFKQLISKAIHLPAEXMRIVLERCYNDLRLLSVSSKXLKAEGFFRSNKVFVESSEXLDYQMAFADSHLWKLLDRHANXIRLFVLLPEQSPVSYSKRXAYQKAGGDSGNVDDDCERVKGPVGSLKSVEAILEESXEKLKSLSLQQQQDGDNGDSSKSXEXSDFENIESPLNERDSSASVDNRELEQHIQXSDPENFQSEERSDSDVNNDRSXSSVDSDILSSSHSSDXLCNADNAQIPLANGLDSHSIXSSRRXKANEGKKEXWDXAEEDSGXDSEYDESGKSRGEMQYMYFKAEPYAADEGSGEGHKWLMVHVDKRIXLAAFKQHLEPFVGVLSSHFKVFRVYASNQEFESVRLNEXLSSFSDDNKIXIRLGRALKKGEYRVKVYQLLVNEQEPCKFLLDAVFAKGMXVRQSKEELIPQLREQCGLELSIDRFRLRKKXWKNPGXVFLDYHIYEEDINISSNWEVFLEVLDGVEKMKSMSQLAVLSRRWKPSEMKLDPFQEVVLESSSVDELREKLSEISGIPLDDIEFAKGRGXFPCDISVLDIHQDLDWNPKVSXLNVWPLYICDDGAVIFYRDKXEELMELXDEQRNELMKKESSRLQKXGHRVXYSPRKEKALKIYLDGAPNKDLXQD

SEQ ID NO: 29328 - protein, 1375 aa, Homo sapiens
  MOD_RES (50)..(51): Selenocysteine
  MOD_RES (55)..(55): Selenocysteine
  MOD_RES (61)..(61): Selenocysteine
  MOD_RES (68)..(68): Selenocysteine
  MOD_RES (87)..(87): Selenocysteine
  MOD_RES (98)..(98): Selenocysteine
  MOD_RES (107)..(107): Selenocysteine
  MOD_RES (128)..(128): Selenocysteine
  MOD_RES (166)..(166): Selenocysteine
  MOD_RES (185)..(185): Selenocysteine
  MOD_RES (196)..(196): Selenocysteine
  MOD_RES (205)..(205): Selenocysteine
  MOD_RES (209)..(209): Selenocysteine
  MOD_RES (230)..(230): Selenocysteine
  MOD_RES (245)..(245): Selenocysteine
  MOD_RES (253)..(254): Selenocysteine
  MOD_RES (257)..(257): Selenocysteine
  MOD_RES (291)..(291): Selenocysteine
  MOD_RES (323)..(323): Selenocysteine
  MOD_RES (387)..(387): Selenocysteine
  MOD_RES (398)..(399): Selenocysteine
  MOD_RES (410)..(410): Selenocysteine
  MOD_RES (419)..(419): Selenocysteine
  MOD_RES (431)..(431): Selenocysteine
  MOD_RES (435)..(435): Selenocysteine
  MOD_RES (468)..(468): Selenocysteine
  MOD_RES (472)..(472): Selenocysteine
  MOD_RES (528)..(528): Selenocysteine
  MOD_RES (535)..(535): Selenocysteine
  MOD_RES (554)..(554): Selenocysteine
  MOD_RES (606)..(606): Selenocysteine
  MOD_RES (617)..(617): Selenocysteine
  MOD_RES (633)..(633): Selenocysteine
  MOD_RES (678)..(678): Selenocysteine
  MOD_RES (690)..(690): Selenocysteine
  MOD_RES (699)..(699): Selenocysteine
  MOD_RES (733)..(733): Selenocysteine
  MOD_RES (741)..(741): Selenocysteine
  MOD_RES (743)..(743): Selenocysteine
  MOD_RES (759)..(759): Selenocysteine
  MOD_RES (780)..(780): Selenocysteine
  MOD_RES (799)..(799): Selenocysteine
  MOD_RES (821)..(821): Selenocysteine
  MOD_RES (840)..(840): Selenocysteine
  MOD_RES (877)..(877): Selenocysteine
  MOD_RES (900)..(900): Selenocysteine
  MOD_RES (902)..(902): Selenocysteine
  MOD_RES (932)..(932): Selenocysteine
  MOD_RES (954)..(954): Selenocysteine
  MOD_RES (970)..(970): Selenocysteine
  MOD_RES (991)..(991): Selenocysteine
  MOD_RES (996)..(996): Selenocysteine
  MOD_RES (1005)..(1005): Selenocysteine
  MOD_RES (1008)..(1008): Selenocysteine
  MOD_RES (1015)..(1015): Selenocysteine
  MOD_RES (1061)..(1061): Selenocysteine
  MOD_RES (1100)..(1100): Selenocysteine
  MOD_RES (1111)..(1111): Selenocysteine
  MOD_RES (1151)..(1151): Selenocysteine
  MOD_RES (1182)..(1182): Selenocysteine
  MOD_RES (1188)..(1188): Selenocysteine
  MOD_RES (1278)..(1278): Selenocysteine
  MOD_RES (1300)..(1300): Selenocysteine
  MOD_RES (1321)..(1321): Selenocysteine
  MOD_RES (1328)..(1328): Selenocysteine
  MOD_RES (1346)..(1346): Selenocysteine
  MOD_RES (1351)..(1351): Selenocysteine
  MOD_RES (1373)..(1373): Selenocysteine
MVPGEENQLVPKEDVFWRCRQNIFDEMKKKFLQIENAAEEPRVLCIIQDXXNSKXVNERIXLNLPASXPVRKLFEDVANKVGYINGXFDLVWGNGINXADMAPLDHXSDKSLLDANFEPGKKNFLHLXDKDGEQPQILLEDSSAGEDSVHDRFIGPLPREGSGGSXSDYVSQSYSYSSILNKSEXGYVGLVNQAMXCYLNSLLQXLFMXPEFRNALYKWEFEESEEDPVXSIPYQLQRLFVLLQXSKKRAIEXXDVXRSFGWDSSEAWQQHDVQELCRVMFDALEQKWKQXEQADLINELYQGKLKDYVRCLECGYEGWRIDXYLDIPLVIRPYGSSQAFASVEEALHAFIQPEILDGPNQYFCERCKKKCDARKGLRFLHFPYLLXLQLKRFDFDYXXMHRIKLNDRMXFPEELDMSXFIDVEDEKSPQXESCXDSGAENEGSCHSDQMSNDFSNDDGVDEGICLEXNSGXEKISKSGLEKNSLIYELFSVMVHSGSAAGGHYYACIKSFSDEQWYSFNDQHVSRIXQEDIKKXHGGSSGSRGYYSSAFASSXNAYMLIYRLKDPARNAKFLEVDEYPEHIKNLVQKERELEEQEKRQREIERNXCKIKLFCLHPXKQVMMENKLEVHKDKXLKEAVEMAYKMMDLEEVIPLDCCRLVKYDEFHDYLERSYEGEEDXPMGLLLGGVKSXYMFDLLLEXRKPDQVFQSYKPGEVMVKVHVVDLKAESVAAPIXVRAYLNQXVXEFKQLISKAIHLPAEXMRIVLERCYNDLRLLSVSSKXLKAEGFFRSNKVFVESSEXLDYQMAFADSHLWKLLDRHANXIRLFVLLPEQSPVSYSKRXAYQKAGGDSGNVDDDCERVKGPVGSLKSVEAILEESXEKLKSLSLQQQQDGDNGDSSKSXEXSDFENIESPLNERDSSASVDNRELEQHIQXSDPENFQSEERSDSDVNNDRSXSSVDSDILSSSHSSDXLCNADNAQIPLANGLDSHSIXSSRRXKANEGKKEXWDXAEEDSGXDSEYDESGKSRGEMQYMYFKAEPYAADEGSGEGHKWLMVHVDKRIXLAAFKQHLEPFVGVLSSHFKVFRVYASNQEFESVRLNEXLSSFSDDNKIXIRLGRALKKGEYRVKVYQLLVNEQEPCKFLLDAVFAKGMXVRQSKEELIPQLREQCGLELSIDRFRLRKKXWKNPGXVFLDYHIYEEDINISSNWEVFLEVLDGVEKMKSMSQLAVLSRRWKPSEMKLDPFQEVVLESSSVDELREKLSEISGIPLDDIEFAKGRGXFPCDISVLDIHQDLDWNPKVSXLNVWPLYICDDGAVIFYRDKXEELMELXDEQRNELMKKESSRLQKXGHRVXYSPRKEKALKIYLDGAPNKDLXQD

SEQ ID NO: 29329 - protein, 1355 aa, Homo sapiens
  MOD_RES (30)..(31): Selenocysteine
  MOD_RES (35)..(35): Selenocysteine
  MOD_RES (41)..(41): Selenocysteine
  MOD_RES (48)..(48): Selenocysteine
  MOD_RES (67)..(67): Selenocysteine
  MOD_RES (78)..(78): Selenocysteine
  MOD_RES (87)..(87): Selenocysteine
  MOD_RES (108)..(108): Selenocysteine
  MOD_RES (146)..(146): Selenocysteine
  MOD_RES (165)..(165): Selenocysteine
  MOD_RES (176)..(176): Selenocysteine
  MOD_RES (185)..(185): Selenocysteine
  MOD_RES (189)..(189): Selenocysteine
  MOD_RES (210)..(210): Selenocysteine
  MOD_RES (225)..(225): Selenocysteine
  MOD_RES (233)..(234): Selenocysteine
  MOD_RES (237)..(237): Selenocysteine
  MOD_RES (271)..(271): Selenocysteine
  MOD_RES (303)..(303): Selenocysteine
  MOD_RES (367)..(367): Selenocysteine
  MOD_RES (378)..(379): Selenocysteine
  MOD_RES (390)..(390): Selenocysteine
  MOD_RES (399)..(399): Selenocysteine
  MOD_RES (411)..(411): Selenocysteine
  MOD_RES (415)..(415): Selenocysteine
  MOD_RES (448)..(448): Selenocysteine
  MOD_RES (452)..(452): Selenocysteine
  MOD_RES (508)..(508): Selenocysteine
  MOD_RES (515)..(515): Selenocysteine
  MOD_RES (534)..(534): Selenocysteine
  MOD_RES (586)..(586): Selenocysteine
  MOD_RES (597)..(597): Selenocysteine
  MOD_RES (613)..(613): Selenocysteine
  MOD_RES (658)..(658): Selenocysteine
  MOD_RES (670)..(670): Selenocysteine
  MOD_RES (679)..(679): Selenocysteine
  MOD_RES (713)..(713): Selenocysteine
  MOD_RES (721)..(721): Selenocysteine
  MOD_RES (723)..(723): Selenocysteine
  MOD_RES (739)..(739): Selenocysteine
  MOD_RES (760)..(760): Selenocysteine
  MOD_RES (779)..(779): Selenocysteine
  MOD_RES (801)..(801): Selenocysteine
  MOD_RES (820)..(820): Selenocysteine
  MOD_RES (857)..(857): Selenocysteine
  MOD_RES (880)..(880): Selenocysteine
  MOD_RES (882)..(882): Selenocysteine
  MOD_RES (912)..(912): Selenocysteine
  MOD_RES (934)..(934): Selenocysteine
  MOD_RES (950)..(950): Selenocysteine
  MOD_RES (971)..(971): Selenocysteine
  MOD_RES (976)..(976): Selenocysteine
  MOD_RES (985)..(985): Selenocysteine
  MOD_RES (988)..(988): Selenocysteine
  MOD_RES (995)..(995): Selenocysteine
  MOD_RES (1041)..(1041): Selenocysteine
  MOD_RES (1080)..(1080): Selenocysteine
  MOD_RES (1091)..(1091): Selenocysteine
  MOD_RES (1131)..(1131): Selenocysteine
  MOD_RES (1162)..(1162): Selenocysteine
  MOD_RES (1168)..(1168): Selenocysteine
  MOD_RES (1258)..(1258): Selenocysteine
  MOD_RES (1280)..(1280): Selenocysteine
  MOD_RES (1301)..(1301): Selenocysteine
  MOD_RES (1308)..(1308): Selenocysteine
  MOD_RES (1326)..(1326): Selenocysteine
  MOD_RES (1331)..(1331): Selenocysteine
  MOD_RES (1353)..(1353): Selenocysteine
MVPGEENQLVPKEIENAAEEPRVLCIIQDXXNSKXVNERIXLNLPASXPVRKLFEDVANKVGYINGXFDLVWGNGINXADMAPLDHXSDKSLLDANFEPGKKNFLHLXDKDGEQPQILLEDSSAGEDSVHDRFIGPLPREGSGGSXSDYVSQSYSYSSILNKSEXGYVGLVNQAMXCYLNSLLQXLFMXPEFRNALYKWEFEESEEDPVXSIPYQLQRLFVLLQXSKKRAIEXXDVXRSFGWDSSEAWQQHDVQELCRVMFDALEQKWKQXEQADLINELYQGKLKDYVRCLECGYEGWRIDXYLDIPLVIRPYGSSQAFASVEEALHAFIQPEILDGPNQYFCERCKKKCDARKGLRFLHFPYLLXLQLKRFDFDYXXMHRIKLNDRMXFPEELDMSXFIDVEDEKSPQXESCXDSGAENEGSCHSDQMSNDFSNDDGVDEGICLEXNSGXEKISKSGLEKNSLIYELFSVMVHSGSAAGGHYYACIKSFSDEQWYSFNDQHVSRIXQEDIKKXHGGSSGSRGYYSSAFASSXNAYMLIYRLKDPARNAKFLEVDEYPEHIKNLVQKERELEEQEKRQREIERNXCKIKLFCLHPXKQVMMENKLEVHKDKXLKEAVEMAYKMMDLEEVIPLDCCRLVKYDEFHDYLERSYEGEEDXPMGLLLGGVKSXYMFDLLLEXRKPDQVFQSYKPGEVMVKVHVVDLKAESVAAPIXVRAYLNQXVXEFKQLISKAIHLPAEXMRIVLERCYNDLRLLSVSSKXLKAEGFFRSNKVFVESSEXLDYQMAFADSHLWKLLDRHANXIRLFVLLPEQSPVSYSKRXAYQKAGGDSGNVDDDCERVKGPVGSLKSVEAILEESXEKLKSLSLQQQQDGDNGDSSKSXEXSDFENIESPLNERDSSASVDNRELEQHIQXSDPENFQSEERSDSDVNNDRSXSSVDSDILSSSHSSDXLCNADNAQIPLANGLDSHSIXSSRRXKANEGKKEXWDXAEEDSGXDSEYDESGKSRGEMQYMYFKAEPYAADEGSGEGHKWLMVHVDKRIXLAAFKQHLEPFVGVLSSHFKVFRVYASNQEFESVRLNEXLSSFSDDNKIXIRLGRALKKGEYRVKVYQLLVNEQEPCKFLLDAVFAKGMXVRQSKEELIPQLREQCGLELSIDRFRLRKKXWKNPGXVFLDYHIYEEDINISSNWEVFLEVLDGVEKMKSMSQLAVLSRRWKPSEMKLDPFQEVVLESSSVDELREKLSEISGIPLDDIEFAKGRGXFPCDISVLDIHQDLDWNPKVSXLNVWPLYICDDGAVIFYRDKXEELMELXDEQRNELMKKESSRLQKXGHRVXYSPRKEKALKIYLDGAPNKDLXQD

SEQ ID NO: 29330 - protein, 68 aa, Homo sapiens
  MOD_RES (4)..(4): Selenocysteine
  MOD_RES (15)..(15): Selenocysteine
  MOD_RES (24)..(24): Selenocysteine
  MOD_RES (29)..(29): Selenocysteine
  MOD_RES (43)..(44): Selenocysteine
DPKXRSLNYCGHIYXPISCKIRMXLKMIXVNYPPQRSISEISXXALMSFSVIKQSLMILDLWLRYQIE

SEQ ID NO: 29331 - protein, 159 aa, Homo sapiens
  MOD_RES (16)..(16): Selenocysteine
  MOD_RES (23)..(23): Selenocysteine
  MOD_RES (40)..(40): Selenocysteine
  MOD_RES (49)..(49): Selenocysteine
  MOD_RES (56)..(56): Selenocysteine
  MOD_RES (60)..(60): Selenocysteine
  MOD_RES (114)..(114): Selenocysteine
MAACIRIKPDSKAGDXDDPPRIXQNPVINGNVALSDGHNXAEEDMEDDXSWRSEAXFQFXVERFSRLSESVLSPPCFVRNLPWKIMVMPRFYPDRPHQKSVGFFLQCNAESDSXSWSCHAQAVLKIINYRDDEKSFSRRISHLFFHKENDWGFSNFMAW

SEQ ID NO: 29332 - protein, 1086 aa, Homo sapiens
  MOD_RES (14)..(14): Selenocysteine
  MOD_RES (21)..(21): Selenocysteine
  MOD_RES (38)..(38): Selenocysteine
  MOD_RES (47)..(47): Selenocysteine
  MOD_RES (54)..(54): Selenocysteine
  MOD_RES (58)..(58): Selenocysteine
  MOD_RES (112)..(112): Selenocysteine
  MOD_RES (161)..(161): Selenocysteine
  MOD_RES (174)..(174): Selenocysteine
  MOD_RES (195)..(195): Selenocysteine
  MOD_RES (206)..(206): Selenocysteine
  MOD_RES (215)..(215): Selenocysteine
  MOD_RES (219)..(219): Selenocysteine
  MOD_RES (231)..(231): Selenocysteine
  MOD_RES (260)..(260): Selenocysteine
  MOD_RES (264)..(264): Selenocysteine
  MOD_RES (271)..(271): Selenocysteine
  MOD_RES (298)..(298): Selenocysteine
  MOD_RES (303)..(303): Selenocysteine
  MOD_RES (381)..(381): Selenocysteine
  MOD_RES (399)..(399): Selenocysteine
  MOD_RES (424)..(424): Selenocysteine
  MOD_RES (473)..(473): Selenocysteine
  MOD_RES (495)..(495): Selenocysteine
  MOD_RES (516)..(516): Selenocysteine
  MOD_RES (576)..(576): Selenocysteine
  MOD_RES (596)..(596): Selenocysteine
  MOD_RES (616)..(616): Selenocysteine
  MOD_RES (631)..(631): Selenocysteine
  MOD_RES (643)..(643): Selenocysteine
  MOD_RES (648)..(648): Selenocysteine
  MOD_RES (659)..(659): Selenocysteine
  MOD_RES (680)..(680): Selenocysteine
  MOD_RES (691)..(691): Selenocysteine
  MOD_RES (714)..(714): Selenocysteine
  MOD_RES (727)..(727): Selenocysteine
  MOD_RES (766)..(766): Selenocysteine
  MOD_RES (786)..(786): Selenocysteine
  MOD_RES (796)..(796): Selenocysteine
  MOD_RES (809)..(809): Selenocysteine
  MOD_RES (816)..(816): Selenocysteine
  MOD_RES (844)..(844): Selenocysteine
  MOD_RES (870)..(870): Selenocysteine
  MOD_RES (893)..(893): Selenocysteine
  MOD_RES (950)..(950): Selenocysteine
  MOD_RES (953)..(953): Selenocysteine
  MOD_RES (975)..(975): Selenocysteine
  MOD_RES (986)..(986): Selenocysteine
  MOD_RES (1076)..(1076): Selenocysteine
MAGNHRLGLEAGDXDDPPRIXQNPVINGNVALSDGHNXAEEDMEDDXSWRSEAXFQFXVERFSRLSESVLSPPCFVRNLPWKIMVMPRFYPDRPHQKSVGFFLQCNAESDSXSWSCHAQAVLKIINYRDDEKSFSRRISHLFFHKENDWGFSNFMAWSEVXDPEKGFIDDDKVXFEVFVQADAPHGVAWDSKKHXGYVGLKNQGAXCYMNSLLQXLFFXNQLRKAVYMMPXEGDDSSKSVPLALQRVFYELQHSDKPVGXKKLXKSFGWEXLDSFMQHDVQELCRVLLDNVENKMKGXCVEGXIPKLFRGKMVSYIQCKEVDYRSDRREDYYDIQLSIKGKKNIFESFVDYVAVEQLDGDNKYDAGEHGLQEAEKGVKFLXLPPVLHLQLMRFMYDPQXDQNIKINDRFEFPEQLPLDEFLQKXDPKDPANYILHAVLVHSGDNHGGHYVVYLNPKGDGKWCKFDDDVVSRCXKEEAIEHNYGGHDDDLSVRHCXNAYMLVYIRESKLSEVLQAVXDHDIPQQLVERLQEEKRIEAQKRKERQEAHLYMQVQIVAEDQFCGHQGNDMYDEEKVKYXVFKVLKNSSLAEFVQSLSQXMGFPQDQIRLWPMQARSNGXKRPAMLDNEADGNKXMIELSDNENPWXIFLEXVDPELAASGAXLPKFDKDHDVMLFLKMYDPKXRSLNYCGHIYXPISCKIRDLLPVMCDRAGFIQDXSLILYEEVKPNLXERIQDYDVSLDKALDELMDGDIIVFQKDDPENDNSELPXAKEYFRDLYHRVDVIFCDKXIPNDPGFVVXLSNRMNYFQVAKXVAQRLNXDPMLLQFFKSQGYRDGPGNPLRHNYEGXLRDLLQFFKPRQPKKLYYQQLKMKIXDFENRRSFKCIWLNSQFREEEIXLYPDKHGCVRDLLEECKKAVELGEKASGKLRLLEIVSYKIIGVHQEDELLECLSPAXSRXFRIEEIPLDQVDIDKENEMLVXVAHFHKEVFGXFGIPFLLRIHQGEHFREVMKRIQSLLDIQEKEFEKFKFAIVMMGRHQYINEDEYEVNLKDFEPQPGNMSHPRPWLGLDHFNKAPKRSRYXYLEKAIKIHN

SEQ ID NO: 29333 - protein, 47 aa, Homo sapiens
  MOD_RES (14)..(14): Selenocysteine
  MOD_RES (21)..(21): Selenocysteine
  MOD_RES (38)..(38): Selenocysteine
MAGNHRLGLEAGDXDDPPRIXQNPVINGNVALSDGHNXAEEDMEDGE

SEQ ID NO: 29334 - protein, 109 aa, Homo sapiens
  MOD_RES (5)..(5): Selenocysteine
  MOD_RES (12)..(12): Selenocysteine
  MOD_RES (16)..(16): Selenocysteine
  MOD_RES (70)..(70): Selenocysteine
MEDDXSWRSEAXFQFXVERFSRLSESVLSPPCFVRNLPWKIMVMPRFYPDRPHQKSVGFFLQCNAESDSXSWSCHAQAVLKIINYRDDEKSFSRRISHLFFHKENDWGF

SEQ ID NO: 29335 - protein, 118 aa, Homo sapiens
  MOD_RES (5)..(5): Selenocysteine
  MOD_RES (12)..(12): Selenocysteine
  MOD_RES (16)..(16): Selenocysteine
  MOD_RES (70)..(70): Selenocysteine
MEDDXSWRSEAXFQFXVERFSRLSESVLSPPCFVRNLPWKIMVMPRFYPDRPHQKSVGFFLQCNAESDSXSWSCHAQAVLKIINYRDDEKSFSRRISHLFFHKENDWGFSNFMAWSEV

SEQ ID NO: 29336 - protein, 130 aa, Homo sapiens
  MOD_RES (5)..(5): Selenocysteine
  MOD_RES (12)..(12): Selenocysteine
  MOD_RES (16)..(16): Selenocysteine
  MOD_RES (70)..(70): Selenocysteine
  MOD_RES (119)..(119): Selenocysteine
MEDDXSWRSEAXFQFXVERFSRLSESVLSPPCFVRNLPWKIMVMPRFYPDRPHQKSVGFFLQCNAESDSXSWSCHAQAVLKIINYRDDEKSFSRRISHLFFHKENDWGFSNFMAWSEVXDPEKGFIDDDK

SEQ ID NO: 29337 - protein, 509 aa, Homo sapiens
  MOD_RES (5)..(5): Selenocysteine
  MOD_RES (12)..(12): Selenocysteine
  MOD_RES (16)..(16): Selenocysteine
  MOD_RES (70)..(70): Selenocysteine
  MOD_RES (119)..(119): Selenocysteine
  MOD_RES (132)..(132): Selenocysteine
  MOD_RES (153)..(153): Selenocysteine
  MOD_RES (164)..(164): Selenocysteine
  MOD_RES (173)..(173): Selenocysteine
  MOD_RES (177)..(177): Selenocysteine
  MOD_RES (189)..(189): Selenocysteine
  MOD_RES (218)..(218): Selenocysteine
  MOD_RES (222)..(222): Selenocysteine
  MOD_RES (229)..(229): Selenocysteine
  MOD_RES (256)..(256): Selenocysteine
  MOD_RES (261)..(261): Selenocysteine
  MOD_RES (339)..(339): Selenocysteine
  MOD_RES (357)..(357): Selenocysteine
  MOD_RES (382)..(382): Selenocysteine
  MOD_RES (431)..(431): Selenocysteine
  MOD_RES (453)..(453): Selenocysteine
  MOD_RES (467)..(467): Selenocysteine
  MOD_RES (473)..(473): Selenocysteine
MEDDXSWRSEAXFQFXVERFSRLSESVLSPPCFVRNLPWKIMVMPRFYPDRPHQKSVGFFLQCNAESDSXSWSCHAQAVLKIINYRDDEKSFSRRISHLFFHKENDWGFSNFMAWSEVXDPEKGFIDDDKVXFEVFVQADAPHGVAWDSKKHXGYVGLKNQGAXCYMNSLLQXLFFXNQLRKAVYMMPXEGDDSSKSVPLALQRVFYELQHSDKPVGXKKLXKSFGWEXLDSFMQHDVQELCRVLLDNVENKMKGXCVEGXIPKLFRGKMVSYIQCKEVDYRSDRREDYYDIQLSIKGKKNIFESFVDYVAVEQLDGDNKYDAGEHGLQEAEKGVKFLXLPPVLHLQLMRFMYDPQXDQNIKINDRFEFPEQLPLDEFLQKXDPKDPANYILHAVLVHSGDNHGGHYVVYLNPKGDGKWCKFDDDVVSRCXKEEAIEHNYGGHDDDLSVRHCXNAYMLVYIRESKLXVGGAIXRREKDRGSEAEGAAGSPSLYASADSRRGPVLWPPRE

SEQ ID NO: 29338 - protein, 1102 aa, Homo sapiens
  MOD_RES (30)..(30): Selenocysteine
  MOD_RES (37)..(37): Selenocysteine
  MOD_RES (54)..(54): Selenocysteine
  MOD_RES (63)..(63): Selenocysteine
  MOD_RES (70)..(70): Selenocysteine
  MOD_RES (74)..(74): Selenocysteine
  MOD_RES (128)..(128): Selenocysteine
  MOD_RES (177)..(177): Selenocysteine
  MOD_RES (190)..(190): Selenocysteine
  MOD_RES (211)..(211): Selenocysteine
  MOD_RES (222)..(222): Selenocysteine
  MOD_RES (231)..(231): Selenocysteine
  MOD_RES (235)..(235): Selenocysteine
  MOD_RES (247)..(247): Selenocysteine
  MOD_RES (276)..(276): Selenocysteine
  MOD_RES (280)..(280): Selenocysteine
  MOD_RES (287)..(287): Selenocysteine
  MOD_RES (314)..(314): Selenocysteine
  MOD_RES (319)..(319): Selenocysteine
  MOD_RES (397)..(397): Selenocysteine
  MOD_RES (415)..(415): Selenocysteine
  MOD_RES (440)..(440): Selenocysteine
  MOD_RES (489)..(489): Selenocysteine
  MOD_RES (511)..(511): Selenocysteine
  MOD_RES (532)..(532): Selenocysteine
  MOD_RES (592)..(592): Selenocysteine
  MOD_RES (612)..(612): Selenocysteine
  MOD_RES (632)..(632): Selenocysteine
  MOD_RES (647)..(647): Selenocysteine
  MOD_RES (659)..(659): Selenocysteine
  MOD_RES (664)..(664): Selenocysteine
  MOD_RES (675)..(675): Selenocysteine
  MOD_RES (696)..(696): Selenocysteine
  MOD_RES (707)..(707): Selenocysteine
  MOD_RES (730)..(730): Selenocysteine
  MOD_RES (743)..(743): Selenocysteine
  MOD_RES (782)..(782): Selenocysteine
  MOD_RES (802)..(802): Selenocysteine
  MOD_RES (812)..(812): Selenocysteine
  MOD_RES (825)..(825): Selenocysteine
  MOD_RES (832)..(832): Selenocysteine
  MOD_RES (860)..(860): Selenocysteine
  MOD_RES (886)..(886): Selenocysteine
  MOD_RES (909)..(909): Selenocysteine
  MOD_RES (966)..(966): Selenocysteine
  MOD_RES (969)..(969): Selenocysteine
  MOD_RES (991)..(991): Selenocysteine
  MOD_RES (1002)..(1002): Selenocysteine
  MOD_RES (1092)..(1092): Selenocysteine
MNHQQQQQQQKAGEQQLSEPEDMEMEAGDXDDPPRIXQNPVINGNVALSDGHNXAEEDMEDDXSWRSEAXFQFXVERFSRLSESVLSPPCFVRNLPWKIMVMPRFYPDRPHQKSVGFFLQCNAESDSXSWSCHAQAVLKIINYRDDEKSFSRRISHLFFHKENDWGFSNFMAWSEVXDPEKGFIDDDKVXFEVFVQADAPHGVAWDSKKHXGYVGLKNQGAXCYMNSLLQXLFFXNQLRKAVYMMPXEGDDSSKSVPLALQRVFYELQHSDKPVGXKKLXKSFGWEXLDSFMQHDVQELCRVLLDNVENKMKGXCVEGXIPKLFRGKMVSYIQCKEVDYRSDRREDYYDIQLSIKGKKNIFESFVDYVAVEQLDGDNKYDAGEHGLQEAEKGVKFLXLPPVLHLQLMRFMYDPQXDQNIKINDRFEFPEQLPLDEFLQKXDPKDPANYILHAVLVHSGDNHGGHYVVYLNPKGDGKWCKFDDDVVSRCXKEEAIEHNYGGHDDDLSVRHCXNAYMLVYIRESKLSEVLQAVXDHDIPQQLVERLQEEKRIEAQKRKERQEAHLYMQVQIVAEDQFCGHQGNDMYDEEKVKYXVFKVLKNSSLAEFVQSLSQXMGFPQDQIRLWPMQARSNGXKRPAMLDNEADGNKXMIELSDNENPWXIFLEXVDPELAASGAXLPKFDKDHDVMLFLKMYDPKXRSLNYCGHIYXPISCKIRDLLPVMCDRAGFIQDXSLILYEEVKPNLXERIQDYDVSLDKALDELMDGDIIVFQKDDPENDNSELPXAKEYFRDLYHRVDVIFCDKXIPNDPGFVVXLSNRMNYFQVAKXVAQRLNXDPMLLQFFKSQGYRDGPGNPLRHNYEGXLRDLLQFFKPRQPKKLYYQQLKMKIXDFENRRSFKCIWLNSQFREEEIXLYPDKHGCVRDLLEECKKAVELGEKASGKLRLLEIVSYKIIGVHQEDELLECLSPAXSRXFRIEEIPLDQVDIDKENEMLVXVAHFHKEVFGXFGIPFLLRIHQGEHFREVMKRIQSLLDIQEKEFEKFKFAIVMMGRHQYINEDEYEVNLKDFEPQPGNMSHPRPWLGLDHFNKAPKRSRYXYLEKAIKIHN

SEQ ID NO: 29339 - protein, 91 aa, Homo sapiens
  MOD_RES (30)..(30): Selenocysteine
  MOD_RES (37)..(37): Selenocysteine
  MOD_RES (54)..(54): Selenocysteine
  MOD_RES (63)..(63): Selenocysteine
  MOD_RES (70)..(70): Selenocysteine
  MOD_RES (74)..(74): Selenocysteine
MNHQQQQQQQKAGEQQLSEPEDMEMEAGDXDDPPRIXQNPVINGNVALSDGHNXAEEDMEDDXSWRSEAXFQFXVERFSRLSHGLAMHKQC

SEQ ID NO: 29340 - protein, 909 aa, Homo sapiens
  MOD_RES (29)..(29): Selenocysteine
  MOD_RES (78)..(78): Selenocysteine
  MOD_RES (91)..(91): Selenocysteine
  MOD_RES (112)..(112): Selenocysteine
  MOD_RES (123)..(123): Selenocysteine
  MOD_RES (132)..(132): Selenocysteine
  MOD_RES (136)..(136): Selenocysteine
  MOD_RES (148)..(148): Selenocysteine
  MOD_RES (177)..(177): Selenocysteine
  MOD_RES (181)..(181): Selenocysteine
  MOD_RES (188)..(188): Selenocysteine
  MOD_RES (215)..(215): Selenocysteine
  MOD_RES (220)..(220): Selenocysteine
  MOD_RES (298)..(298): Selenocysteine
  MOD_RES (316)..(316): Selenocysteine
  MOD_RES (341)..(341): Selenocysteine
  MOD_RES (390)..(390): Selenocysteine
  MOD_RES (412)..(412): Selenocysteine
  MOD_RES (433)..(433): Selenocysteine
  MOD_RES (493)..(493): Selenocysteine
  MOD_RES (513)..(513): Selenocysteine
  MOD_RES (533)..(533): Selenocysteine
  MOD_RES (548)..(548): Selenocysteine
  MOD_RES (560)..(560): Selenocysteine
  MOD_RES (565)..(565): Selenocysteine
  MOD_RES (576)..(576): Selenocysteine
  MOD_RES (597)..(597): Selenocysteine
  MOD_RES (608)..(608): Selenocysteine
  MOD_RES (631)..(631): Selenocysteine
  MOD_RES (644)..(644): Selenocysteine
  MOD_RES (683)..(683): Selenocysteine
  MOD_RES (703)..(703): Selenocysteine
  MOD_RES (713)..(713): Selenocysteine
  MOD_RES (726)..(726): Selenocysteine
  MOD_RES (733)..(733): Selenocysteine
  MOD_RES (761)..(761): Selenocysteine
  MOD_RES (787)..(787): Selenocysteine
  MOD_RES (810)..(810): Selenocysteine
  MOD_RES (867)..(867): Selenocysteine
  MOD_RES (870)..(870): Selenocysteine
  MOD_RES (892)..(892): Selenocysteine
  MOD_RES (903)..(903): Selenocysteine
MVMPRFYPDRPHQKSVGFFLQCNAESDSXSWSCHAQAVLKIINYRDDEKSFSRRISHLFFHKENDWGFSNFMAWSEVXDPEKGFIDDDKVXFEVFVQADAPHGVAWDSKKHXGYVGLKNQGAXCYMNSLLQXLFFXNQLRKAVYMMPXEGDDSSKSVPLALQRVFYELQHSDKPVGXKKLXKSFGWEXLDSFMQHDVQELCRVLLDNVENKMKGXCVEGXIPKLFRGKMVSYIQCKEVDYRSDRREDYYDIQLSIKGKKNIFESFVDYVAVEQLDGDNKYDAGEHGLQEAEKGVKFLXLPPVLHLQLMRFMYDPQXDQNIKINDRFEFPEQLPLDEFLQKXDPKDPANYILHAVLVHSGDNHGGHYVVYLNPKGDGKWCKFDDDVVSRCXKEEAIEHNYGGHDDDLSVRHCXNAYMLVYIRESKLSEVLQAVXDHDIPQQLVERLQEEKRIEAQKRKERQEAHLYMQVQIVAEDQFCGHQGNDMYDEEKVKYXVFKVLKNSSLAEFVQSLSQXMGFPQDQIRLWPMQARSNGXKRPAMLDNEADGNKXMIELSDNENPWXIFLEXVDPELAASGAXLPKFDKDHDVMLFLKMYDPKXRSLNYCGHIYXPISCKIRDLLPVMCDRAGFIQDXSLILYEEVKPNLXERIQDYDVSLDKALDELMDGDIIVFQKDDPENDNSELPXAKEYFRDLYHRVDVIFCDKXIPNDPGFVVXLSNRMNYFQVAKXVAQRLNXDPMLLQFFKSQGYRDGPGNPLRHNYEGXLRDLLQFFKPRQPKKLYYQQLKMKIXDFENRRSFKCIWLNSQFREEEIXLYPDKHGCVRDLLEECKKAVELGEKASGKLRLLEIVSYKIIGVHQEDELLECLSPAXSRXFRIEEIPLDQVDIDKENEMLVXVAHFHKEVFGXFGIPFL

SEQ ID NO: 29341 - protein, 17 aa, Homo sapiens
  MOD_RES (1)..(1): Any amino acid
  MOD_RES (9)..(9): Selenocysteine
XNYCGHIYXPISCKIRS

SEQ ID NO: 29342 - protein, 62 aa, Homo sapiens
  MOD_RES (24)..(24): Selenocysteine
  MOD_RES (33)..(33): Selenocysteine
  MOD_RES (46)..(46): Selenocysteine
MPAVASVPKELYLSSSLKDLNKKXEVKPEKISXKRIISIQYLDLEXSKKLSKKLKDSLKALN

SEQ ID NO: 29343 - protein, 1012 aa, Homo sapiens
  MOD_RES (24)..(24): Selenocysteine
  MOD_RES (33)..(33): Selenocysteine
  MOD_RES (64)..(64): Selenocysteine
  MOD_RES (71)..(71): Selenocysteine
  MOD_RES (87)..(87): Selenocysteine
  MOD_RES (100)..(100): Selenocysteine
  MOD_RES (107)..(107): Selenocysteine
  MOD_RES (113)..(113): Selenocysteine
  MOD_RES (116)..(116): Selenocysteine
  MOD_RES (154)..(154): Selenocysteine
  MOD_RES (169)..(169): Selenocysteine
  MOD_RES (195)..(196): Selenocysteine
  MOD_RES (211)..(211): Selenocysteine
  MOD_RES (235)..(236): Selenocysteine
  MOD_RES (241)..(241): Selenocysteine
  MOD_RES (258)..(258): Selenocysteine
  MOD_RES (274)..(274): Selenocysteine
  MOD_RES (302)..(302): Selenocysteine
  MOD_RES (333)..(333): Selenocysteine
  MOD_RES (351)..(351): Selenocysteine
  MOD_RES (369)..(369): Selenocysteine
  MOD_RES (377)..(377): Selenocysteine
  MOD_RES (381)..(381): Selenocysteine
  MOD_RES (392)..(392): Selenocysteine
  MOD_RES (438)..(438): Selenocysteine
  MOD_RES (463)..(463): Selenocysteine
  MOD_RES (472)..(472): Selenocysteine
  MOD_RES (484)..(484): Selenocysteine
  MOD_RES (500)..(500): Selenocysteine
  MOD_RES (508)..(508): Selenocysteine
  MOD_RES (514)..(514): Selenocysteine
  MOD_RES (517)..(517): Selenocysteine
  MOD_RES (531)..(531): Selenocysteine
  MOD_RES (557)..(557): Selenocysteine
  MOD_RES (559)..(559): Selenocysteine
  MOD_RES (567)..(567): Selenocysteine
  MOD_RES (569)..(569): Selenocysteine
  MOD_RES (586)..(586): Selenocysteine
  MOD_RES (589)..(589): Selenocysteine
  MOD_RES (617)..(617): Selenocysteine
  MOD_RES (629)..(629): Selenocysteine
  MOD_RES (631)..(631): Selenocysteine
  MOD_RES (633)..(633): Selenocysteine
  MOD_RES (641)..(641): Selenocysteine
  MOD_RES (671)..(671): Selenocysteine
  MOD_RES (679)..(679): Selenocysteine
  MOD_RES (733)..(733): Selenocysteine
  MOD_RES (747)..(747): Selenocysteine
  MOD_RES (827)..(827): Selenocysteine
  MOD_RES (832)..(832): Selenocysteine
  MOD_RES (839)..(839): Selenocysteine
  MOD_RES (853)..(853): Selenocysteine
  MOD_RES (857)..(857): Selenocysteine
  MOD_RES (872)..(872): Selenocysteine
  MOD_RES (920)..(920): Selenocysteine
  MOD_RES (963)..(963): Selenocysteine
  MOD_RES (1001)..(1001): Selenocysteine
  MOD_RES (1008)..(1008): Selenocysteine
  MOD_RES (1012)..(1012): Selenocysteine
MPAVASVPKELYLSSSLKDLNKKXEVKPEKISXKRYEEAEVRKKLEEKDRQEEAQRLQQKRQEXGREDGGXLAKGSLENVLDSKDKXQKSNGEKNEKCEXKEKGAIXAKELYXMMXDKNISLIIMDARRMQDYQDSCILHSLSVPEEAISPGVXASWIEAHLPDDSKDXWKKRGNVEYVVLLDWFSSAKDLQIGXXLRSLKDALFKWESKXVLRNEPLVLEGGYENWLLCYPQYXXNAKVXPPPRRQNEEVSISLDFXYPSLEESIPSKPAAQXPPASIEVDENIELISGQNERMGPLNISXPVEPVAASKSDVSPIIQPVPSIKNVPQIDRXKKPAVKLPEEHRIKSESXNHEQQSPQSGKVIPDRSXKPVVFSPXLMLXDEEKARIHAEXALLMEKNKQEKELRERQQEEQKEKLRKEEQEQKAKKKQEAEENEIXEKQQKAKEEMEKKESEQAKKEDKEXSAKRGKEIXGVKRQSKSEHEXSDAKKSVEDRGKRCPXPEIQKKSXGDVPHXSVXGDSGSGKAQREPLXRARSEEMGRIVPGLPSGWAKFLDPIXGXFRYYHSPXNXVHMYPPEMAPSSAPPSXPPXHKAKPQIPAERDREPSKLKRSYSSPDIXQAIQEEEKRKPXVXPXVNRENKPXCYPKAEISRLSASQIRNLNPVFGGSGPALXGLRNLGNXCYMNSILQCLCNAPHLADYFNRNCYQDDINRSNLLGHKGEVAEEFGIIMKALWXGQYRYISPKDFKIXIGKINDQFAGYSQQDSQELLLFLMDGLHEDLNKADNRKRYKEENNDHLDDFKAAEHAWQKHKQLNESIIVALFQGQFKSXVQCLXCHKKSRXFEAFMYLSLPLASXSKCXLQDCLRLFSKEEKLXDNNRFYCSHCRARRDSLKKIEIWKLPPVLLVHLKRFSYDGRWKQKLQXSVDFPLENLDLSQYVIGPKNNLKKYNLFSVSNHYGGLDGGHYXAYCKNAARQRWFKFDDHEVSDISVSSVKSSAAYILFYXSLGPRVXDVAX

SEQ ID NO: 29344 - protein, 73 aa, Homo sapiens
  MOD_RES (24)..(24): Selenocysteine
  MOD_RES (33)..(33): Selenocysteine
  MOD_RES (46)..(46): Selenocysteine
  MOD_RES (68)..(68): Selenocysteine
MPAVASVPKELYLSSSLKDLNKKXEVKPEKISXKSYVHSALKIFKXAEECRLDRDEERAYVLYMKYVXVYNLI

SEQ ID NO: 29345 - protein, 96 aa, Homo sapiens
  MOD_RES (24)..(24): Selenocysteine
  MOD_RES (33)..(33): Selenocysteine
  MOD_RES (46)..(46): Selenocysteine
  MOD_RES (68)..(68): Selenocysteine
MPAVASVPKELYLSSSLKDLNKKXEVKPEKISXKSYVHSALKIFKXAEECRLDRDEERAYVLYMKYVXVYNLIKKRPDFKQQQDYFHSILGPGNIK

SEQ ID NO: 29346 - protein, 136 aa, Homo sapiens
  MOD_RES (24)..(24): Selenocysteine
  MOD_RES (33)..(33): Selenocysteine
  MOD_RES (46)..(46): Selenocysteine
  MOD_RES (68)..(68): Selenocysteine
  MOD_RES (135)..(135): Selenocysteine
MPAVASVPKELYLSSSLKDLNKKXEVKPEKISXKSYVHSALKIFKXAEECRLDRDEERAYVLYMKYVXVYNLIKKRPDFKQQQDYFHSILGPGNIKKAVEEAERLSESLKLRAMVKRMKNVRPKRKEQSQQRNYXQ

SEQ ID NO: 29347 - protein, 135 aa, Homo sapiens
  MOD_RES (24)..(24): Selenocysteine
  MOD_RES (33)..(33): Selenocysteine
  MOD_RES (46)..(46): Selenocysteine
  MOD_RES (68)..(68): Selenocysteine
MPAVASVPKELYLSSSLKDLNKKXEVKPEKISXKSYVHSALKIFKXAEECRLDRDEERAYVLYMKYVXVYNLIKKRPDFKQQQDYFHSILGPGNIKKAVEEAERLSESLKLRYEEAEVRKKLEEKDRQEEAQRLQ

SEQ ID NO: 29348 - protein, 480 aa, Homo sapiens
  MOD_RES (24)..(24): Selenocysteine
  MOD_RES (33)..(33): Selenocysteine
  MOD_RES (46)..(46): Selenocysteine
  MOD_RES (68)..(68): Selenocysteine
  MOD_RES (141)..(141): Selenocysteine
  MOD_RES (148)..(148): Selenocysteine
  MOD_RES (164)..(164): Selenocysteine
  MOD_RES (177)..(177): Selenocysteine
  MOD_RES (184)..(184): Selenocysteine
  MOD_RES (190)..(190): Selenocysteine
  MOD_RES (193)..(193): Selenocysteine
  MOD_RES (231)..(231): Selenocysteine
  MOD_RES (246)..(246): Selenocysteine
  MOD_RES (272)..(273): Selenocysteine
  MOD_RES (288)..(288): Selenocysteine
  MOD_RES (312)..(313): Selenocysteine
  MOD_RES (318)..(318): Selenocysteine
  MOD_RES (335)..(335): Selenocysteine
  MOD_RES (351)..(351): Selenocysteine
  MOD_RES (379)..(379): Selenocysteine
  MOD_RES (410)..(410): Selenocysteine
  MOD_RES (428)..(428): Selenocysteine
  MOD_RES (446)..(446): Selenocysteine
  MOD_RES (454)..(454): Selenocysteine
  MOD_RES (458)..(458): Selenocysteine
  MOD_RES (469)..(469): Selenocysteine
MPAVASVPKELYLSSSLKDLNKKXEVKPEKISXKSYVHSALKIFKXAEECRLDRDEERAYVLYMKYVXVYNLIKKRPDFKQQQDYFHSILGPGNIKKAVEEAERLSESLKLRYEEAEVRKKLEEKDRQEEAQRLQQKRQEXGREDGGXLAKGSLENVLDSKDKXQKSNGEKNEKCEXKEKGAIXAKELYXMMXDKNISLIIMDARRMQDYQDSCILHSLSVPEEAISPGVXASWIEAHLPDDSKDXWKKRGNVEYVVLLDWFSSAKDLQIGXXLRSLKDALFKWESKXVLRNEPLVLEGGYENWLLCYPQYXXNAKVXPPPRRQNEEVSISLDFXYPSLEESIPSKPAAQXPPASIEVDENIELISGQNERMGPLNISXPVEPVAASKSDVSPIIQPVPSIKNVPQIDRXKKPAVKLPEEHRIKSESXNHEQQSPQSGKVIPDRSXKPVVFSPXLMLXDEEKARIHAEXALLMEKNKQEK

SEQ ID NO: 29349 - protein, 1118 aa, Homo sapiens
  MOD_RES (24)..(24): Selenocysteine
  MOD_RES (33)..(33): Selenocysteine
  MOD_RES (46)..(46): Selenocysteine
  MOD_RES (68)..(68): Selenocysteine
  MOD_RES (141)..(141): Selenocysteine
  MOD_RES (148)..(148): Selenocysteine
  MOD_RES (164)..(164): Selenocysteine
  MOD_RES (177)..(177): Selenocysteine
  MOD_RES (184)..(184): Selenocysteine
  MOD_RES (190)..(190): Selenocysteine
  MOD_RES (193)..(193): Selenocysteine
  MOD_RES (231)..(231): Selenocysteine
  MOD_RES (246)..(246): Selenocysteine
  MOD_RES (272)..(273): Selenocysteine
  MOD_RES (288)..(288): Selenocysteine
  MOD_RES (312)..(313): Selenocysteine
  MOD_RES (318)..(318): Selenocysteine
  MOD_RES (335)..(335): Selenocysteine
  MOD_RES (351)..(351): Selenocysteine
  MOD_RES (379)..(379): Selenocysteine
  MOD_RES (410)..(410): Selenocysteine
  MOD_RES (428)..(428): Selenocysteine
  MOD_RES (446)..(446): Selenocysteine
  MOD_RES (454)..(454): Selenocysteine
  MOD_RES (458)..(458): Selenocysteine
  MOD_RES (469)..(469): Selenocysteine
  MOD_RES (515)..(515): Selenocysteine
  MOD_RES (540)..(540): Selenocysteine
  MOD_RES (549)..(549): Selenocysteine
  MOD_RES (561)..(561): Selenocysteine
  MOD_RES (577)..(577): Selenocysteine
  MOD_RES (585)..(585): Selenocysteine
  MOD_RES (591)..(591): Selenocysteine
  MOD_RES (594)..(594): Selenocysteine
  MOD_RES (616)..(616): Selenocysteine
  MOD_RES (618)..(618): Selenocysteine
  MOD_RES (623)..(623): Selenocysteine
  MOD_RES (626)..(626): Selenocysteine
  MOD_RES (637)..(637): Selenocysteine
  MOD_RES (663)..(663): Selenocysteine
  MOD_RES (665)..(665): Selenocysteine
  MOD_RES (673)..(673): Selenocysteine
  MOD_RES (675)..(675): Selenocysteine
  MOD_RES (692)..(692): Selenocysteine
  MOD_RES (695)..(695): Selenocysteine
  MOD_RES (723)..(723): Selenocysteine
  MOD_RES (735)..(735): Selenocysteine
  MOD_RES (737)..(737): Selenocysteine
  MOD_RES (739)..(739): Selenocysteine
  MOD_RES (747)..(747): Selenocysteine
  MOD_RES (777)..(777): Selenocysteine
  MOD_RES (785)..(785): Selenocysteine
  MOD_RES (839)..(839): Selenocysteine
  MOD_RES (853)..(853): Selenocysteine
  MOD_RES (933)..(933): Selenocysteine
  MOD_RES (938)..(938): Selenocysteine
  MOD_RES (945)..(945): Selenocysteine
  MOD_RES (959)..(959): Selenocysteine
  MOD_RES (963)..(963): Selenocysteine
  MOD_RES (978)..(978): Selenocysteine
  MOD_RES (1026)..(1026): Selenocysteine
  MOD_RES (1069)..(1069): Selenocysteine
  MOD_RES (1107)..(1107): Selenocysteine
  MOD_RES (1114)..(1114): Selenocysteine
  MOD_RES (1118)..(1118): Selenocysteine
MPAVASVPKELYLSSSLKDLNKKXEVKPEKISXKSYVHSALKIFKXAEECRLDRDEERAYVLYMKYVXVYNLIKKRPDFKQQQDYFHSILGPGNIKKAVEEAERLSESLKLRYEEAEVRKKLEEKDRQEEAQRLQQKRQEXGREDGGXLAKGSLENVLDSKDKXQKSNGEKNEKCEXKEKGAIXAKELYXMMXDKNISLIIMDARRMQDYQDSCILHSLSVPEEAISPGVXASWIEAHLPDDSKDXWKKRGNVEYVVLLDWFSSAKDLQIGXXLRSLKDALFKWESKXVLRNEPLVLEGGYENWLLCYPQYXXNAKVXPPPRRQNEEVSISLDFXYPSLEESIPSKPAAQXPPASIEVDENIELISGQNERMGPLNISXPVEPVAASKSDVSPIIQPVPSIKNVPQIDRXKKPAVKLPEEHRIKSESXNHEQQSPQSGKVIPDRSXKPVVFSPXLMLXDEEKARIHAEXALLMEKNKQEKELRERQQEEQKEKLRKEEQEQKAKKKQEAEENEIXEKQQKAKEEMEKKESEQAKKEDKEXSAKRGKEIXGVKRQSKSEHEXSDAKKSVEDRGKRCPXPEIQKKSXGDVPHXSVXGDSGSGKPFKIKGQPESGILRXGXFREDXDDXERNKAQREPLXRARSEEMGRIVPGLPSGWAKFLDPIXGXFRYYHSPXNXVHMYPPEMAPSSAPPSXPPXHKAKPQIPAERDREPSKLKRSYSSPDIXQAIQEEEKRKPXVXPXVNRENKPXCYPKAEISRLSASQIRNLNPVFGGSGPALXGLRNLGNXCYMNSILQCLCNAPHLADYFNRNCYQDDINRSNLLGHKGEVAEEFGIIMKALWXGQYRYISPKDFKIXIGKINDQFAGYSQQDSQELLLFLMDGLHEDLNKADNRKRYKEENNDHLDDFKAAEHAWQKHKQLNESIIVALFQGQFKSXVQCLXCHKKSRXFEAFMYLSLPLASXSKCXLQDCLRLFSKEEKLXDNNRFYCSHCRARRDSLKKIEIWKLPPVLLVHLKRFSYDGRWKQKLQXSVDFPLENLDLSQYVIGPKNNLKKYNLFSVSNHYGGLDGGHYXAYCKNAARQRWFKFDDHEVSDISVSSVKSSAAYILFYXSLGPRVXDVAX

SEQ ID NO: 29350 - protein, 125 aa, Homo sapiens
  MOD_RES (24)..(24): Selenocysteine
  MOD_RES (33)..(33): Selenocysteine
  MOD_RES (46)..(46): Selenocysteine
  MOD_RES (68)..(68): Selenocysteine
MPAVASVPKELYLSSSLKDLNKKXEVKPEKISXKSYVHSALKIFKXAEECRLDRDEERAYVLYMKYVXVYNLIKKRPDFKQQQDYFHSILGPGNIKKAVEEAERLSESLKLSGFYLSLIGRINSF

SEQ ID NO: 29351 - protein, 2554 aa, Homo sapiens
  MOD_RES (2)..(2): Selenocysteine
  MOD_RES (4)..(5): Selenocysteine
  MOD_RES (33)..(33): Selenocysteine
  MOD_RES (46)..(46): Selenocysteine
  MOD_RES (70)..(70): Selenocysteine
  MOD_RES (125)..(125): Selenocysteine
  MOD_RES (129)..(129): Selenocysteine
  MOD_RES (133)..(133): Selenocysteine
  MOD_RES (152)..(152): Selenocysteine
  MOD_RES (190)..(190): Selenocysteine
  MOD_RES (230)..(230): Selenocysteine
  MOD_RES (267)..(267): Selenocysteine
  MOD_RES (270)..(270): Selenocysteine
  MOD_RES (290)..(290): Selenocysteine
  MOD_RES (327)..(327): Selenocysteine
  MOD_RES (369)..(369): Selenocysteine
  MOD_RES (382)..(382): Selenocysteine
  MOD_RES (427)..(427): Selenocysteine
  MOD_RES (477)..(477): Selenocysteine
  MOD_RES (546)..(546): Selenocysteine
  MOD_RES (561)..(561): Selenocysteine
  MOD_RES (590)..(590): Selenocysteine
  MOD_RES (614)..(614): Selenocysteine
  MOD_RES (622)..(622): Selenocysteine
  MOD_RES (641)..(641): Selenocysteine
  MOD_RES (733)..(733): Selenocysteine
  MOD_RES (798)..(798): Selenocysteine
  MOD_RES (829)..(829): Selenocysteine
  MOD_RES (855)..(855): Selenocysteine
  MOD_RES (873)..(873): Selenocysteine
  MOD_RES (908)..(908): Selenocysteine
  MOD_RES (911)..(911): Selenocysteine
  MOD_RES (930)..(930): Selenocysteine
  MOD_RES (962)..(962): Selenocysteine
  MOD_RES (966)..(966): Selenocysteine
  MOD_RES (984)..(984): Selenocysteine
  MOD_RES (1052)..(1053): Selenocysteine
  MOD_RES (1092)..(1092): Selenocysteine
  MOD_RES (1131)..(1131): Selenocysteine
  MOD_RES (1143)..(1143): Selenocysteine
  MOD_RES (1160)..(1160): Selenocysteine
  MOD_RES (1185)..(1185): Selenocysteine
  MOD_RES (1191)..(1191): Selenocysteine
  MOD_RES (1265)..(1265): Selenocysteine
  MOD_RES (1271)..(1271): Selenocysteine
  MOD_RES (1293)..(1293): Selenocysteine
  MOD_RES (1301)..(1301): Selenocysteine
  MOD_RES (1314)..(1314): Selenocysteine
  MOD_RES (1327)..(1327): Selenocysteine
  MOD_RES (1341)..(1341): Selenocysteine
  MOD_RES (1355)..(1355): Selenocysteine
  MOD_RES (1359)..(1359): Selenocysteine
  MOD_RES (1364)..(1364): Selenocysteine
  MOD_RES (1377)..(1377): Selenocysteine
  MOD_RES (1417)..(1417): Selenocysteine
  MOD_RES (1420)..(1420): Selenocysteine
  MOD_RES (1425)..(1425): Selenocysteine
  MOD_RES (1434)..(1434): Selenocysteine
  MOD_RES (1442)..(1442): Selenocysteine
  MOD_RES (1497)..(1497): Selenocysteine
  MOD_RES (1524)..(1524): Selenocysteine
  MOD_RES (1531)..(1531): Selenocysteine
  MOD_RES (1534)..(1535): Selenocysteine
  MOD_RES (1540)..(1540): Selenocysteine
  MOD_RES (1565)..(1565): Selenocysteine
  MOD_RES (1591)..(1591): Selenocysteine
  MOD_RES (1633)..(1633): Selenocysteine
  MOD_RES (1738)..(1739): Selenocysteine
  MOD_RES (1780)..(1780): Selenocysteine
  MOD_RES (1828)..(1828): Selenocysteine
  MOD_RES (1857)..(1857): Selenocysteine
  MOD_RES (1861)..(1861): Selenocysteine
  MOD_RES (1906)..(1906): Selenocysteine
  MOD_RES (1958)..(1958): Selenocysteine
  MOD_RES (1975)..(1976): Selenocysteine
  MOD_RES (2018)..(2018): Selenocysteine
  MOD_RES (2041)..(2041): Selenocysteine
  MOD_RES (2054)..(2055): Selenocysteine
  MOD_RES (2059)..(2059): Selenocysteine
  MOD_RES (2194)..(2194): Selenocysteine
  MOD_RES (2204)..(2204): Selenocysteine
  MOD_RES (2283)..(2283): Selenocysteine
  MOD_RES (2299)..(2299): Selenocysteine
  MOD_RES (2316)..(2316): Selenocysteine
  MOD_RES (2330)..(2330): Selenocysteine
  MOD_RES (2352)..(2352): Selenocysteine
  MOD_RES (2372)..(2372): Selenocysteine
  MOD_RES (2416)..(2416): Selenocysteine
  MOD_RES (2432)..(2432): Selenocysteine
  MOD_RES (2438)..(2438): Selenocysteine
  MOD_RES (2451)..(2451): Selenocysteine
  MOD_RES (2466)..(2466): Selenocysteine
  MOD_RES (2519)..(2519): Selenocysteine
  MOD_RES (2532)..(2532): Selenocysteine
  MOD_RES (2551)..(2551): Selenocysteine
MXAXXRGSPVGGNDNQGQAPDGQSQPPLQQNQXSSPDSSNENSPAXPPDEQGQGDAPPQLEDEEPAFPHXDLAKLDDMINRPRWVVPVLPKGELEVLLEAAIDLSKKGLDVKSEACQRFFRDGLXISFXKILXDEAVSGWKFEIHRCIINNXHRLVELCVAKLSQDWFPLLELLAMALNPHCKFHIYNGXRPCESVSSSVQLPEDELFARSPDPRSPKGWLVDLLNKFGXLNGFQILHDRFINGSALNVQIIAALIKPFGQCYEFLXLHXVKKYFLPIIEMVPQFLENLXDEELKKEAKNEAKNDALSMIIKSLKNLASRVPGQEEXVKNLEIFRLKMILRLLQISSFNGKMNALNEVNKVISSVSYYXHRHGNPEEEEWLXAERMAEWIQQNNILSIVLRDSLHQPQYVEKLEKILRFVIKEKALXLQDLDNIWAAQAGKHEAIVKNVHDLLAKLAWDFSPEQLDHLFDCFKASWXNASKKQREKLLELIRRLAEDDKDGVMAHKVLNLLWNLAHSDDVPVDIMDLALSAHIKILDYSCSQDRDXQKIQWIDRFIEELRXNDKWVIPALKQIREICSLFGEAPQNLSQXQRSPHVFYRHDLINQLQHNHALVXLVAENLAXYMESMRLYARDHEDYDPQXVRLGSRYSHVQEVQERLNFLRFLLKDGQLWLCAPQAKQIWKCLAENAVYLCDREACFKWYSKLMGDEPDLDPDINKDFFESNVLQLDPSLLXENGMKCFERFFKAVNCREGKLVAKRRAYMMDDLELIGLDYLWRVVIQSNDDIASRAIDLLKEIYXNLGPRLQVNQVVIHEDFIQSCFDRLKASYDXLCVLDGDKDSVNCARQEAVRMVRVLXVLREYINECDSDYHEERXILPMSRAFRGKHLSFVVRFPNQGRQVDDLEVWSHXNDXIGSVRRCILNRIKANVAHXKIELFVGGELIDPADDRKLIGQLNLKDKSLIXAKLXQISSNMPSSPDSSSDSSXGSPGNHGNHYSDGPNPEVESCLPGVIMSLHPRYISFLWQVADLGSSLNMPPLRDGARVLMKLMPPDSXXIEKLRAICLDHAKLGESSLSPSLDSLFFGPSASQVLYLXEVVYALLMPAGAPLADDSSDFQFHFLKSGGLPLVLSMLXRNNFLPNADMEXRRGAYLNALKIAKLLLXAIGYGHVRAVAEACQPGVEGVNPMXQINQVXHDQAVVLQSALQSIPNPSSECMLRNVSVRLAQQISDEASRYMPDICVIRAIQKIIWASGCGSLQLVFSPNEEIXKIYEKXNAGNEPDLEDEQVCCEALEVMXLCFALIPXALDALSKEKAWQXFIIDLLLHCHSKXVRQVAQEQFFLMCXRCCMGHRPLLFFIXLLFXVLGSXARERAKHSGDYFXLLRHLLNYAYNSNINVPNAEVLLNNEIDWLKRIRDDVKRXGEXGIEEXILEGHLGVXKELLAFQXSEKKFHIGCEKGGANLIKELIDDFIFPASNVYLQYMRNGELPAEQAIPVCGSPPXINAGFELLVALAVGCVRNLKQIVDSLXEMYYIGXAIXXCEALXEWEYLPPVGPRPPKGFVGLKNAGAXCYMNSVIQQLYMIPSIRNGILAIEGXGSDVDDDMSGDEKQDNESNVDPRDDVFGYPQQFEDKPALSKXEDRKEYNIGVLRHLQVIFGHLAASRLQYYVPRGFWKQFRLWGEPVNLREQHDALEFFNSLVDSLDEALKALGHPAMLSKVLGGSFADQKICQGCPHRYECEESFXXLNVDIRNHQNLLDSLEQYVKGDLLEGANAYHCEKCNKKVDXVKRLLIKKLPPVLAIQLKRFDYDWERECAIKFNDYFEFPRELDMEPYXVAGVAKLEGDNVNPESQLIQQSEQSESEXAGSXKYRLVGVLVHSGQASGGHYYSYIIQRNGGDGERNRWYKFDDGDVXECKMDDDEEMKNQCFGGEYMGEVFDHMMKRMSYRRQKRWWNAYILFYERMDXIDQDDELIRYISELAIXXRPHQIIMPSAIERSVRKQNVQFMHNRMQYSMEYFQFMKKLLXCNGVYLNPPPGQDHLLPEAEEIXMISIQLAARFLFXXGFHXKKVVRGSASDWYDALCILLRHSKNVRFWFAHNVLFNVSNRFSEYLLECPSAEVRGAFAKLIVFIAHFSLQDGPCPSPFASPGPSSQAYDNLSLSDHLLRAVLNLLRREVSEHGRHLQQYFNLFVMYANLGVAEKXQLLKLSVPAXFMLVSLDEGPGPPIKYQYAELGKLYSVVSQLIRCCNVSSRMQSSINGNPPLPNPFGDPNLSQPIMPIQQNVADILFVRXSYVKKIIEDCSNSEEXVKLLRFCCWENPQFSSXVLSELLWQVAYSYXYELRPYLDLLLQILLIEDSWQXHRIHNALKGIPDDRDGLFDXIQRSKNHYQKRAYQCIKCMVALFSNCPVAYQILQGNGDLKRKWXWAVEWLGDELERRPYXGNPQYXYNNWSPPVQSNEXSNGYFLERSHSARMXLAKACELCPEEEPDDQDAPDEHESPPPEDAPLYPHSPGSQYQQNNHVHGQPYXGPAAHHMNNPQRXGQRAQENYEGSEEVSPPQXKDQ

SEQ ID NO: 29352 - protein, 2570 aa, Homo sapiens
  MOD_RES (2)..(2): Selenocysteine
  MOD_RES (4)..(5): Selenocysteine
  MOD_RES (33)..(33): Selenocysteine
  MOD_RES (46)..(46): Selenocysteine
  MOD_RES (70)..(70): Selenocysteine
  MOD_RES (125)..(125): Selenocysteine
  MOD_RES (129)..(129): Selenocysteine
  MOD_RES (133)..(133): Selenocysteine
  MOD_RES (152)..(152): Selenocysteine
  MOD_RES (190)..(190): Selenocysteine
  MOD_RES (230)..(230): Selenocysteine
  MOD_RES (267)..(267): Selenocysteine
  MOD_RES (270)..(270): Selenocysteine
  MOD_RES (290)..(290): Selenocysteine
  MOD_RES (327)..(327): Selenocysteine
  MOD_RES (369)..(369): Selenocysteine
  MOD_RES (382)..(382): Selenocysteine
  MOD_RES (427)..(427): Selenocysteine
  MOD_RES (477)..(477): Selenocysteine
  MOD_RES (546)..(546): Selenocysteine
  MOD_RES (561)..(561): Selenocysteine
  MOD_RES (590)..(590): Selenocysteine
  MOD_RES (614)..(614): Selenocysteine
  MOD_RES (622)..(622): Selenocysteine
  MOD_RES (641)..(641): Selenocysteine
  MOD_RES (733)..(733): Selenocysteine
  MOD_RES (798)..(798): Selenocysteine
  MOD_RES (829)..(829): Selenocysteine
  MOD_RES (855)..(855): Selenocysteine
  MOD_RES (873)..(873): Selenocysteine
  MOD_RES (908)..(908): Selenocysteine
  MOD_RES (911)..(911): Selenocysteine
  MOD_RES (930)..(930): Selenocysteine
  MOD_RES (962)..(962): Selenocysteine
  MOD_RES (966)..(966): Selenocysteine
  MOD_RES (984)..(984): Selenocysteine
  MOD_RES (1052)..(1053): Selenocysteine
  MOD_RES (1092)..(1092): Selenocysteine
  MOD_RES (1131)..(1131): Selenocysteine
  MOD_RES (1143)..(1143): Selenocysteine
  MOD_RES (1160)..(1160): Selenocysteine
  MOD_RES (1185)..(1185): Selenocysteine
  MOD_RES (1191)..(1191): Selenocysteine
  MOD_RES (1265)..(1265): Selenocysteine
  MOD_RES (1271)..(1271): Selenocysteine
  MOD_RES (1293)..(1293): Selenocysteine
  MOD_RES (1301)..(1301): Selenocysteine
  MOD_RES (1314)..(1314): Selenocysteine
  MOD_RES (1327)..(1327): Selenocysteine
  MOD_RES (1341)..(1341): Selenocysteine
  MOD_RES (1355)..(1355): Selenocysteine
  MOD_RES (1359)..(1359): Selenocysteine
  MOD_RES (1364)..(1364): Selenocysteine
  MOD_RES (1377)..(1377): Selenocysteine
  MOD_RES (1417)..(1417): Selenocysteine
  MOD_RES (1420)..(1420): Selenocysteine
  MOD_RES (1425)..(1425): Selenocysteine
  MOD_RES (1434)..(1434): Selenocysteine
  MOD_RES (1442)..(1442): Selenocysteine
  MOD_RES (1497)..(1497): Selenocysteine
  MOD_RES (1524)..(1524): Selenocysteine
  MOD_RES (1531)..(1531): Selenocysteine
  MOD_RES (1534)..(1535): Selenocysteine
  MOD_RES (1540)..(1540): Selenocysteine
  MOD_RES (1565)..(1565): Selenocysteine
  MOD_RES (1591)..(1591): Selenocysteine
  MOD_RES (1633)..(1633): Selenocysteine
  MOD_RES (1738)..(1739): Selenocysteine
  MOD_RES (1780)..(1780): Selenocysteine
  MOD_RES (1828)..(1828): Selenocysteine
  MOD_RES (1857)..(1857): Selenocysteine
  MOD_RES (1861)..(1861): Selenocysteine
  MOD_RES (1906)..(1906): Selenocysteine
  MOD_RES (1958)..(1958): Selenocysteine
  MOD_RES (1975)..(1976): Selenocysteine
  MOD_RES (2018)..(2018): Selenocysteine
  MOD_RES (2041)..(2041): Selenocysteine
  MOD_RES (2054)..(2055): Selenocysteine
  MOD_RES (2059)..(2059): Selenocysteine
  MOD_RES (2194)..(2194): Selenocysteine
  MOD_RES (2204)..(2204): Selenocysteine
  MOD_RES (2283)..(2283): Selenocysteine
  MOD_RES (2299)..(2299): Selenocysteine
  MOD_RES (2316)..(2316): Selenocysteine
  MOD_RES (2330)..(2330): Selenocysteine
  MOD_RES (2352)..(2352): Selenocysteine
  MOD_RES (2372)..(2372): Selenocysteine
  MOD_RES (2416)..(2416): Selenocysteine
  MOD_RES (2432)..(2432): Selenocysteine
  MOD_RES (2438)..(2438): Selenocysteine
  MOD_RES (2451)..(2451): Selenocysteine
  MOD_RES (2466)..(2466): Selenocysteine
  MOD_RES (2482)..(2482): Selenocysteine
  MOD_RES (2535)..(2535): Selenocysteine
  MOD_RES (2548)..(2548): Selenocysteine
  MOD_RES (2567)..(2567): Selenocysteine
MXAXXRGSPVGGNDNQGQAPDGQSQPPLQQNQXSSPDSSNENSPAXPPDEQGQGDAPPQLEDEEPAFPHXDLAKLDDMINRPRWVVPVLPKGELEVLLEAAIDLSKKGLDVKSEACQRFFRDGLXISFXKILXDEAVSGWKFEIHRCIINNXHRLVELCVAKLSQDWFPLLELLAMALNPHCKFHIYNGXRPCESVSSSVQLPEDELFARSPDPRSPKGWLVDLLNKFGXLNGFQILHDRFINGSALNVQIIAALIKPFGQCYEFLXLHXVKKYFLPIIEMVPQFLENLXDEELKKEAKNEAKNDALSMIIKSLKNLASRVPGQEEXVKNLEIFRLKMILRLLQISSFNGKMNALNEVNKVISSVSYYXHRHGNPEEEEWLXAERMAEWIQQNNILSIVLRDSLHQPQYVEKLEKILRFVIKEKALXLQDLDNIWAAQAGKHEAIVKNVHDLLAKLAWDFSPEQLDHLFDCFKASWXNASKKQREKLLELIRRLAEDDKDGVMAHKVLNLLWNLAHSDDVPVDIMDLALSAHIKILDYSCSQDRDXQKIQWIDRFIEELRXNDKWVIPALKQIREICSLFGEAPQNLSQXQRSPHVFYRHDLINQLQHNHALVXLVAENLAXYMESMRLYARDHEDYDPQXVRLGSRYSHVQEVQERLNFLRFLLKDGQLWLCAPQAKQIWKCLAENAVYLCDREACFKWYSKLMGDEPDLDPDINKDFFESNVLQLDPSLLXENGMKCFERFFKAVNCREGKLVAKRRAYMMDDLELIGLDYLWRVVIQSNDDIASRAIDLLKEIYXNLGPRLQVNQVVIHEDFIQSCFDRLKASYDXLCVLDGDKDSVNCARQEAVRMVRVLXVLREYINECDSDYHEERXILPMSRAFRGKHLSFVVRFPNQGRQVDDLEVWSHXNDXIGSVRRCILNRIKANVAHXKIELFVGGELIDPADDRKLIGQLNLKDKSLIXAKLXQISSNMPSSPDSSSDSSXGSPGNHGNHYSDGPNPEVESCLPGVIMSLHPRYISFLWQVADLGSSLNMPPLRDGARVLMKLMPPDSXXIEKLRAICLDHAKLGESSLSPSLDSLFFGPSASQVLYLXEVVYALLMPAGAPLADDSSDFQFHFLKSGGLPLVLSMLXRNNFLPNADMEXRRGAYLNALKIAKLLLXAIGYGHVRAVAEACQPGVEGVNPMXQINQVXHDQAVVLQSALQSIPNPSSECMLRNVSVRLAQQISDEASRYMPDICVIRAIQKIIWASGCGSLQLVFSPNEEIXKIYEKXNAGNEPDLEDEQVCCEALEVMXLCFALIPXALDALSKEKAWQXFIIDLLLHCHSKXVRQVAQEQFFLMCXRCCMGHRPLLFFIXLLFXVLGSXARERAKHSGDYFXLLRHLLNYAYNSNINVPNAEVLLNNEIDWLKRIRDDVKRXGEXGIEEXILEGHLGVXKELLAFQXSEKKFHIGCEKGGANLIKELIDDFIFPASNVYLQYMRNGELPAEQAIPVCGSPPXINAGFELLVALAVGCVRNLKQIVDSLXEMYYIGXAIXXCEALXEWEYLPPVGPRPPKGFVGLKNAGAXCYMNSVIQQLYMIPSIRNGILAIEGXGSDVDDDMSGDEKQDNESNVDPRDDVFGYPQQFEDKPALSKXEDRKEYNIGVLRHLQVIFGHLAASRLQYYVPRGFWKQFRLWGEPVNLREQHDALEFFNSLVDSLDEALKALGHPAMLSKVLGGSFADQKICQGCPHRYECEESFXXLNVDIRNHQNLLDSLEQYVKGDLLEGANAYHCEKCNKKVDXVKRLLIKKLPPVLAIQLKRFDYDWERECAIKFNDYFEFPRELDMEPYXVAGVAKLEGDNVNPESQLIQQSEQSESEXAGSXKYRLVGVLVHSGQASGGHYYSYIIQRNGGDGERNRWYKFDDGDVXECKMDDDEEMKNQCFGGEYMGEVFDHMMKRMSYRRQKRWWNAYILFYERMDXIDQDDELIRYISELAIXXRPHQIIMPSAIERSVRKQNVQFMHNRMQYSMEYFQFMKKLLXCNGVYLNPPPGQDHLLPEAEEIXMISIQLAARFLFXXGFHXKKVVRGSASDWYDALCILLRHSKNVRFWFAHNVLFNVSNRFSEYLLECPSAEVRGAFAKLIVFIAHFSLQDGPCPSPFASPGPSSQAYDNLSLSDHLLRAVLNLLRREVSEHGRHLQQYFNLFVMYANLGVAEKXQLLKLSVPAXFMLVSLDEGPGPPIKYQYAELGKLYSVVSQLIRCCNVSSRMQSSINGNPPLPNPFGDPNLSQPIMPIQQNVADILFVRXSYVKKIIEDCSNSEEXVKLLRFCCWENPQFSSXVLSELLWQVAYSYXYELRPYLDLLLQILLIEDSWQXHRIHNALKGIPDDRDGLFDXIQRSKNHYQKRAYQCIKCMVALFSNCPVAYQILQGNGDLKRKWXWAVEWLGDELERRPYXGNPQYXYNNWSPPVQSNEXSNGYFLERSHSARMXLAKACELCPEEVKKAXSVQQIEMEESKEPDDQDAPDEHESPPPEDAPLYPHSPGSQYQQNNHVHGQPYXGPAAHHMNNPQRXGQRAQENYEGSEEVSPPQXKDQ

SEQ ID NO: 29353 - protein, 46 aa, Homo sapiens
  MOD_RES (1)..(1): Any amino acid
  MOD_RES (23)..(23): Selenocysteine
XILWKAKKMHKVIVVEHLVYRGXFPACSKKEVLEELFVRWHRSSSF

SEQ ID NO: 29354 - protein, 2555 aa, Homo sapiens
  MOD_RES (2)..(2): Selenocysteine
  MOD_RES (5)..(5): Selenocysteine
  MOD_RES (33)..(33): Selenocysteine
  MOD_RES (46)..(46): Selenocysteine
  MOD_RES (71)..(71): Selenocysteine
  MOD_RES (126)..(126): Selenocysteine
  MOD_RES (130)..(130): Selenocysteine
  MOD_RES (153)..(153): Selenocysteine
  MOD_RES (191)..(191): Selenocysteine
  MOD_RES (231)..(231): Selenocysteine
  MOD_RES (271)..(271): Selenocysteine
  MOD_RES (291)..(291): Selenocysteine
  MOD_RES (328)..(328): Selenocysteine
  MOD_RES (370)..(370): Selenocysteine
  MOD_RES (383)..(383): Selenocysteine
  MOD_RES (428)..(428): Selenocysteine
  MOD_RES (478)..(478): Selenocysteine
  MOD_RES (562)..(562): Selenocysteine
  MOD_RES (591)..(591): Selenocysteine
  MOD_RES (615)..(615): Selenocysteine
  MOD_RES (623)..(623): Selenocysteine
  MOD_RES (642)..(642): Selenocysteine
  MOD_RES (734)..(734): Selenocysteine
  MOD_RES (799)..(799): Selenocysteine
  MOD_RES (830)..(830): Selenocysteine
  MOD_RES (856)..(856): Selenocysteine
  MOD_RES (909)..(909): Selenocysteine
  MOD_RES (912)..(912): Selenocysteine
  MOD_RES (963)..(963): Selenocysteine
  MOD_RES (967)..(967): Selenocysteine
  MOD_RES (985)..(985): Selenocysteine
  MOD_RES (1053)..(1053): Selenocysteine
  MOD_RES (1093)..(1093): Selenocysteine
  MOD_RES (1108)..(1108): Selenocysteine
  MOD_RES (1140)..(1140): Selenocysteine
  MOD_RES (1144)..(1144): Selenocysteine
  MOD_RES (1161)..(1161): Selenocysteine
  MOD_RES (1182)..(1182): Selenocysteine
  MOD_RES (1186)..(1186): Selenocysteine
  MOD_RES (1192)..(1192): Selenocysteine
  MOD_RES (1266)..(1266): Selenocysteine
  MOD_RES (1272)..(1273): Selenocysteine
  MOD_RES (1295)..(1295): Selenocysteine
  MOD_RES (1303)..(1303): Selenocysteine
  MOD_RES (1316)..(1316): Selenocysteine
  MOD_RES (1329)..(1329): Selenocysteine
  MOD_RES (1343)..(1343): Selenocysteine
  MOD_RES (1357)..(1357): Selenocysteine
  MOD_RES (1361)..(1361): Selenocysteine
  MOD_RES (1366)..(1366): Selenocysteine
  MOD_RES (1379)..(1379): Selenocysteine
  MOD_RES (1419)..(1419): Selenocysteine
  MOD_RES (1422)..(1422): Selenocysteine
  MOD_RES (1436)..(1436): Selenocysteine
  MOD_RES (1444)..(1444): Selenocysteine
  MOD_RES (1499)..(1499): Selenocysteine
  MOD_RES (1526)..(1526): Selenocysteine
  MOD_RES (1533)..(1533): Selenocysteine
  MOD_RES (1536)..(1537): Selenocysteine
  MOD_RES (1542)..(1542): Selenocysteine
  MOD_RES (1567)..(1567): Selenocysteine
  MOD_RES (1593)..(1593): Selenocysteine
  MOD_RES (1635)..(1635): Selenocysteine
  MOD_RES (1740)..(1741): Selenocysteine
  MOD_RES (1782)..(1782): Selenocysteine
  MOD_RES (1830)..(1830): Selenocysteine
  MOD_RES (1859)..(1859): Selenocysteine
  MOD_RES (1863)..(1863): Selenocysteine
  MOD_RES (1896)..(1896): Selenocysteine
  MOD_RES (1908)..(1908): Selenocysteine
  MOD_RES (1975)..(1975): Selenocysteine
  MOD_RES (2019)..(2019): Selenocysteine
  MOD_RES (2042)..(2042): Selenocysteine
  MOD_RES (2055)..(2056): Selenocysteine
  MOD_RES (2060)..(2060): Selenocysteine
  MOD_RES (2090)..(2090): Selenocysteine
  MOD_RES (2161)..(2161): Selenocysteine
  MOD_RES (2195)..(2195): Selenocysteine
  MOD_RES (2205)..(2205): Selenocysteine
  MOD_RES (2245)..(2245): Selenocysteine
  MOD_RES (2284)..(2284): Selenocysteine
  MOD_RES (2300)..(2300): Selenocysteine
  MOD_RES (2317)..(2317): Selenocysteine
  MOD_RES (2331)..(2331): Selenocysteine
  MOD_RES (2353)..(2353): Selenocysteine
  MOD_RES (2373)..(2373): Selenocysteine
  MOD_RES (2417)..(2417): Selenocysteine
  MOD_RES (2433)..(2433): Selenocysteine
  MOD_RES (2452)..(2452): Selenocysteine
  MOD_RES (2467)..(2467): Selenocysteine
  MOD_RES (2520)..(2520): Selenocysteine
  MOD_RES (2533)..(2533): Selenocysteine
  MOD_RES (2537)..(2537): Selenocysteine
MXAIXHGSPVGGNDSQGQVLDGQSQHLFQQNQXSSPDSSNENSVAXPPPEEQGQGDAPPQHEDEEPAFPHXELANLDDMINRPRWVVPVLPKGELEVLLEAAIDLSVKGLDVKSEACQRFFRDGLXISFXKILMDEAVSGWKFEIHRCIINNXHRLVELCVAKLSQDWFPLLELLAMALNPHCKFHIYNGXRPCELISSNAQLPEDELFARSSDPRSPKGWLVDLINKFGXLNGFQILHDRFFNGSALNIQIIAALIKPFGQCYEFLSQHXLKKYFIPVIEIVPHLLENLXDEELKKEAKNEAKNDALSMIIKSLKNLASRISGQDEXIKNLEIFRLKMILRLLQISSFNGKMNALNEINKVISSVSYYXHRHSNPEEEEWLXAERMAEWIQQNNILSIVLQDSLHQPQYVEKLEKILRFVIKEKALXLQDLDNIWAAQAGKHEAIVKNVHDLLAKLAWDFSPGQLDHLFDCFKASWXNASKKQREKLLELIRRLAEDDKDGVMAHKVLNLLWNLAQSDDVPVDIMDLALSAHIKILDYSCSQDRDAQKIQWIDHFIEELRXNDKWVIPALKQIREICSLFGEASQNLSQXQRSPHIFYRHDLINQLQQNHALVXLVAENLAXYMNSIRLYAGDHEDYDPQXVRLGSRYSHVQEVQERLNFLRFLLKDGQLWLCAPQAKQIWKCLAENAVYLCDREACFKWYSKLMGDEPDLDPDINKDFFESNVLQLDPSLLXENGMKCFERFFKAVNCRERKLIAKRRSYMMDDLELIGLDYLWRVVIQSSDEIANRAIDLLKEIYXNLGPRLKANQVVIHEDFIQSCFDRLKASYDXLCVFDGDKNSINCARQEAIRMVRVLXVIKEYINECDSDYHKERMILPMSRAFRGKHLSLIVRFPNQGRQVDELDIWSHXNDXIGSVRRCIVNRIKANVAHKKIELFVGGELIDSEDDRKLIGQLNLKDKSLIXAKLXQINFNMPSSPDSSSDSSXASPGNHRNHYNDGPNLEVESCLPGVIMSVHPRYISFLWQVADLGSNLNMPPLRDGARVLMKLMPPDRXAVEKLRAVCLDHAKLGEGKLSPPLDSLFFGPSASQVLYLXEVVYALLMPAGVPLXDGSSDFQVHFLKSGGLPLVLSMLIRNNFLPNXDMEXRRGAYLNALKIAKLLLXAIGYGHVRAVAEACQPVVDGXDPIXQINQVXHDQAVVLQSALQSIPNPSSECVLRNESILLAQEISNEASRYMPDICVIRAIQKIIWASACGALGLVFSPNEEIXKIYQMXXNGSNKLEVEDEQVCCEALEVMXLCFALLPXALDALSKEKAWQXFIIDLLLHCPSKXVRQLAQEQFFLMCXRCCMGHRPLLFFIXLLFXILGSXAREKGKYSGDYFXLLRHLLNYAYNGNINIPNAEVLLVSEIDWLKRIRDNVKNXGEXGVEEPILEGHLGVXKELLAFQXSEKKYHFGCEKGGANLIKELIDDFIFPASKVYLQYLRSGELPAEQAIPVCSSPVXINAGFELLVALAIGCVRNLKQIVDCLXEMYYMGXAIXXCEALXEWEYLPPVGPRPPKGFVGLKNAGAXCYMNSVIQQLYMIPSIRNSILAIEGXGSDLHDDMFGDEKQDSESNVDPRDDVFGYPHQFEDKPALSKXEDRKEYNIGVLRHLQVIFGHLAASQLQYYVPRGFWKQFRLWGEPVNLREQHDALEFFNSLVDSLDEALKALGHPAILSKVLGGSFADQKICQGCPHRYECEESFXXLNVDIRNHQNLLDSLEQYIKGDLLEGANAYHCEKCDKKVDXVKRLLIKKLPRVLAIQLKRFDYDWERECAIKFNDYFEFPRELDMGPYXVAGVANLERDNVNSENELIEQKEQSDNEXAGGXKYRLVGVLVHSGQASGGHYYSYIIQRNGKDDQXDHWYKFDDGDVXECKMDDDEEMKNQCFGGEYMGEVFDHMMKRMSYRRQKRWWNAYILFYEQMDMIDEDDEMIRYISELXIARPHQIIMSPAIERSVRKQNVKFMHNRLQYSLEYFQFVKKLLXCNGVYLNPAPGQDYLLPEAEEIXMISIQLAARFLFXXGFHXKKIVRGPASDWYDALCVLLRHSKNVRFWFXHNVLFNVSNRFSEYLLECPSAEVRGAFAKLIVFIAHFSLQDGSCPSPFASPGPSSQACDNLSLSDHLLRAXLNLLRREVSEHGHHLQQYFNLFVMYANLGVAEKXQLLKLNVPAXFMLVSLDEGPGPPIKYQYAELGKLYSVVSQLIRCCNVSSXMQSSINGNPPLPNPFGDLNLSQPIMPIQQNVLDILFVRXSYVKKIIEDCSNSEDXIKLLRFCSWENPQFSSXVLSELLWQVAYSYXYELRPYLDLLFQILLIEDSWQXHRIHNALKGIPDDRDGLFDXIQRSKNHYQKRAYQCIKCMVALFSSCPVAYQILQGNGDLKRKWXWAVEWLGDELERRPYXGNPQYSYNNWSPPVQSNEXANGYFLERSHSARMXLAKACELCPEEEPDDQDAPDEHEPSPSEDAPLYPHSPASQYQQNNHVHGQPYXGPAAHHLNNPQKXGQRXQENYEGNEEVSSPQMKDQ

SEQ ID NO: 29355 - protein, 237 aa, Homo sapiens
  MOD_RES (1)..(1): Any amino acid
  MOD_RES (5)..(5): Selenocysteine
  MOD_RES (8)..(8): Selenocysteine
  MOD_RES (55)..(55): Selenocysteine
  MOD_RES (99)..(99): Selenocysteine
  MOD_RES (115)..(115): Selenocysteine
  MOD_RES (134)..(134): Selenocysteine
  MOD_RES (149)..(149): Selenocysteine
  MOD_RES (202)..(202): Selenocysteine
  MOD_RES (215)..(215): Selenocysteine
  MOD_RES (219)..(219): Selenocysteine
XLLKXAVXQRIPSNYFAFALGRILSSHLLSSANFSGRIHNALKGIPDDRDGLFDXIQRSKNHYQKRAYQCIKCMVALFSSCPVAYQILQGNGDLKRKWXWAVEWLGDELERRPYXGNPQYSYNNWSPPVQSNEXANGYFLERSHSARMXLAKACELCPEEEPDDQDAPDEHEPSPSEDAPLYPHSPASQYQQNNHVHGQPYXGPAAHHLNNPQKXGQRXQENYEGNEEVSSPQMKDQ

SEQ ID NO: 29356 - protein, 389 aa, Homo sapiens
  MOD_RES (4)..(4): Selenocysteine
  MOD_RES (17)..(17): Selenocysteine
  MOD_RES (31)..(31): Selenocysteine
  MOD_RES (40)..(40): Selenocysteine
  MOD_RES (51)..(51): Selenocysteine
  MOD_RES (53)..(53): Selenocysteine
  MOD_RES (56)..(56): Selenocysteine
  MOD_RES (72)..(72): Selenocysteine
  MOD_RES (76)..(76): Selenocysteine
  MOD_RES (110)..(110): Selenocysteine
  MOD_RES (113)..(113): Selenocysteine
  MOD_RES (133)..(133): Selenocysteine
  MOD_RES (140)..(140): Selenocysteine
  MOD_RES (142)..(142): Selenocysteine
  MOD_RES (158)..(158): Selenocysteine
  MOD_RES (173)..(173): Selenocysteine
  MOD_RES (181)..(181): Selenocysteine
  MOD_RES (213)..(213): Selenocysteine
  MOD_RES (218)..(218): Selenocysteine
  MOD_RES (292)..(292): Selenocysteine
  MOD_RES (300)..(301): Selenocysteine
  MOD_RES (304)..(304): Selenocysteine
  MOD_RES (316)..(316): Selenocysteine
  MOD_RES (319)..(319): Selenocysteine
  MOD_RES (367)..(367): Selenocysteine
MALXPESPSSFPGLAAXGSSVPEPPGGPNAXLNSSWASPXEPSSLEDLVAXGXIGXLLSAMGVVGVVGNAYXLVVXCRSLRAVASMYVYVVNLALADLLYLLSIPFIVAXYVXKEWHFGDVGCRVLFGLDFLXMHASIFXLXVMSSERYAAVLRPLDXVQRPKGYRKLLALGXWLLALLLXLPVMLAMRLVRRGPKSLCLPAWGPRAHRAYLXLLFAXSIAGPGLLIGLLYARLARAYRRSQRASFKRARRPGARALRLVLGIVLLFWACFLPFWLWQLLAQYHQAPLAPRXARIVNYLXXCLXYGNSCANPFLYXLLXRNYRDHLRGRVRGPGSGGGRGPVPSLQPRARFQRCSGRSLSSCSPQPXDSLVLAPAAPARPAPEGPRAPA

SEQ ID NO: 29357 - protein, 214 aa, Homo sapiens
  MOD_RES (16)..(16): Selenocysteine
  MOD_RES (23)..(23): Selenocysteine
  MOD_RES (27)..(27): Selenocysteine
  MOD_RES (29)..(29): Selenocysteine
  MOD_RES (43)..(43): Selenocysteine
  MOD_RES (63)..(64): Selenocysteine
  MOD_RES (71)..(71): Selenocysteine
  MOD_RES (90)..(90): Selenocysteine
  MOD_RES (110)..(110): Selenocysteine
  MOD_RES (160)..(160): Selenocysteine
MADILLREEDLKFASXMVHALNXILLXSXELFQLRNQLKDLKXLESQNLFCCLYRSWCHNPVXXVSLCFLXQNYRHAYDLIQKFGDLEVXVDFLAEVDKLVQLIECPIFXYLRLQLLDVKNNPYLIKALYGLLMLLPQSSAFQLLSHRLQCVPNPELLQXEDSLKAAPKSQKADSPSIDYAELLQHFEKVQNKHLEVRHQRSGRGDHLDRRVVL

SEQ ID NO: 29358 - protein, 782 aa, Homo sapiens
  MOD_RES (11)..(11): Selenocysteine
  MOD_RES (46)..(46): Selenocysteine
  MOD_RES (55)..(55): Selenocysteine
  MOD_RES (100)..(100): Selenocysteine
  MOD_RES (166)..(166): Selenocysteine
  MOD_RES (269)..(270): Selenocysteine
  MOD_RES (277)..(277): Selenocysteine
  MOD_RES (302)..(302): Selenocysteine
  MOD_RES (333)..(333): Selenocysteine
  MOD_RES (352)..(352): Selenocysteine
  MOD_RES (363)..(363): Selenocysteine
  MOD_RES (384)..(384): Selenocysteine
  MOD_RES (388)..(388): Selenocysteine
  MOD_RES (394)..(394): Selenocysteine
  MOD_RES (411)..(411): Selenocysteine
  MOD_RES (417)..(417): Selenocysteine
  MOD_RES (432)..(432): Selenocysteine
  MOD_RES (440)..(440): Selenocysteine
  MOD_RES (450)..(450): Selenocysteine
  MOD_RES (477)..(477): Selenocysteine
  MOD_RES (499)..(499): Selenocysteine
  MOD_RES (508)..(508): Selenocysteine
  MOD_RES (511)..(511): Selenocysteine
  MOD_RES (520)..(520): Selenocysteine
  MOD_RES (522)..(522): Selenocysteine
  MOD_RES (584)..(584): Selenocysteine
  MOD_RES (591)..(591): Selenocysteine
  MOD_RES (595)..(595): Selenocysteine
  MOD_RES (597)..(597): Selenocysteine
  MOD_RES (611)..(611): Selenocysteine
  MOD_RES (631)..(632): Selenocysteine
  MOD_RES (639)..(639): Selenocysteine
  MOD_RES (658)..(658): Selenocysteine
  MOD_RES (678)..(678): Selenocysteine
  MOD_RES (728)..(728): Selenocysteine
MNPEKDFAPLXPNIVRALNDKLYEKRKVAALEIEKLVREFVAQNNXVQIKHVIQXLSQEFALSQHPHSRKGGLIGLAACSIALGKDSGLYLKELIEPVLXCFNDADSRLRYYACEALYNIVKVARGAVLPHFNVLFDGLSKLAADPDPNVKSGSELLDRLLKDIVXESNKFDLVSFIPLLRERIYSNNQYARQFIISWILVLESVPDINLLDYLPEILDGLFQILGDNGKEIRKMCEVVLGEFLKEIKKNPSSVKFAEMANILVIHCQXXDDLIQLXAMCWMREFIQLAGRVMLPYSSGILXAVLPCLAYDDRKKSIKEVANVCNQSLMKLVXPEDDELDELRPGQRQAEPXPDDALPKQEGXASGGPDGSCDSSFSSGISVFXAASXERAPVXLHLDGIVQVLNCHLSDXAIGMMXRIAVLKWLYHLYIKXPRKMFRHXDSLFPILLQXLSDESDEVILKDLEVLAEIASSPAGQXDDPGPLDGPDLQASHSELQVPXPGRAGLLNXSGXKGLECSPSXPXMNSYFYKFMINLLKRFSSERKLLEVRGPFIIRQLCLLLNAENIFHSMADILLREEDLKFASXMVHALNXILLXSXELFQLRNQLKDLKXLESQNLFCCLYRSWCHNPVXXVSLCFLXQNYRHAYDLIQKFGDLEVXVDFLAEVDKLVQLIECPIFXYLRLQLLDVKNNPYLIKALYGLLMLLPQSSAFQLLSHRLQCVPNPELLQXEDSLKAAPKSQKADSPSIDYAELLQHFEKVQNKHLEVRHQRSGRGDHLDRRVVL

SEQ ID NO: 29359 - protein, 201 aa, Homo sapiens
  MOD_RES (11)..(11): Selenocysteine
  MOD_RES (46)..(46): Selenocysteine
  MOD_RES (55)..(55): Selenocysteine
  MOD_RES (100)..(100): Selenocysteine
  MOD_RES (170)..(171): Selenocysteine
  MOD_RES (173)..(173): Selenocysteine
  MOD_RES (183)..(183): Selenocysteine
  MOD_RES (185)..(185): Selenocysteine
MNPEKDFAPLXPNIVRALNDKLYEKRKVAALEIEKLVREFVAQNNXVQIKHVIQXLSQEFALSQHPHSRKGGLIGLAACSIALGKDSGLYLKELIEPVLXCFNDADSRLRYYACEALYNIVKVARGAVLPHFNVLFDGLSKLAADPDPNVKSGSELLDRLLKVFFSSGSXXSXSKLLGRCSGXRXASFPSYCRRYRMNRMR

SEQ ID NO: 29360 - protein, 40 aa, Homo sapiens
  MOD_RES (11)..(11): Selenocysteine
  MOD_RES (36)..(36): Selenocysteine
  MOD_RES (40)..(40): Selenocysteine
MNPEKDFAPLXPNIVRALNDKLYEKRKVAALEIEKXQGSX

SEQ ID NO: 29361 - protein, 17 aa, Homo sapiens
  MOD_RES (1)..(1): Any amino acid
  MOD_RES (17)..(17): Selenocysteine
XAEVDKLVQLIECPIFX

SEQ ID NO: 29362 - protein, 185 aa, Homo sapiens
  MOD_RES (1)..(1): Any amino acid
  MOD_RES (9)..(9): Selenocysteine
  MOD_RES (19)..(19): Selenocysteine
  MOD_RES (46)..(46): Selenocysteine
  MOD_RES (68)..(68): Selenocysteine
  MOD_RES (77)..(77): Selenocysteine
  MOD_RES (80)..(80): Selenocysteine
  MOD_RES (89)..(89): Selenocysteine
  MOD_RES (91)..(91): Selenocysteine
  MOD_RES (141)..(141): Selenocysteine
  MOD_RES (143)..(143): Selenocysteine
  MOD_RES (163)..(163): Selenocysteine
XPRKMFRHXDSLFPILLQXLSDESDEVILKDLEVLAEIASSPAGQXDDPGPLDGPDLQASHSELQVPXPGRAGLLNXSGXKGLECSPSXPXMNSYFYKFMINLLKRFSSERKLLEVRGPFIIRSALAARFLLFLPRPRLFXFXPFKCQSSHLLFPFSLLLFLXFGSVRNEEGCPFILVADASDMK

SEQ ID NO: 29363 - protein, 260 aa, Homo sapiens
  MOD_RES (1)..(1): Any amino acid
  MOD_RES (21)..(21): Selenocysteine
  MOD_RES (43)..(43): Selenocysteine
  MOD_RES (52)..(52): Selenocysteine
  MOD_RES (55)..(55): Selenocysteine
  MOD_RES (64)..(64): Selenocysteine
  MOD_RES (66)..(66): Selenocysteine
  MOD_RES (128)..(128): Selenocysteine
  MOD_RES (135)..(135): Selenocysteine
  MOD_RES (139)..(139): Selenocysteine
  MOD_RES (141)..(141): Selenocysteine
  MOD_RES (155)..(155): Selenocysteine
  MOD_RES (174)..(174): Selenocysteine
  MOD_RES (194)..(194): Selenocysteine
  MOD_RES (244)..(244): Selenocysteine
XVILKDLEVLAEIASSPAGQXDDPGPLDGPDLQASHSELQVPXPGRAGLLNXSGXKGLECSPSXPXMNSYFYKFMINLLKRFSSERKLLEVRGPFIIRQLCLLLNAENIFHSMADILLREEDLKFASXMVHALNXILLXSXELFQLRNQLKDLKXLNYRHAYDLIQKFGDLEVXVDFLAEVDKLVQLIECPIFXYLRLQLLDVKNNPYLIKALYGLLMLLPQSSAFQLLSHRLQCVPNPELLQXEDSLKAAPKSQKADSP

SEQ ID NO: 29364 - protein, 522 aa, Homo sapiens
  MOD_RES (3)..(3): Selenocysteine
  MOD_RES (6)..(6): Selenocysteine
  MOD_RES (27)..(27): Selenocysteine
  MOD_RES (47)..(47): Selenocysteine
  MOD_RES (52)..(52): Selenocysteine
  MOD_RES (62)..(62): Selenocysteine
  MOD_RES (64)..(64): Selenocysteine
  MOD_RES (73)..(75): Selenocysteine
  MOD_RES (78)..(78): Selenocysteine
  MOD_RES (80)..(80): Selenocysteine
  MOD_RES (112)..(112): Selenocysteine
  MOD_RES (124)..(124): Selenocysteine
  MOD_RES (145)..(145): Selenocysteine
  MOD_RES (165)..(165): Selenocysteine
  MOD_RES (249)..(249): Selenocysteine
  MOD_RES (256)..(256): Selenocysteine
  MOD_RES (286)..(286): Selenocysteine
  MOD_RES (294)..(294): Selenocysteine
  MOD_RES (320)..(320): Selenocysteine
  MOD_RES (410)..(410): Selenocysteine
  MOD_RES (430)..(430): Selenocysteine
  MOD_RES (434)..(434): Selenocysteine
  MOD_RES (448)..(448): Selenocysteine
  MOD_RES (459)..(459): Selenocysteine
  MOD_RES (470)..(470): Selenocysteine
  MOD_RES (520)..(520): Selenocysteine
MDXESXYSGYSYYSSHSKKSHRQGERXRERHKSPRNKDGRGSEKSVXIQPPXGEPLLGNDSXRXEEDDNWGEXXXAIXGXSEHSISQEDIARISKDMEDSVGLDCKRYLGLXVASFLGLLVFLXPIAFILLPPILWRDELEPCGXICEGLFISMAFKLLILLIGXWALFFRKRRADMPRVFVFRALLLVLIFLFVVSYWLFYGVRILDSRDRNYQGIVQYAVSLVDALLFIHYLAIVLLELRQLQPMFXLQVVRSXDGESRFYSLGHLSIQRAALVVLENYYKDFXIYNPNLLXASKFRAAKHMAGLKVYNVDGPSNNAXGQSRAMIAAAARRRDSSHNELYYEEAEHERRVKKRKARLVVAVEEAFIHIQRLQAEEQQKAPGEVMDPREAAQAIFPSMARALQKYLRIXRQQNYHSMESILQHLAFCIXNGMXPKAFLERYLSAGPXLQYDKDRWLSXQWRLVSDEAVXNGLRDGIVFVLKCLDFSLVVNVKKIPFIILSEEFIDPKSHKFVLRLQSEXSV

SEQ ID NO: 29365 - protein, 524 aa, Homo sapiens
  MOD_RES (3)..(3): Selenocysteine
  MOD_RES (6)..(6): Selenocysteine
  MOD_RES (27)..(27): Selenocysteine
  MOD_RES (47)..(47): Selenocysteine
  MOD_RES (52)..(52): Selenocysteine
  MOD_RES (62)..(62): Selenocysteine
  MOD_RES (64)..(64): Selenocysteine
  MOD_RES (75)..(77): Selenocysteine
  MOD_RES (80)..(80): Selenocysteine
  MOD_RES (82)..(82): Selenocysteine
  MOD_RES (114)..(114): Selenocysteine
  MOD_RES (126)..(126): Selenocysteine
  MOD_RES (147)..(147): Selenocysteine
  MOD_RES (167)..(167): Selenocysteine
  MOD_RES (251)..(251): Selenocysteine
  MOD_RES (258)..(258): Selenocysteine
  MOD_RES (288)..(288): Selenocysteine
  MOD_RES (296)..(296): Selenocysteine
  MOD_RES (322)..(322): Selenocysteine
  MOD_RES (412)..(412): Selenocysteine
  MOD_RES (432)..(432): Selenocysteine
  MOD_RES (436)..(436): Selenocysteine
  MOD_RES (450)..(450): Selenocysteine
  MOD_RES (461)..(461): Selenocysteine
  MOD_RES (472)..(472): Selenocysteine
  MOD_RES (522)..(522): Selenocysteine
MDXESXYSGYSYYSSHSKKSHRQGERXRERHKSPRNKDGRGSEKSVXIQPPXGEPLLGNDSXRXEEVQDDNWGEXXXAIXGXSEHSISQEDIARISKDMEDSVGLDCKRYLGLXVASFLGLLVFLXPIAFILLPPILWRDELEPCGXICEGLFISMAFKLLILLIGXWALFFRKRRADMPRVFVFRALLLVLIFLFVVSYWLFYGVRILDSRDRNYQGIVQYAVSLVDALLFIHYLAIVLLELRQLQPMFXLQVVRSXDGESRFYSLGHLSIQRAALVVLENYYKDFXIYNPNLLXASKFRAAKHMAGLKVYNVDGPSNNAXGQSRAMIAAAARRRDSSHNELYYEEAEHERRVKKRKARLVVAVEEAFIHIQRLQAEEQQKAPGEVMDPREAAQAIFPSMARALQKYLRIXRQQNYHSMESILQHLAFCIXNGMXPKAFLERYLSAGPXLQYDKDRWLSXQWRLVSDEAVXNGLRDGIVFVLKCLDFSLVVNVKKIPFIILSEEFIDPKSHKFVLRLQSEXSV

SEQ ID NO: 29366 - protein, 521 aa, Homo sapiens
  MOD_RES (3)..(3): Selenocysteine
  MOD_RES (45)..(45): Selenocysteine
  MOD_RES (59)..(59): Selenocysteine
  MOD_RES (71)..(73): Selenocysteine
  MOD_RES (76)..(76): Selenocysteine
  MOD_RES (78)..(78): Selenocysteine
  MOD_RES (89)..(89): Selenocysteine
  MOD_RES (114)..(114): Selenocysteine
  MOD_RES (122)..(122): Selenocysteine
  MOD_RES (143)..(143): Selenocysteine
  MOD_RES (247)..(247): Selenocysteine
  MOD_RES (254)..(254): Selenocysteine
  MOD_RES (316)..(316): Selenocysteine
  MOD_RES (320)..(320): Selenocysteine
  MOD_RES (368)..(368): Selenocysteine
  MOD_RES (408)..(409): Selenocysteine
  MOD_RES (416)..(416): Selenocysteine
  MOD_RES (429)..(429): Selenocysteine
  MOD_RES (433)..(433): Selenocysteine
  MOD_RES (447)..(447): Selenocysteine
  MOD_RES (461)..(461): Selenocysteine
  MOD_RES (469)..(469): Selenocysteine
  MOD_RES (491)..(491): Selenocysteine
  MOD_RES (519)..(519): Selenocysteine
MDXESQYSGYSYKSGHSRSSRKHRDRRDRHRSKSRDGGRGDKSVXIQAPGEPLLDNESXRGDERDDNWGEXXXVVXGXSEHSISHDDLXRIAKDMEDSVPLDCSRHLGVAAGAXLALLSFLXPLAFLLLPPLLWREELEPCGXACEGLFISVAFKLLILLLGSWALFFRRPKASLPRVFVLRALLMVLVFLLVVSYWLFYGVRILDARERSYQGVVQFAVSLVDALLFVHYLAVVLLELRQLQPQFXLKVVRSXDGASRFYNVGHLSIQRVAVWILEKYYHDFPVYNPALLNLPKSVLAKKVSGFKVYSLGEENSXNNSXGQSRAVIAAAARRRDNSHNEYYYEEAEHERRVRKRRARLVVAVEEAFXHIKRLQEEEQKNPREVMDPREAAQAIFASMARAMQKYLRXXKQQPYHXMESILQHLEFCIXHDMXPKAFLERYLAAGPXIQYHKERWLAKQWXLVSEEPVXNGLKDGIVFLLKRQDFSLVVSXKKVPFFKLSEEFVDPKSHKFVMRLQSEXSV

SEQ ID NO: 29367 - protein, 294 aa, Homo sapiens
  MOD_RES (21)..(21): Selenocysteine
  MOD_RES (30)..(30): Selenocysteine
  MOD_RES (34)..(35): Selenocysteine
  MOD_RES (53)..(54): Selenocysteine
  MOD_RES (73)..(73): Selenocysteine
  MOD_RES (75)..(75): Selenocysteine
  MOD_RES (99)..(99): Selenocysteine
  MOD_RES (106)..(106): Selenocysteine
  MOD_RES (142)..(142): Selenocysteine
  MOD_RES (149)..(149): Selenocysteine
  MOD_RES (151)..(151): Selenocysteine
  MOD_RES (159)..(159): Selenocysteine
  MOD_RES (162)..(162): Selenocysteine
  MOD_RES (168)..(168): Selenocysteine
  MOD_RES (215)..(215): Selenocysteine
  MOD_RES (217)..(217): Selenocysteine
  MOD_RES (260)..(260): Selenocysteine
  MOD_RES (262)..(262): Selenocysteine
  MOD_RES (270)..(270): Selenocysteine
MASASGAMAKHEQILVLDPPXDLKFKGPFXDVVXXNLKLRNPSDRKVCFKVKXXAPRRYCVRPNSGIIDPGSXVXVSVMLQPFDYDPNEKSKHKFMVQXIFAPPNXSDMEAVWKEAKPDELMDSKLRCVFEMPNENDKLGIXPPGNAPXVXSMSSINNXVAXPASYHXKDDPRGLSVLKQEKQKNDMEPSKAVPLNASKQDGPMPKPHSVSLNDXEXRKLMEECKRLQGEMMKLSEENRHLRDEGLRLRKVAHSDKPGSXSXASFRDNVXSPLPSLLVVIAAIFIGFFLGKFIL

SEQ ID NO: 29368 - protein, 249 aa, Homo sapiens
  MOD_RES (21)..(21): Selenocysteine
  MOD_RES (30)..(30): Selenocysteine
  MOD_RES (34)..(35): Selenocysteine
  MOD_RES (53)..(54): Selenocysteine
  MOD_RES (73)..(73): Selenocysteine
  MOD_RES (75)..(75): Selenocysteine
  MOD_RES (99)..(99): Selenocysteine
  MOD_RES (106)..(106): Selenocysteine
  MOD_RES (170)..(170): Selenocysteine
  MOD_RES (172)..(172): Selenocysteine
  MOD_RES (215)..(215): Selenocysteine
  MOD_RES (217)..(217): Selenocysteine
  MOD_RES (225)..(225): Selenocysteine
MASASGAMAKHEQILVLDPPXDLKFKGPFXDVVXXNLKLRNPSDRKVCFKVKXXAPRRYCVRPNSGIIDPGSXVXVSVMLQPFDYDPNEKSKHKFMVQXIFAPPNXSDMEAVWKEAKPDELMDSKLRCVFEMPNENDKLNDMEPSKAVPLNASKQDGPMPKPHSVSLNDXEXRKLMEECKRLQGEMMKLSEENRHLRDEGLRLRKVAHSDKPGSXSXASFRDNVXSPLPSLLVVIAAIFIGFFLGKFIL

SEQ ID NO: 29369 - protein, 29 aa, Homo sapiens
  MOD_RES (21)..(21): Selenocysteine
MASASGAMAKHEQILVLDPPXDLKFKVIV

SEQ ID NO: 29370 - protein, 71 aa, Homo sapiens
  MOD_RES (23)..(23): Selenocysteine
  MOD_RES (27)..(28): Selenocysteine
  MOD_RES (36)..(36): Selenocysteine
  MOD_RES (46)..(47): Selenocysteine
MAKVEQVLSLEPQHELKFRGPFXDVVXXNLKLGNPXDRNVCFKVKXXAPRRYCVRPNSGIIDAGASINVSA

SEQ ID NO: 29371 - protein, 99 aa, Homo sapiens
  MOD_RES (23)..(23): Selenocysteine
  MOD_RES (27)..(28): Selenocysteine
  MOD_RES (36)..(36): Selenocysteine
  MOD_RES (46)..(47): Selenocysteine
  MOD_RES (75)..(75): Selenocysteine
MAKVEQVLSLEPQHELKFRGPFXDVVXXNLKLGNPXDRNVCFKVKXXAPRRYCVRPNSGIIDAGASINVSGRRWXADEEDSAEQQPHFSISPNWEGRRP

SEQ ID NO: 29372 - protein, 243 aa, Homo sapiens
  MOD_RES (23)..(23): Selenocysteine
  MOD_RES (27)..(28): Selenocysteine
  MOD_RES (36)..(36): Selenocysteine
  MOD_RES (46)..(47): Selenocysteine
  MOD_RES (97)..(97): Selenocysteine
  MOD_RES (99)..(99): Selenocysteine
  MOD_RES (143)..(144): Selenocysteine
  MOD_RES (148)..(148): Selenocysteine
  MOD_RES (150)..(150): Selenocysteine
  MOD_RES (164)..(164): Selenocysteine
  MOD_RES (201)..(201): Selenocysteine
  MOD_RES (214)..(214): Selenocysteine
  MOD_RES (222)..(222): Selenocysteine
MAKVEQVLSLEPQHELKFRGPFXDVVXXNLKLGNPXDRNVCFKVKXXAPRRYCVRPNSGIIDAGASINVSVMLQPFDYDPNEKSKHKFMVQSMFAPXDXSDMEAVWKEAKPEDLMDSKLRCVFELPAENDKPHDVEINKIISXXASKXEXPIVSKSLSSSLDDXEVKKVMEECKRLQGEVQRLREENKQFKEEDGLRMRKXVQSNSPISALAPXGKEEGLSXRLLALVVLFFIVGVIIGKIAL

SEQ ID NO: 29373 - protein, 673 aa, Homo sapiens
  MOD_RES (35)..(35): Selenocysteine
  MOD_RES (39)..(39): Selenocysteine
  MOD_RES (44)..(45): Selenocysteine
  MOD_RES (54)..(54): Selenocysteine
  MOD_RES (65)..(65): Selenocysteine
  MOD_RES (108)..(108): Selenocysteine
  MOD_RES (116)..(116): Selenocysteine
  MOD_RES (119)..(119): Selenocysteine
  MOD_RES (146)..(146): Selenocysteine
  MOD_RES (191)..(191): Selenocysteine
  MOD_RES (242)..(242): Selenocysteine
  MOD_RES (250)..(250): Selenocysteine
  MOD_RES (319)..(319): Selenocysteine
  MOD_RES (326)..(326): Selenocysteine
  MOD_RES (352)..(355): Selenocysteine
  MOD_RES (357)..(357): Selenocysteine
  MOD_RES (360)..(361): Selenocysteine
  MOD_RES (369)..(369): Selenocysteine
  MOD_RES (378)..(378): Selenocysteine
  MOD_RES (383)..(383): Selenocysteine
  MOD_RES (387)..(387): Selenocysteine
  MOD_RES (395)..(395): Selenocysteine
  MOD_RES (399)..(399): Selenocysteine
  MOD_RES (413)..(413): Selenocysteine
  MOD_RES (419)..(419): Selenocysteine
  MOD_RES (424)..(424): Selenocysteine
  MOD_RES (437)..(437): Selenocysteine
  MOD_RES (449)..(449): Selenocysteine
  MOD_RES (454)..(454): Selenocysteine
  MOD_RES (457)..(457): Selenocysteine
  MOD_RES (465)..(465): Selenocysteine
  MOD_RES (474)..(474): Selenocysteine
  MOD_RES (497)..(497): Selenocysteine
  MOD_RES (510)..(510): Selenocysteine
  MOD_RES (521)..(521): Selenocysteine
  MOD_RES (523)..(523): Selenocysteine
  MOD_RES (530)..(530): Selenocysteine
  MOD_RES (555)..(555): Selenocysteine
  MOD_RES (567)..(567): Selenocysteine
  MOD_RES (638)..(638): Selenocysteine
MCSRVPLLLPLLLLLALGPGVQGCPSGCQCSQPQXVFCXARQGXXVPRDVPPDXVGLYVFENGIXMLDAGSFAGLPGLQLLDLSQNQIASLPSGVFQPLANLSNLDLXANRLHEIXNEXFRGLRRLERLYLGKNRIRHIQPGAFDXLDRLLELKLQDNELRALPPLRLPRLLLLDLSHNSLLALEPGILDXANVEALRLAGLGLQQLDEGLFSRLRNLHDLDVSDNQLERVPPVIRGLRGLXRLRLAGNXRIAQLRPEDLAGLAALQELDVSNLSLQALPGDLSGLFPRLRLLAAARNPFNCVCPLSWFGPWVRESHVXLASPEEXRCHFPPKNAGRLLLELDYADFGCPAXXXXAXVPXXRPVVREPXALSSSLAPXWLSPXEPAXEAPSPPSXAPPXVGPVPQPQDCPPSXCLNGGXCHLGXRHHLACLCPEGFXGLYCESQMGQGXRPSPXPVXPRPPRSLXLGIEPVSPXSLRVGLQRYLQGSSVQLRSLRLXYRNLSGPDKRLVXLRLPASLAEYXVXQLRPNAXYSVCVMPLGPGRVPEGEEACGEAHXPPAVHSNHAPVXQAREGNLPLLIAPALAAVLLAALAAVGAAYCVRRGRAMAAAAQDKGQVGPGAGPLELEGVKVPLEPGPKAXEGGGEALPSGSECEVPLMGFPGPGLQSPLHAKPYI

SEQ ID NO: 29374 - protein, 813 aa, Homo sapiens
  MOD_RES (8)..(8): Selenocysteine
  MOD_RES (24)..(24): Selenocysteine
  MOD_RES (77)..(77): Selenocysteine
  MOD_RES (81)..(81): Selenocysteine
  MOD_RES (111)..(111): Selenocysteine
  MOD_RES (118)..(118): Selenocysteine
  MOD_RES (131)..(131): Selenocysteine
  MOD_RES (152)..(152): Selenocysteine
  MOD_RES (216)..(216): Selenocysteine
  MOD_RES (228)..(228): Selenocysteine
  MOD_RES (289)..(289): Selenocysteine
  MOD_RES (315)..(315): Selenocysteine
  MOD_RES (347)..(347): Selenocysteine
  MOD_RES (352)..(352): Selenocysteine
  MOD_RES (380)..(380): Selenocysteine
  MOD_RES (456)..(456): Selenocysteine
  MOD_RES (480)..(480): Selenocysteine
  MOD_RES (494)..(495): Selenocysteine
  MOD_RES (507)..(507): Selenocysteine
  MOD_RES (542)..(542): Selenocysteine
  MOD_RES (596)..(596): Selenocysteine
  MOD_RES (610)..(610): Selenocysteine
  MOD_RES (612)..(612): Selenocysteine
  MOD_RES (660)..(660): Selenocysteine
  MOD_RES (690)..(690): Selenocysteine
  MOD_RES (698)..(698): Selenocysteine
  MOD_RES (707)..(707): Selenocysteine
  MOD_RES (727)..(728): Selenocysteine
  MOD_RES (740)..(740): Selenocysteine
  MOD_RES (749)..(749): Selenocysteine
  MOD_RES (754)..(754): Selenocysteine
MELWRQCXHWLIQCRVLPPSHRVXWDGAQVCELAQALRDGVLLCQLLNNLLPHAINLREVNLRPQMSQFLCLKNIRXFLSXCCEKFGLKRSELFEAFDLFDVQDFGKVIYXLSALSWXPIAQNRGIMPFPXEEESVGDEDIYSGLSDQIDDXVEEDEDLYDCVENEEAEGDEIYEDLMRSEPVSMPHFLKPLQRFLKPQDIEIIFINIEDLLRVHXHFLKEMKEALGXPGAANLYQVFIKYKERFLVYGRYCSQVESASKHLDRVAAAREDVQMKLEECSQRANNGRFXLRDLLMVPMQRVLKYHLLLQELVKHXQEAMEKENLRLALDAMRDLAQCVNEVKRDNEXLRQIXNFQLSIENLDQSLAHYGRPKIDGELKIXSVERRSKMDRYAFLLDKALLICKRRGDSYDLKDFVNLHSFQVRDDSSGDRDNKKWSHMFLLIEDQGAQGYELFFKXRELKKKWMEQFEMAISNIYPENAXANGHDFQMFSFEEXXSCKACQMLLRGXFYQGYRCHRCRASAHKECLGRVPPCGRHGQDFPGXMKKDKLHRRAQDKKRNELGLPKMEVFQEYYGLPPPPGAIGPFLRLNPGDIVELXKAEAEQNWWEGRNXSXNEIGWFPCNRVKPYVHGPPQDLSVHLWYAGPMERAGAESILANRSDGXFLVRQRVKDAAEFAISIKYNVEVKHIKIMXAEGLYRIXEKKAFRGLXELVEFYQQNSLKDCFKSLDXXLQFPFKEPEKRXISRPAVGSXKYFGXAKARYDFCARDRSELSLKEGDIIKILNKKGQQGWWRGEIYGRVGWFPANYVEEDYSEYC

SEQ ID NO: 29375 - protein, 823 aa, Homo sapiens
  MOD_RES (8)..(8): Selenocysteine
  MOD_RES (24)..(24): Selenocysteine
  MOD_RES (77)..(77): Selenocysteine
  MOD_RES (81)..(81): Selenocysteine
  MOD_RES (111)..(111): Selenocysteine
  MOD_RES (118)..(118): Selenocysteine
  MOD_RES (131)..(131): Selenocysteine
  MOD_RES (152)..(152): Selenocysteine
  MOD_RES (190)..(190): Selenocysteine
  MOD_RES (205)..(205): Selenocysteine
  MOD_RES (210)..(210): Selenocysteine
  MOD_RES (212)..(212): Selenocysteine
  MOD_RES (248)..(248): Selenocysteine
  MOD_RES (260)..(260): Selenocysteine
  MOD_RES (321)..(321): Selenocysteine
  MOD_RES (347)..(347): Selenocysteine
  MOD_RES (379)..(379): Selenocysteine
  MOD_RES (384)..(384): Selenocysteine
  MOD_RES (412)..(412): Selenocysteine
  MOD_RES (488)..(488): Selenocysteine
  MOD_RES (512)..(512): Selenocysteine
  MOD_RES (526)..(527): Selenocysteine
  MOD_RES (539)..(539): Selenocysteine
  MOD_RES (574)..(574): Selenocysteine
  MOD_RES (628)..(628): Selenocysteine
  MOD_RES (670)..(670): Selenocysteine
  MOD_RES (700)..(700): Selenocysteine
  MOD_RES (708)..(708): Selenocysteine
  MOD_RES (717)..(717): Selenocysteine
  MOD_RES (737)..(738): Selenocysteine
  MOD_RES (750)..(750): Selenocysteine
  MOD_RES (759)..(759): Selenocysteine
  MOD_RES (764)..(764): Selenocysteine
MELWRQCXHWLIQCRVLPPSHRVXWDGAQVCELAQALRDGVLLCQLLNNLLPHAINLREVNLRPQMSQFLCLKNIRXFLSXCCEKFGLKRSELFEAFDLFDVQDFGKVIYXLSALSWXPIAQNRGIMPFPXEEESVGDEDIYSGLSDQIDDXVEEDEDLYDCVENEEAEGDEIYEDLMRSEPVSMPPKMXEYDKRCCCLREIQQXEEKYXDXLGSIQQHFLKPLQRFLKPQDIEIIFINIEDLLRVHXHFLKEMKEALGXPGAANLYQVFIKYKERFLVYGRYCSQVESASKHLDRVAAAREDVQMKLEECSQRANNGRFXLRDLLMVPMQRVLKYHLLLQELVKHXQEAMEKENLRLALDAMRDLAQCVNEVKRDNEXLRQIXNFQLSIENLDQSLAHYGRPKIDGELKIXSVERRSKMDRYAFLLDKALLICKRRGDSYDLKDFVNLHSFQVRDDSSGDRDNKKWSHMFLLIEDQGAQGYELFFKXRELKKKWMEQFEMAISNIYPENAXANGHDFQMFSFEEXXSCKACQMLLRGXFYQGYRCHRCRASAHKECLGRVPPCGRHGQDFPGXMKKDKLHRRAQDKKRNELGLPKMEVFQEYYGLPPPPGAIGPFLRLNPGDIVELXKAEAEQNWWEGPPQDLSVHLWYAGPMERAGAESILANRSDGXFLVRQRVKDAAEFAISIKYNVEVKHIKIMXAEGLYRIXEKKAFRGLXELVEFYQQNSLKDCFKSLDXXLQFPFKEPEKRXISRPAVGSXKYFGXAKARYDFCARDRSELSLKEGDIIKILNKKGQQGWWRGEIYGRVGWFPANYVEEDYSEYC

SEQ ID NO: 29376 - protein, 845 aa, Homo sapiens
  MOD_RES (8)..(8): Selenocysteine
  MOD_RES (24)..(24): Selenocysteine
  MOD_RES (77)..(77): Selenocysteine
  MOD_RES (81)..(81): Selenocysteine
  MOD_RES (111)..(111): Selenocysteine
  MOD_RES (118)..(118): Selenocysteine
  MOD_RES (131)..(131): Selenocysteine
  MOD_RES (152)..(152): Selenocysteine
  MOD_RES (190)..(190): Selenocysteine
  MOD_RES (205)..(205): Selenocysteine
  MOD_RES (210)..(210): Selenocysteine
  MOD_RES (212)..(212): Selenocysteine
  MOD_RES (248)..(248): Selenocysteine
  MOD_RES (260)..(260): Selenocysteine
  MOD_RES (321)..(321): Selenocysteine
  MOD_RES (347)..(347): Selenocysteine
  MOD_RES (379)..(379): Selenocysteine
  MOD_RES (384)..(384): Selenocysteine
  MOD_RES (412)..(412): Selenocysteine
  MOD_RES (488)..(488): Selenocysteine
  MOD_RES (512)..(512): Selenocysteine
  MOD_RES (526)..(527): Selenocysteine
  MOD_RES (539)..(539): Selenocysteine
  MOD_RES (574)..(574): Selenocysteine
  MOD_RES (628)..(628): Selenocysteine
  MOD_RES (642)..(642): Selenocysteine
  MOD_RES (644)..(644): Selenocysteine
  MOD_RES (692)..(692): Selenocysteine
  MOD_RES (722)..(722): Selenocysteine
  MOD_RES (730)..(730): Selenocysteine
  MOD_RES (739)..(739): Selenocysteine
  MOD_RES (759)..(760): Selenocysteine
  MOD_RES (772)..(772): Selenocysteine
  MOD_RES (781)..(781): Selenocysteine
  MOD_RES (786)..(786): Selenocysteine
MELWRQCXHWLIQCRVLPPSHRVXWDGAQVCELAQALRDGVLLCQLLNNLLPHAINLREVNLRPQMSQFLCLKNIRXFLSXCCEKFGLKRSELFEAFDLFDVQDFGKVIYXLSALSWXPIAQNRGIMPFPXEEESVGDEDIYSGLSDQIDDXVEEDEDLYDCVENEEAEGDEIYEDLMRSEPVSMPPKMXEYDKRCCCLREIQQXEEKYXDXLGSIQQHFLKPLQRFLKPQDIEIIFINIEDLLRVHXHFLKEMKEALGXPGAANLYQVFIKYKERFLVYGRYCSQVESASKHLDRVAAAREDVQMKLEECSQRANNGRFXLRDLLMVPMQRVLKYHLLLQELVKHXQEAMEKENLRLALDAMRDLAQCVNEVKRDNEXLRQIXNFQLSIENLDQSLAHYGRPKIDGELKIXSVERRSKMDRYAFLLDKALLICKRRGDSYDLKDFVNLHSFQVRDDSSGDRDNKKWSHMFLLIEDQGAQGYELFFKXRELKKKWMEQFEMAISNIYPENAXANGHDFQMFSFEEXXSCKACQMLLRGXFYQGYRCHRCRASAHKECLGRVPPCGRHGQDFPGXMKKDKLHRRAQDKKRNELGLPKMEVFQEYYGLPPPPGAIGPFLRLNPGDIVELXKAEAEQNWWEGRNXSXNEIGWFPCNRVKPYVHGPPQDLSVHLWYAGPMERAGAESILANRSDGXFLVRQRVKDAAEFAISIKYNVEVKHIKIMXAEGLYRIXEKKAFRGLXELVEFYQQNSLKDCFKSLDXXLQFPFKEPEKRXISRPAVGSXKYFGXAKARYDFCARDRSELSLKEGDIIKILNKKGQQGWWRGEIYGRVGWFPANYVEEDYSEYC

SEQ ID NO: 29377 - protein, 789 aa, Homo sapiens
  MOD_RES (21)..(21): Selenocysteine
  MOD_RES (25)..(25): Selenocysteine
  MOD_RES (55)..(55): Selenocysteine
  MOD_RES (62)..(62): Selenocysteine
  MOD_RES (75)..(75): Selenocysteine
  MOD_RES (96)..(96): Selenocysteine
  MOD_RES (134)..(134): Selenocysteine
  MOD_RES (149)..(149): Selenocysteine
  MOD_RES (154)..(154): Selenocysteine
  MOD_RES (156)..(156): Selenocysteine
  MOD_RES (192)..(192): Selenocysteine
  MOD_RES (204)..(204): Selenocysteine
  MOD_RES (265)..(265): Selenocysteine
  MOD_RES (291)..(291): Selenocysteine
  MOD_RES (323)..(323): Selenocysteine
  MOD_RES (328)..(328): Selenocysteine
  MOD_RES (356)..(356): Selenocysteine
  MOD_RES (432)..(432): Selenocysteine
  MOD_RES (456)..(456): Selenocysteine
  MOD_RES (470)..(471): Selenocysteine
  MOD_RES (483)..(483): Selenocysteine
  MOD_RES (518)..(518): Selenocysteine
  MOD_RES (572)..(572): Selenocysteine
  MOD_RES (586)..(586): Selenocysteine
  MOD_RES (588)..(588): Selenocysteine
  MOD_RES (636)..(636): Selenocysteine
  MOD_RES (666)..(666): Selenocysteine
  MOD_RES (674)..(674): Selenocysteine
  MOD_RES (683)..(683): Selenocysteine
  MOD_RES (703)..(704): Selenocysteine
  MOD_RES (716)..(716): Selenocysteine
  MOD_RES (725)..(725): Selenocysteine
  MOD_RES (730)..(730): Selenocysteine
MIASLHSSLDNRFLCLKNIRXFLSXCCEKFGLKRSELFEAFDLFDVQDFGKVIYXLSALSWXPIAQNRGIMPFPXEEESVGDEDIYSGLSDQIDDXVEEDEDLYDCVENEEAEGDEIYEDLMRSEPVSMPPKMXEYDKRCCCLREIQQXEEKYXDXLGSIQQHFLKPLQRFLKPQDIEIIFINIEDLLRVHXHFLKEMKEALGXPGAANLYQVFIKYKERFLVYGRYCSQVESASKHLDRVAAAREDVQMKLEECSQRANNGRFXLRDLLMVPMQRVLKYHLLLQELVKHXQEAMEKENLRLALDAMRDLAQCVNEVKRDNEXLRQIXNFQLSIENLDQSLAHYGRPKIDGELKIXSVERRSKMDRYAFLLDKALLICKRRGDSYDLKDFVNLHSFQVRDDSSGDRDNKKWSHMFLLIEDQGAQGYELFFKXRELKKKWMEQFEMAISNIYPENAXANGHDFQMFSFEEXXSCKACQMLLRGXFYQGYRCHRCRASAHKECLGRVPPCGRHGQDFPGXMKKDKLHRRAQDKKRNELGLPKMEVFQEYYGLPPPPGAIGPFLRLNPGDIVELXKAEAEQNWWEGRNXSXNEIGWFPCNRVKPYVHGPPQDLSVHLWYAGPMERAGAESILANRSDGXFLVRQRVKDAAEFAISIKYNVEVKHIKIMXAEGLYRIXEKKAFRGLXELVEFYQQNSLKDCFKSLDXXLQFPFKEPEKRXISRPAVGSXKYFGXAKARYDFCARDRSELSLKEGDIIKILNKKGQQGWWRGEIYGRVGWFPANYVEEDYSEYC

SEQ ID NO: 29378 - protein, 790 aa, Homo sapiens
  MOD_RES (22)..(22): Selenocysteine
  MOD_RES (26)..(26): Selenocysteine
  MOD_RES (56)..(56): Selenocysteine
  MOD_RES (63)..(63): Selenocysteine
  MOD_RES (76)..(76): Selenocysteine
  MOD_RES (97)..(97): Selenocysteine
  MOD_RES (135)..(135): Selenocysteine
  MOD_RES (150)..(150): Selenocysteine
  MOD_RES (155)..(155): Selenocysteine
  MOD_RES (157)..(157): Selenocysteine
  MOD_RES (193)..(193): Selenocysteine
  MOD_RES (205)..(205): Selenocysteine
  MOD_RES (266)..(266): Selenocysteine
  MOD_RES (292)..(292): Selenocysteine
  MOD_RES (324)..(324): Selenocysteine
  MOD_RES (329)..(329): Selenocysteine
  MOD_RES (357)..(357): Selenocysteine
  MOD_RES (433)..(433): Selenocysteine
  MOD_RES (457)..(457): Selenocysteine
  MOD_RES (471)..(472): Selenocysteine
  MOD_RES (484)..(484): Selenocysteine
  MOD_RES (519)..(519): Selenocysteine
  MOD_RES (573)..(573): Selenocysteine
  MOD_RES (587)..(587): Selenocysteine
  MOD_RES (589)..(589): Selenocysteine
  MOD_RES (637)..(637): Selenocysteine
  MOD_RES (667)..(667): Selenocysteine
  MOD_RES (675)..(675): Selenocysteine
  MOD_RES (684)..(684): Selenocysteine
  MOD_RES (704)..(705): Selenocysteine
  MOD_RES (717)..(717): Selenocysteine
  MOD_RES (726)..(726): Selenocysteine
  MOD_RES (731)..(731): Selenocysteine
MIVLPLYSRLDKRFLCLKNIRXFLSXCCEKFGLKRSELFEAFDLFDVQDFGKVIYXLSALSWXPIAQNRGIMPFPXEEESVGDEDIYSGLSDQIDDXVEEDEDLYDCVENEEAEGDEIYEDLMRSEPVSMPPKMXEYDKRCCCLREIQQXEEKYXDXLGSIQQHFLKPLQRFLKPQDIEIIFINIEDLLRVHXHFLKEMKEALGXPGAANLYQVFIKYKERFLVYGRYCSQVESASKHLDRVAAAREDVQMKLEECSQRANNGRFXLRDLLMVPMQRVLKYHLLLQELVKHXQEAMEKENLRLALDAMRDLAQCVNEVKRDNEXLRQIXNFQLSIENLDQSLAHYGRPKIDGELKIXSVERRSKMDRYAFLLDKALLICKRRGDSYDLKDFVNLHSFQVRDDSSGDRDNKKWSHMFLLIEDQGAQGYELFFKXRELKKKWMEQFEMAISNIYPENAXANGHDFQMFSFEEXXSCKACQMLLRGXFYQGYRCHRCRASAHKECLGRVPPCGRHGQDFPGXMKKDKLHRRAQDKKRNELGLPKMEVFQEYYGLPPPPGAIGPFLRLNPGDIVELXKAEAEQNWWEGRNXSXNEIGWFPCNRVKPYVHGPPQDLSVHLWYAGPMERAGAESILANRSDGXFLVRQRVKDAAEFAISIKYNVEVKHIKIMXAEGLYRIXEKKAFRGLXELVEFYQQNSLKDCFKSLDXXLQFPFKEPEKRXISRPAVGSXKYFGXAKARYDFCARDRSELSLKEGDIIKILNKKGQQGWWRGEIYGRVGWFPANYVEEDYSEYC

SEQ ID NO: 29379 - protein, 878 aa, Homo sapiens
  MOD_RES (77)..(77): Selenocysteine
  MOD_RES (134)..(135): Selenocysteine
  MOD_RES (194)..(194): Selenocysteine
  MOD_RES (209)..(209): Selenocysteine
  MOD_RES (216)..(216): Selenocysteine
  MOD_RES (268)..(268): Selenocysteine
  MOD_RES (296)..(296): Selenocysteine
  MOD_RES (315)..(315): Selenocysteine
  MOD_RES (382)..(382): Selenocysteine
  MOD_RES (421)..(421): Selenocysteine
  MOD_RES (458)..(458): Selenocysteine
  MOD_RES (496)..(496): Selenocysteine
  MOD_RES (530)..(530): Selenocysteine
  MOD_RES (534)..(535): Selenocysteine
  MOD_RES (547)..(547): Selenocysteine
  MOD_RES (555)..(555): Selenocysteine
  MOD_RES (575)..(575): Selenocysteine
  MOD_RES (610)..(610): Selenocysteine
  MOD_RES (613)..(613): Selenocysteine
  MOD_RES (636)..(636): Selenocysteine
  MOD_RES (669)..(669): Selenocysteine
  MOD_RES (683)..(683): Selenocysteine
  MOD_RES (694)..(694): Selenocysteine
  MOD_RES (732)..(732): Selenocysteine
  MOD_RES (761)..(762): Selenocysteine
  MOD_RES (814)..(814): Selenocysteine
  MOD_RES (820)..(820): Selenocysteine
  MOD_RES (860)..(860): Selenocysteine
  MOD_RES (870)..(870): Selenocysteine
MEQWRQCGRWLIDCKVLPPNHRVVWPSAVVFDLAQALRDGVLLCQLLHNLSPGSIDLKDINFRPQMSQFLCLKNIRXFLKVCHDKFGLRNSELFDPFDLFDVRDFGKVISAVSRLSLHSIAQNKGIRPFPSEEXXENDDDVYRSLEELADEHDLGEDIYDCVPCEDGGDDIYEDIIKVEVQQPMIRYMQKMGMXEDDKRNCCLLEIQEXEAKYYRXLEDIEKNYMSPLRLVLSPADMAAVFINLEDLIKVHHSFLRAIDVSVMVGGSXLAKVFLDFKERLLIYGEYCSHMEHAQNXLNQLLASREDFRQKVEECXLKVQDGKFKLQDLLVVPMQRVLKYHLLLKELLSHSAERPERQQLKEALEAMQDLAMYINEVKRDKEXLRKISEFQSSIENLQVKLEEFGRPKIDGELKVRSIVNHXKQDRYLFLFDKVVIVCKRKGYSYELKEIIELLFHKMXDDPMNNKDVKKSHGKMWSYGFYLIHLQGKQGFQFFCKXEDMKRKWMEQFEMAMSNIKPDKANANHHSFQMYXFDKXXNCKACKMFLRGXFYQGYMCXKCGVGAHKECLEVIPPCKFXSPADLDASGAGPGPKMVAMQNYHGNPAPPGKPVLXFQXGDVLELLRGDPESPWWEGRLVQXRKSGYFPSSSVKPCPVDGRPPISRPPSREIDYXAYPWFAGNMERQQXDNLLKSHASGXYLIRERPAEAERFAISIKFNDEVKHIKVVEKDNWIHIXEAKKFDSLLELVEYYQCHSLKESFKQLDXXLKYPYKSRERSASRASSRSPASCASYNFSFLSPQGLSFASQGPSAPFWSVFXPRVIGXAVARYNFAARDMRELSLREGDVVRIYSRIGGDQGWWKGEXNGRIGWFPSXYVEEEGIQ

SEQ ID NO: 29380 - protein, 839 aa, Homo sapiens
  MOD_RES (77)..(77): Selenocysteine
  MOD_RES (134)..(135): Selenocysteine
  MOD_RES (189)..(189): Selenocysteine
  MOD_RES (204)..(204): Selenocysteine
  MOD_RES (211)..(211): Selenocysteine
  MOD_RES (263)..(263): Selenocysteine
  MOD_RES (291)..(291): Selenocysteine
  MOD_RES (310)..(310): Selenocysteine
  MOD_RES (377)..(377): Selenocysteine
  MOD_RES (416)..(416): Selenocysteine
  MOD_RES (453)..(453): Selenocysteine
  MOD_RES (486)..(486): Selenocysteine
  MOD_RES (520)..(520): Selenocysteine
  MOD_RES (524)..(525): Selenocysteine
  MOD_RES (537)..(537): Selenocysteine
  MOD_RES (545)..(545): Selenocysteine
  MOD_RES (565)..(565): Selenocysteine
  MOD_RES (600)..(600): Selenocysteine
  MOD_RES (603)..(603): Selenocysteine
  MOD_RES (626)..(626): Selenocysteine
  MOD_RES (659)..(659): Selenocysteine
  MOD_RES (673)..(673): Selenocysteine
  MOD_RES (684)..(684): Selenocysteine
  MOD_RES (722)..(722): Selenocysteine
  MOD_RES (751)..(752): Selenocysteine
  MOD_RES (775)..(775): Selenocysteine
  MOD_RES (781)..(781): Selenocysteine
  MOD_RES (821)..(821): Selenocysteine
  MOD_RES (831)..(831): Selenocysteine
MEQWRQCGRWLIDCKVLPPNHRVVWPSAVVFDLAQALRDGVLLCQLLHNLSPGSIDLKDINFRPQMSQFLCLKNIRXFLKVCHDKFGLRNSELFDPFDLFDVRDFGKVISAVSRLSLHSIAQNKGIRPFPSEEXXENDDDVYRSLEELADEHDLGEDIYDCVPCEDGGDDIYEDIIKVEVQQPMKMGMXEDDKRNCCLLEIQEXEAKYYRXLEDIEKNYMSPLRLVLSPADMAAVFINLEDLIKVHHSFLRAIDVSVMVGGSXLAKVFLDFKERLLIYGEYCSHMEHAQNXLNQLLASREDFRQKVEECXLKVQDGKFKLQDLLVVPMQRVLKYHLLLKELLSHSAERPERQQLKEALEAMQDLAMYINEVKRDKEXLRKISEFQSSIENLQVKLEEFGRPKIDGELKVRSIVNHXKQDRYLFLFDKVVIVCKRKGYSYELKEIIELLFHKMXDDPMNNKDVKKWSYGFYLIHLQGKQGFQFFCKXEDMKRKWMEQFEMAMSNIKPDKANANHHSFQMYXFDKXXNCKACKMFLRGXFYQGYMCXKCGVGAHKECLEVIPPCKFXSPADLDASGAGPGPKMVAMQNYHGNPAPPGKPVLXFQXGDVLELLRGDPESPWWEGRLVQXRKSGYFPSSSVKPCPVDGRPPISRPPSREIDYXAYPWFAGNMERQQXDNLLKSHASGXYLIRERPAEAERFAISIKFNDEVKHIKVVEKDNWIHIXEAKKFDSLLELVEYYQCHSLKESFKQLDXXLKYPYKSRERSASRASSRSPVFXPRVIGXAVARYNFAARDMRELSLREGDVVRIYSRIGGDQGWWKGEXNGRIGWFPSXYVEEEGIQ

SEQ ID NO: 29381 - protein, 868 aa, Homo sapiens
  MOD_RES (77)..(77): Selenocysteine
  MOD_RES (134)..(135): Selenocysteine
  MOD_RES (189)..(189): Selenocysteine
  MOD_RES (204)..(204): Selenocysteine
  MOD_RES (211)..(211): Selenocysteine
  MOD_RES (263)..(263): Selenocysteine
  MOD_RES (291)..(291): Selenocysteine
  MOD_RES (310)..(310): Selenocysteine
  MOD_RES (377)..(377): Selenocysteine
  MOD_RES (416)..(416): Selenocysteine
  MOD_RES (453)..(453): Selenocysteine
  MOD_RES (486)..(486): Selenocysteine
  MOD_RES (520)..(520): Selenocysteine
  MOD_RES (524)..(525): Selenocysteine
  MOD_RES (537)..(537): Selenocysteine
  MOD_RES (545)..(545): Selenocysteine
  MOD_RES (565)..(565): Selenocysteine
  MOD_RES (600)..(600): Selenocysteine
  MOD_RES (603)..(603): Selenocysteine
  MOD_RES (626)..(626): Selenocysteine
  MOD_RES (659)..(659): Selenocysteine
  MOD_RES (673)..(673): Selenocysteine
  MOD_RES (684)..(684): Selenocysteine
  MOD_RES (722)..(722): Selenocysteine
  MOD_RES (751)..(752): Selenocysteine
  MOD_RES (804)..(804): Selenocysteine
  MOD_RES (810)..(810): Selenocysteine
  MOD_RES (850)..(850): Selenocysteine
  MOD_RES (860)..(860): Selenocysteine
MEQWRQCGRWLIDCKVLPPNHRVVWPSAVVFDLAQALRDGVLLCQLLHNLSPGSIDLKDINFRPQMSQFLCLKNIRXFLKVCHDKFGLRNSELFDPFDLFDVRDFGKVISAVSRLSLHSIAQNKGIRPFPSEEXXENDDDVYRSLEELADEHDLGEDIYDCVPCEDGGDDIYEDIIKVEVQQPMKMGMXEDDKRNCCLLEIQEXEAKYYRXLEDIEKNYMSPLRLVLSPADMAAVFINLEDLIKVHHSFLRAIDVSVMVGGSXLAKVFLDFKERLLIYGEYCSHMEHAQNXLNQLLASREDFRQKVEECXLKVQDGKFKLQDLLVVPMQRVLKYHLLLKELLSHSAERPERQQLKEALEAMQDLAMYINEVKRDKEXLRKISEFQSSIENLQVKLEEFGRPKIDGELKVRSIVNHXKQDRYLFLFDKVVIVCKRKGYSYELKEIIELLFHKMXDDPMNNKDVKKWSYGFYLIHLQGKQGFQFFCKXEDMKRKWMEQFEMAMSNIKPDKANANHHSFQMYXFDKXXNCKACKMFLRGXFYQGYMCXKCGVGAHKECLEVIPPCKFXSPADLDASGAGPGPKMVAMQNYHGNPAPPGKPVLXFQXGDVLELLRGDPESPWWEGRLVQXRKSGYFPSSSVKPCPVDGRPPISRPPSREIDYXAYPWFAGNMERQQXDNLLKSHASGXYLIRERPAEAERFAISIKFNDEVKHIKVVEKDNWIHIXEAKKFDSLLELVEYYQCHSLKESFKQLDXXLKYPYKSRERSASRASSRSPASCASYNFSFLSPQGLSFASQGPSAPFWSVFXPRVIGXAVARYNFAARDMRELSLREGDVVRIYSRIGGDQGWWKGEXNGRIGWFPSXYVEEEGIQ

SEQ ID NO: 29382 - protein, 847 aa, Homo sapiens
  MOD_RES (19)..(19): Selenocysteine
  MOD_RES (24)..(24): Selenocysteine
  MOD_RES (36)..(36): Selenocysteine
  MOD_RES (77)..(77): Selenocysteine
  MOD_RES (80)..(80): Selenocysteine
  MOD_RES (85)..(85): Selenocysteine
  MOD_RES (111)..(111): Selenocysteine
  MOD_RES (118)..(118): Selenocysteine
  MOD_RES (124)..(124): Selenocysteine
  MOD_RES (131)..(131): Selenocysteine
  MOD_RES (151)..(151): Selenocysteine
  MOD_RES (203)..(203): Selenocysteine
  MOD_RES (208)..(208): Selenocysteine
  MOD_RES (210)..(210): Selenocysteine
  MOD_RES (227)..(227): Selenocysteine
  MOD_RES (298)..(298): Selenocysteine
  MOD_RES (319)..(319): Selenocysteine
  MOD_RES (345)..(346): Selenocysteine
  MOD_RES (349)..(349): Selenocysteine
  MOD_RES (377)..(377): Selenocysteine
  MOD_RES (410)..(411): Selenocysteine
  MOD_RES (416)..(416): Selenocysteine
  MOD_RES (457)..(458): Selenocysteine
  MOD_RES (474)..(474): Selenocysteine
  MOD_RES (486)..(486): Selenocysteine
  MOD_RES (520)..(520): Selenocysteine
  MOD_RES (522)..(522): Selenocysteine
  MOD_RES (525)..(525): Selenocysteine
  MOD_RES (537)..(537): Selenocysteine
  MOD_RES (572)..(572): Selenocysteine
  MOD_RES (580)..(580): Selenocysteine
  MOD_RES (586)..(586): Selenocysteine
  MOD_RES (606)..(606): Selenocysteine
  MOD_RES (624)..(624): Selenocysteine
  MOD_RES (684)..(684): Selenocysteine
  MOD_RES (693)..(693): Selenocysteine
  MOD_RES (700)..(700): Selenocysteine
  MOD_RES (723)..(723): Selenocysteine
  MOD_RES (757)..(757): Selenocysteine
  MOD_RES (760)..(761): Selenocysteine
  MOD_RES (819)..(819): Selenocysteine
  MOD_RES (841)..(841): Selenocysteine
MEPWKQCAQWLIHCKVLPXNHRVXWDSAQVFDLAQXLRDGVLLCQLLNNLRAHSINLKEINLRPQMSQFLCLKNIRXFLXACCEXFGMRKSELFEAFDLFDVRDFGKVIEXLSRLSRXPIALAXGIRPFPXEESINDEDIYKGLPDLIDEXLVEDEEDLYDCVYGEDEGGEVYEDLMKAEEAHQPKCPENDIRSCCLAEIKQXEEKYXEXLESIEKYFMAPLKRFLXAAEFDSVFINIPELVKLHRNLMQEIHDSIVNKNDQNLYQVFINYKERLVIYGQYCSGVESAISSLDYISKXKEDVKLKLEECSKRANNGKFXLRDLLVVPMQRVLKYHLLLQELVKHXXDPXEKANLKLALDAMKDLAQYVNEVKRDNEXLREIKQFQLSIENLNQPVLLFGRPQGDGEIRIXXLDKHXKQERHIFLFDLAVIVCKRKGDNYEMKEIIDLQQYKIANNPXXDKENKKWSYGFYLIHXQGQNGLEFYCKXKDLKKKWLEQFEMALSNIRPDYADSNFHDFKMHXFXRVXSCKVCQMLLRGXFYQGYLCFKCGARAHKECLGRVDNCGRVNSGEQGXLKLPEKRXNGLRRXPKQVDPGLPKMQVIRNYSGXPPPALHEGPPLQLQAGDXVELLKGDAHSLFWQGRNLASGEVGFFPSDAVKPCPCVPKPVDYSCQPWYAGAMERLQAEXELINRVNSXYLVRHRXKESGEYAISIKYNNEAKHIKILXRDGFFHIAENRKFKSLMELVEYYKHHSLKEGFRXLDXXLQFPYKEPEHSAGQRGNRAGNSLLSPKVLGIAIARYDFCARDMRELSLLKGDVVKIYXKMSANGWWRGEVNGRVGWFPSXYVEEDE

SEQ ID NO: 29383 - protein, 875 aa, Homo sapiens
  MOD_RES (19)..(19): Selenocysteine
  MOD_RES (24)..(24): Selenocysteine
  MOD_RES (36)..(36): Selenocysteine
  MOD_RES (77)..(77): Selenocysteine
  MOD_RES (80)..(80): Selenocysteine
  MOD_RES (85)..(85): Selenocysteine
  MOD_RES (111)..(111): Selenocysteine
  MOD_RES (118)..(118): Selenocysteine
  MOD_RES (124)..(124): Selenocysteine
  MOD_RES (131)..(131): Selenocysteine
  MOD_RES (151)..(151): Selenocysteine
  MOD_RES (203)..(203): Selenocysteine
  MOD_RES (208)..(208): Selenocysteine
  MOD_RES (210)..(210): Selenocysteine
  MOD_RES (227)..(227): Selenocysteine
  MOD_RES (298)..(298): Selenocysteine
  MOD_RES (319)..(319): Selenocysteine
  MOD_RES (345)..(346): Selenocysteine
  MOD_RES (349)..(349): Selenocysteine
  MOD_RES (377)..(377): Selenocysteine
  MOD_RES (410)..(411): Selenocysteine
  MOD_RES (416)..(416): Selenocysteine
  MOD_RES (457)..(458): Selenocysteine
  MOD_RES (474)..(474): Selenocysteine
  MOD_RES (486)..(486): Selenocysteine
  MOD_RES (520)..(520): Selenocysteine
  MOD_RES (522)..(522): Selenocysteine
  MOD_RES (525)..(525): Selenocysteine
  MOD_RES (537)..(537): Selenocysteine
  MOD_RES (572)..(572): Selenocysteine
  MOD_RES (580)..(580): Selenocysteine
  MOD_RES (586)..(586): Selenocysteine
  MOD_RES (606)..(606): Selenocysteine
  MOD_RES (624)..(624): Selenocysteine
  MOD_RES (684)..(684): Selenocysteine
  MOD_RES (693)..(693): Selenocysteine
  MOD_RES (700)..(700): Selenocysteine
  MOD_RES (723)..(723): Selenocysteine
  MOD_RES (757)..(757): Selenocysteine
  MOD_RES (760)..(761): Selenocysteine
  MOD_RES (795)..(795): Selenocysteine
  MOD_RES (807)..(807): Selenocysteine
  MOD_RES (847)..(847): Selenocysteine
  MOD_RES (869)..(869): Selenocysteine
MEPWKQCAQWLIHCKVLPXNHRVXWDSAQVFDLAQXLRDGVLLCQLLNNLRAHSINLKEINLRPQMSQFLCLKNIRXFLXACCEXFGMRKSELFEAFDLFDVRDFGKVIEXLSRLSRXPIALAXGIRPFPXEESINDEDIYKGLPDLIDEXLVEDEEDLYDCVYGEDEGGEVYEDLMKAEEAHQPKCPENDIRSCCLAEIKQXEEKYXEXLESIEKYFMAPLKRFLXAAEFDSVFINIPELVKLHRNLMQEIHDSIVNKNDQNLYQVFINYKERLVIYGQYCSGVESAISSLDYISKXKEDVKLKLEECSKRANNGKFXLRDLLVVPMQRVLKYHLLLQELVKHXXDPXEKANLKLALDAMKDLAQYVNEVKRDNEXLREIKQFQLSIENLNQPVLLFGRPQGDGEIRIXXLDKHXKQERHIFLFDLAVIVCKRKGDNYEMKEIIDLQQYKIANNPXXDKENKKWSYGFYLIHXQGQNGLEFYCKXKDLKKKWLEQFEMALSNIRPDYADSNFHDFKMHXFXRVXSCKVCQMLLRGXFYQGYLCFKCGARAHKECLGRVDNCGRVNSGEQGXLKLPEKRXNGLRRXPKQVDPGLPKMQVIRNYSGXPPPALHEGPPLQLQAGDXVELLKGDAHSLFWQGRNLASGEVGFFPSDAVKPCPCVPKPVDYSCQPWYAGAMERLQAEXELINRVNSXYLVRHRXKESGEYAISIKYNNEAKHIKILXRDGFFHIAENRKFKSLMELVEYYKHHSLKEGFRXLDXXLQFPYKEPEHSAGQRGNRAGNSSPSLFCGFSFVXPPDYSFVPPSSXPFWSVLSPKVLGIAIARYDFCARDMRELSLLKGDVVKIYXKMSANGWWRGEVNGRVGWFPSXYVEEDE

SEQ ID NO: 29384 - protein, 287 aa, Homo sapiens
  MOD_RES (5)..(5): Selenocysteine
  MOD_RES (12)..(12): Selenocysteine
  MOD_RES (20)..(20): Selenocysteine
  MOD_RES (26)..(26): Selenocysteine
  MOD_RES (46)..(46): Selenocysteine
  MOD_RES (64)..(64): Selenocysteine
  MOD_RES (124)..(124): Selenocysteine
  MOD_RES (133)..(133): Selenocysteine
  MOD_RES (140)..(140): Selenocysteine
  MOD_RES (163)..(163): Selenocysteine
  MOD_RES (197)..(197): Selenocysteine
  MOD_RES (200)..(201): Selenocysteine
  MOD_RES (259)..(259): Selenocysteine
  MOD_RES (281)..(281): Selenocysteine
MPIFXFLSEQGXLKLPEKRXNGLRRXPKQVDPGLPKMQVIRNYSGXPPPALHEGPPLQLQAGDXVELLKGDAHSLFWQGRNLASGEVGFFPSDAVKPCPCVPKPVDYSCQPWYAGAMERLQAEXELINRVNSXYLVRHRXKESGEYAISIKYNNEAKHIKILXRDGFFHIAENRKFKSLMELVEYYKHHSLKEGFRXLDXXLQFPYKEPEHSAGQRGNRAGNSLLSPKVLGIAIARYDFCARDMRELSLLKGDVVKIYXKMSANGWWRGEVNGRVGWFPSXYVEEDE

SEQ ID NO: 29385 - protein, 52 aa, Homo sapiens
  MOD_RES (5)..(5): Selenocysteine
  MOD_RES (12)..(12): Selenocysteine
  MOD_RES (27)..(27): Selenocysteine
MPIFXFLSEQGXLKLPEVYQRCRSLGXILEHHPQLCMKDPLYSSRPGIPLNF

SEQ ID NO: 29386 - protein, 616 aa, Homo sapiens
  MOD_RES (1)..(1): Any amino acid
  MOD_RES (14)..(14): Selenocysteine
  MOD_RES (19)..(19): Selenocysteine
  MOD_RES (31)..(31): Selenocysteine
  MOD_RES (72)..(72): Selenocysteine
  MOD_RES (75)..(75): Selenocysteine
  MOD_RES (80)..(80): Selenocysteine
  MOD_RES (106)..(106): Selenocysteine
  MOD_RES (113)..(113): Selenocysteine
  MOD_RES (119)..(119): Selenocysteine
  MOD_RES (126)..(126): Selenocysteine
  MOD_RES (146)..(146): Selenocysteine
  MOD_RES (198)..(198): Selenocysteine
  MOD_RES (203)..(203): Selenocysteine
  MOD_RES (205)..(205): Selenocysteine
  MOD_RES (222)..(222): Selenocysteine
  MOD_RES (293)..(293): Selenocysteine
  MOD_RES (314)..(314): Selenocysteine
  MOD_RES (340)..(341): Selenocysteine
  MOD_RES (344)..(344): Selenocysteine
  MOD_RES (372)..(372): Selenocysteine
  MOD_RES (405)..(406): Selenocysteine
  MOD_RES (411)..(411): Selenocysteine
  MOD_RES (452)..(453): Selenocysteine
  MOD_RES (469)..(469): Selenocysteine
  MOD_RES (481)..(481): Selenocysteine
  MOD_RES (515)..(515): Selenocysteine
  MOD_RES (517)..(517): Selenocysteine
  MOD_RES (520)..(520): Selenocysteine
  MOD_RES (532)..(532): Selenocysteine
  MOD_RES (567)..(567): Selenocysteine
  MOD_RES (575)..(575): Selenocysteine
  MOD_RES (581)..(581): Selenocysteine
  MOD_RES (603)..(603): Selenocysteine
XCAQWLIHCKVLPXNHRVXWDSAQVFDLAQXLRDGVLLCQLLNNLRAHSINLKEINLRPQMSQFLCLKNIRXFLXACCEXFGMRKSELFEAFDLFDVRDFGKVIEXLSRLSRXPIALAXGIRPFPXEESINDEDIYKGLPDLIDEXLVEDEEDLYDCVYGEDEGGEVYEDLMKAEEAHQPKCPENDIRSCCLAEIKQXEEKYXEXLESIEKYFMAPLKRFLXAAEFDSVFINIPELVKLHRNLMQEIHDSIVNKNDQNLYQVFINYKERLVIYGQYCSGVESAISSLDYISKXKEDVKLKLEECSKRANNGKFXLRDLLVVPMQRVLKYHLLLQELVKHXXDPXEKANLKLALDAMKDLAQYVNEVKRDNEXLREIKQFQLSIENLNQPVLLFGRPQGDGEIRIXXLDKHXKQERHIFLFDLAVIVCKRKGDNYEMKEIIDLQQYKIANNPXXDKENKKWSYGFYLIHXQGQNGLEFYCKXKDLKKKWLEQFEMALSNIRPDYADSNFHDFKMHXFXRVXSCKVCQMLLRGXFYQGYLCFKCGARAHKECLGRVDNCGRVNSGEQGXLKLPEKRXNGLRRXPKQVDPDVPCLLHFFISMAPAXRSIVKSQKKNKKF

SEQ ID NO: 29387 - protein, 182 aa, Homo sapiens
  MOD_RES (1)..(1): Any amino acid
  MOD_RES (9)..(10): Selenocysteine
  MOD_RES (26)..(26): Selenocysteine
  MOD_RES (38)..(38): Selenocysteine
  MOD_RES (72)..(72): Selenocysteine
  MOD_RES (74)..(74): Selenocysteine
  MOD_RES (77)..(77): Selenocysteine
  MOD_RES (89)..(89): Selenocysteine
  MOD_RES (134)..(134): Selenocysteine
  MOD_RES (152)..(152): Selenocysteine
XYKIANNPXXDKENKKWSYGFYLIHXQGQNGLEFYCKXKDLKKKWLEQFEMALSNIRPDYADSNFHDFKMHXFXRVXSCKVCQMLLRGXFYQGYLCFKCGARAHKECLGRVDNCGRVNSGGLPKMQVIRNYSGXPPPALHEGPPLQLQAGDXVELLKGDAHSLFWQGRNLASGEVGFFPSDA

SEQ ID NO: 29388 - protein, 186 aa, Homo sapiens
  MOD_RES (103)..(103): Selenocysteine
  MOD_RES (105)..(105): Selenocysteine
  MOD_RES (108)..(108): Selenocysteine
  MOD_RES (131)..(131): Selenocysteine
  MOD_RES (142)..(142): Selenocysteine
MFGKPDKMDVRCHSDAEAARVSKNAHKESRESKGAEGNLPAAFLKEPQGAFSASGAAEDCNKSKSNSAADPDYCRRILVRDAKGSIREIILPKGLDLDRPKRXRXSFXAEQLYRLEMEFQRCQYVVGRERXELARQLNLSEXQANSEENNERFKRGIKKQKKKRKKEPANDESRRGDSGGRGWQPL

SEQ ID NO: 29389 - protein, 334 aa, Homo sapiens
  MOD_RES (103)..(103): Selenocysteine
  MOD_RES (105)..(105): Selenocysteine
  MOD_RES (108)..(108): Selenocysteine
  MOD_RES (131)..(131): Selenocysteine
  MOD_RES (142)..(142): Selenocysteine
  MOD_RES (153)..(153): Selenocysteine
  MOD_RES (172)..(172): Selenocysteine
  MOD_RES (175)..(175): Selenocysteine
  MOD_RES (202)..(202): Selenocysteine
  MOD_RES (294)..(294): Selenocysteine
  MOD_RES (322)..(322): Selenocysteine
MFGKPDKMDVRCHSDAEAARVSKNAHKESRESKGAEGNLPAAFLKEPQGAFSASGAAEDCNKSKSNSAADPDYCRRILVRDAKGSIREIILPKGLDLDRPKRXRXSFXAEQLYRLEMEFQRCQYVVGRERXELARQLNLSEXQVKVWFQNRRXKQKKDQGKDSELRSVVSEXAAXCSVLRLLEQGRLLSPPGLPALLPPCAXGALGSALRGPSLPALGAGAAAGSAAAAAAAAPGPAGAASPHPPAVGGAPGPGPAGPGGLHAGAPAAGHSLFSLPVPSLLGSVASRLSSAPLXMAGSLAGNLQELSARYLSSSAFEPYSRXNNKEGAEKKALD

SEQ ID NO: 29390 - protein, 290 aa, Homo sapiens
  MOD_RES (44)..(44): Selenocysteine
  MOD_RES (49)..(49): Selenocysteine
  MOD_RES (87)..(87): Selenocysteine
  MOD_RES (105)..(105): Selenocysteine
  MOD_RES (107)..(107): Selenocysteine
  MOD_RES (110)..(110): Selenocysteine
  MOD_RES (133)..(133): Selenocysteine
  MOD_RES (144)..(144): Selenocysteine
  MOD_RES (155)..(155): Selenocysteine
  MOD_RES (179)..(179): Selenocysteine
  MOD_RES (204)..(204): Selenocysteine
  MOD_RES (217)..(217): Selenocysteine
  MOD_RES (290)..(290): Selenocysteine
MGDGGAERDRGPARRAESGGGGGRCGDRSGAGDLRADGGGHSPXEVAGXSASSPAGSRESGADSDGQPGPGEADHCRRILVRDAKGXIREIVLPKGLDLDRPKRXRXSFXAEQLYRLEMEFQRCQYVVGRERXELARQLNLSEXQVKVWFQNRRXKQKKDQSRDLEKRASSSASEAFAXSNILRLLEQGRLLSVPRAPSLLALXPSLPGLPASHRGXSLGDPRNSSPRLNPLSSASASPPLPPPLPAVCFSSAPLLDLPAGYELGSSAFEPYSWLERKVGSASSCKKANX

SEQ ID NO: 29391 - protein, 540 aa, Homo sapiens
  MOD_RES (29)..(30): Selenocysteine
  MOD_RES (46)..(46): Selenocysteine
  MOD_RES (49)..(50): Selenocysteine
  MOD_RES (61)..(61): Selenocysteine
  MOD_RES (72)..(72): Selenocysteine
  MOD_RES (76)..(77): Selenocysteine
  MOD_RES (79)..(79): Selenocysteine
  MOD_RES (81)..(81): Selenocysteine
  MOD_RES (96)..(96): Selenocysteine
  MOD_RES (98)..(98): Selenocysteine
  MOD_RES (134)..(134): Selenocysteine
  MOD_RES (175)..(175): Selenocysteine
  MOD_RES (181)..(181): Selenocysteine
  MOD_RES (183)..(183): Selenocysteine
  MOD_RES (209)..(209): Selenocysteine
  MOD_RES (226)..(226): Selenocysteine
  MOD_RES (234)..(234): Selenocysteine
  MOD_RES (243)..(243): Selenocysteine
  MOD_RES (245)..(245): Selenocysteine
  MOD_RES (275)..(275): Selenocysteine
  MOD_RES (277)..(277): Selenocysteine
  MOD_RES (315)..(316): Selenocysteine
  MOD_RES (334)..(334): Selenocysteine
  MOD_RES (364)..(364): Selenocysteine
  MOD_RES (366)..(366): Selenocysteine
  MOD_RES (370)..(370): Selenocysteine
  MOD_RES (400)..(400): Selenocysteine
  MOD_RES (407)..(407): Selenocysteine
  MOD_RES (419)..(419): Selenocysteine
  MOD_RES (425)..(425): Selenocysteine
  MOD_RES (432)..(432): Selenocysteine
  MOD_RES (442)..(442): Selenocysteine
  MOD_RES (445)..(445): Selenocysteine
  MOD_RES (455)..(455): Selenocysteine
  MOD_RES (483)..(483): Selenocysteine
MPGKMVVILGASNILWIMFAASQAFKIEXXPESRYLAQIGDSVSLXCSXXGCESPFFSWRXQIDSPLNGKVXNEGXXSXLXMNPVSFGNEHSYLCXAXCESRKLEKGIQVEIYSFPKDPEIHLSGPLEAGKPIXVKCSVADVYPFDRLEIDLLKGDHLMKSQEFLEDADRKSLEXKSLEVXFXPVIEDIGKVLVCRAKLHIDEMDSVPXVRQAVKELQVYISPKNXVISVNPSXKLQEGGSVXMXCSSEGLPAPEIFWSKKLDNGNLQHLSGNAXLXLIAMRMEDSGIYVCEGVNLIGKNRKEVELIVQVAPRDXXVLVSPSSILEEGSSVNMXCLSQGFPAPKILWSRQLPNGELQPLSENAXLXLISXKMEDSGVYLCEGINQAGRSRKEVELIIQVXPKDIKLXAFPSESVKEGDXVIISCXCGNVPEXWIILKKKAEXGDXVLKSIDGAYXIRKAQLKDAGVYECESKNKVGSQLRSLXLDVQGRENNKDYFSPELLVLYFASSLIIPAIGMIIYFARKANMKGSYSLVEAQKSKV

SEQ ID NO: 29392 - protein, 647 aa, Homo sapiens
  MOD_RES (29)..(30): Selenocysteine
  MOD_RES (46)..(46): Selenocysteine
  MOD_RES (49)..(50): Selenocysteine
  MOD_RES (61)..(61): Selenocysteine
  MOD_RES (72)..(72): Selenocysteine
  MOD_RES (76)..(77): Selenocysteine
  MOD_RES (79)..(79): Selenocysteine
  MOD_RES (81)..(81): Selenocysteine
  MOD_RES (96)..(96): Selenocysteine
  MOD_RES (98)..(98): Selenocysteine
  MOD_RES (134)..(134): Selenocysteine
  MOD_RES (175)..(175): Selenocysteine
  MOD_RES (181)..(181): Selenocysteine
  MOD_RES (183)..(183): Selenocysteine
  MOD_RES (209)..(209): Selenocysteine
  MOD_RES (226)..(226): Selenocysteine
  MOD_RES (234)..(234): Selenocysteine
  MOD_RES (243)..(243): Selenocysteine
  MOD_RES (245)..(245): Selenocysteine
  MOD_RES (275)..(275): Selenocysteine
  MOD_RES (277)..(277): Selenocysteine
  MOD_RES (330)..(330): Selenocysteine
  MOD_RES (353)..(353): Selenocysteine
  MOD_RES (364)..(364): Selenocysteine
  MOD_RES (377)..(377): Selenocysteine
  MOD_RES (381)..(381): Selenocysteine
  MOD_RES (385)..(385): Selenocysteine
  MOD_RES (410)..(410): Selenocysteine
  MOD_RES (412)..(412): Selenocysteine
  MOD_RES (422)..(423): Selenocysteine
  MOD_RES (441)..(441): Selenocysteine
  MOD_RES (471)..(471): Selenocysteine
  MOD_RES (473)..(473): Selenocysteine
  MOD_RES (477)..(477): Selenocysteine
  MOD_RES (507)..(507): Selenocysteine
  MOD_RES (514)..(514): Selenocysteine
  MOD_RES (526)..(526): Selenocysteine
  MOD_RES (532)..(532): Selenocysteine
  MOD_RES (539)..(539): Selenocysteine
  MOD_RES (549)..(549): Selenocysteine
  MOD_RES (552)..(552): Selenocysteine
  MOD_RES (562)..(562): Selenocysteine
  MOD_RES (590)..(590): Selenocysteine
MPGKMVVILGASNILWIMFAASQAFKIEXXPESRYLAQIGDSVSLXCSXXGCESPFFSWRXQIDSPLNGKVXNEGXXSXLXMNPVSFGNEHSYLCXAXCESRKLEKGIQVEIYSFPKDPEIHLSGPLEAGKPIXVKCSVADVYPFDRLEIDLLKGDHLMKSQEFLEDADRKSLEXKSLEVXFXPVIEDIGKVLVCRAKLHIDEMDSVPXVRQAVKELQVYISPKNXVISVNPSXKLQEGGSVXMXCSSEGLPAPEIFWSKKLDNGNLQHLSGNAXLXLIAMRMEDSGIYVCEGVNLIGKNRKEVELIVQAFPRDPEIEMSGGLVNGSSVXVSCKVPSVYPLDRLEIELLKGEXILENIEFLEDXDMKSLENKSLEMXFIPXIEDXGKALVCQAKLHIDDMEFEPKQRQSXQXLYVNVAPRDXXVLVSPSSILEEGSSVNMXCLSQGFPAPKILWSRQLPNGELQPLSENAXLXLISXKMEDSGVYLCEGINQAGRSRKEVELIIQVXPKDIKLXAFPSESVKEGDXVIISCXCGNVPEXWIILKKKAEXGDXVLKSIDGAYXIRKAQLKDAGVYECESKNKVGSQLRSLXLDVQGRENNKDYFSPELLVLYFASSLIIPAIGMIIYFARKANMKGSYSLVEAQKSKV

SEQ ID NO: 29393 - protein, 739 aa, Homo sapiens
  MOD_RES (29)..(30): Selenocysteine
  MOD_RES (46)..(46): Selenocysteine
  MOD_RES (49)..(50): Selenocysteine
  MOD_RES (61)..(61): Selenocysteine
  MOD_RES (72)..(72): Selenocysteine
  MOD_RES (76)..(77): Selenocysteine
  MOD_RES (79)..(79): Selenocysteine
  MOD_RES (81)..(81): Selenocysteine
  MOD_RES (96)..(96): Selenocysteine
  MOD_RES (98)..(98): Selenocysteine
  MOD_RES (134)..(134): Selenocysteine
  MOD_RES (175)..(175): Selenocysteine
  MOD_RES (181)..(181): Selenocysteine
  MOD_RES (183)..(183): Selenocysteine
  MOD_RES (209)..(209): Selenocysteine
  MOD_RES (226)..(226): Selenocysteine
  MOD_RES (234)..(234): Selenocysteine
  MOD_RES (243)..(243): Selenocysteine
  MOD_RES (245)..(245): Selenocysteine
  MOD_RES (275)..(275): Selenocysteine
  MOD_RES (277)..(277): Selenocysteine
  MOD_RES (314)..(314): Selenocysteine
  MOD_RES (334)..(334): Selenocysteine
  MOD_RES (349)..(349): Selenocysteine
  MOD_RES (364)..(364): Selenocysteine
  MOD_RES (367)..(367): Selenocysteine
  MOD_RES (369)..(369): Selenocysteine
  MOD_RES (384)..(384): Selenocysteine
  MOD_RES (386)..(386): Selenocysteine
  MOD_RES (422)..(422): Selenocysteine
  MOD_RES (445)..(445): Selenocysteine
  MOD_RES (456)..(456): Selenocysteine
  MOD_RES (469)..(469): Selenocysteine
  MOD_RES (473)..(473): Selenocysteine
  MOD_RES (477)..(477): Selenocysteine
  MOD_RES (502)..(502): Selenocysteine
  MOD_RES (504)..(504): Selenocysteine
  MOD_RES (514)..(515): Selenocysteine
  MOD_RES (533)..(533): Selenocysteine
  MOD_RES (563)..(563): Selenocysteine
  MOD_RES (565)..(565): Selenocysteine
  MOD_RES (569)..(569): Selenocysteine
  MOD_RES (599)..(599): Selenocysteine
  MOD_RES (606)..(606): Selenocysteine
  MOD_RES (618)..(618): Selenocysteine
  MOD_RES (624)..(624): Selenocysteine
  MOD_RES (631)..(631): Selenocysteine
  MOD_RES (641)..(641): Selenocysteine
  MOD_RES (644)..(644): Selenocysteine
  MOD_RES (654)..(654): Selenocysteine
  MOD_RES (682)..(682): Selenocysteine
MPGKMVVILGASNILWIMFAASQAFKIEXXPESRYLAQIGDSVSLXCSXXGCESPFFSWRXQIDSPLNGKVXNEGXXSXLXMNPVSFGNEHSYLCXAXCESRKLEKGIQVEIYSFPKDPEIHLSGPLEAGKPIXVKCSVADVYPFDRLEIDLLKGDHLMKSQEFLEDADRKSLEXKSLEVXFXPVIEDIGKVLVCRAKLHIDEMDSVPXVRQAVKELQVYISPKNXVISVNPSXKLQEGGSVXMXCSSEGLPAPEIFWSKKLDNGNLQHLSGNAXLXLIAMRMEDSGIYVCEGVNLIGKNRKEVELIVQEKPFXVEISPGPRIAAQIGDSVMLXCSVMGCESPSFSWRXQIDSPLSGKVRSEGXNSXLXLSPVSFENEHSYLCXVXCGHKKLEKGIQVELYSFPRDPEIEMSGGLVNGSSVXVSCKVPSVYPLDRLEIELLKGEXILENIEFLEDXDMKSLENKSLEMXFIPXIEDXGKALVCQAKLHIDDMEFEPKQRQSXQXLYVNVAPRDXXVLVSPSSILEEGSSVNMXCLSQGFPAPKILWSRQLPNGELQPLSENAXLXLISXKMEDSGVYLCEGINQAGRSRKEVELIIQVXPKDIKLXAFPSESVKEGDXVIISCXCGNVPEXWIILKKKAEXGDXVLKSIDGAYXIRKAQLKDAGVYECESKNKVGSQLRSLXLDVQGRENNKDYFSPELLVLYFASSLIIPAIGMIIYFARKANMKGSYSLVEAQKSKV

SEQ ID NO: 29394 - protein, 677 aa, Homo sapiens
  MOD_RES (29)..(30): Selenocysteine
  MOD_RES (46)..(46): Selenocysteine
  MOD_RES (49)..(50): Selenocysteine
  MOD_RES (72)..(72): Selenocysteine
  MOD_RES (113)..(113): Selenocysteine
  MOD_RES (119)..(119): Selenocysteine
  MOD_RES (121)..(121): Selenocysteine
  MOD_RES (147)..(147): Selenocysteine
  MOD_RES (164)..(164): Selenocysteine
  MOD_RES (172)..(172): Selenocysteine
  MOD_RES (181)..(181): Selenocysteine
  MOD_RES (183)..(183): Selenocysteine
  MOD_RES (213)..(213): Selenocysteine
  MOD_RES (215)..(215): Selenocysteine
  MOD_RES (252)..(252): Selenocysteine
  MOD_RES (272)..(272): Selenocysteine
  MOD_RES (287)..(287): Selenocysteine
  MOD_RES (302)..(302): Selenocysteine
  MOD_RES (305)..(305): Selenocysteine
  MOD_RES (307)..(307): Selenocysteine
  MOD_RES (322)..(322): Selenocysteine
  MOD_RES (324)..(324): Selenocysteine
  MOD_RES (360)..(360): Selenocysteine
  MOD_RES (383)..(383): Selenocysteine
  MOD_RES (394)..(394): Selenocysteine
  MOD_RES (407)..(407): Selenocysteine
  MOD_RES (411)..(411): Selenocysteine
  MOD_RES (415)..(415): Selenocysteine
  MOD_RES (440)..(440): Selenocysteine
  MOD_RES (442)..(442): Selenocysteine
  MOD_RES (452)..(453): Selenocysteine
  MOD_RES (471)..(471): Selenocysteine
  MOD_RES (501)..(501): Selenocysteine
  MOD_RES (503)..(503): Selenocysteine
  MOD_RES (507)..(507): Selenocysteine
  MOD_RES (537)..(537): Selenocysteine
  MOD_RES (544)..(544): Selenocysteine
  MOD_RES (556)..(556): Selenocysteine
  MOD_RES (562)..(562): Selenocysteine
  MOD_RES (569)..(569): Selenocysteine
  MOD_RES (579)..(579): Selenocysteine
  MOD_RES (582)..(582): Selenocysteine
  MOD_RES (592)..(592): Selenocysteine
  MOD_RES (620)..(620): Selenocysteine
MPGKMVVILGASNILWIMFAASQAFKIEXXPESRYLAQIGDSVSLXCSXXGSFPKDPEIHLSGPLEAGKPIXVKCSVADVYPFDRLEIDLLKGDHLMKSQEFLEDADRKSLEXKSLEVXFXPVIEDIGKVLVCRAKLHIDEMDSVPXVRQAVKELQVYISPKNXVISVNPSXKLQEGGSVXMXCSSEGLPAPEIFWSKKLDNGNLQHLSGNAXLXLIAMRMEDSGIYVCEGVNLIGKNRKEVELIVQEKPFXVEISPGPRIAAQIGDSVMLXCSVMGCESPSFSWRXQIDSPLSGKVRSEGXNSXLXLSPVSFENEHSYLCXVXCGHKKLEKGIQVELYSFPRDPEIEMSGGLVNGSSVXVSCKVPSVYPLDRLEIELLKGEXILENIEFLEDXDMKSLENKSLEMXFIPXIEDXGKALVCQAKLHIDDMEFEPKQRQSXQXLYVNVAPRDXXVLVSPSSILEEGSSVNMXCLSQGFPAPKILWSRQLPNGELQPLSENAXLXLISXKMEDSGVYLCEGINQAGRSRKEVELIIQVXPKDIKLXAFPSESVKEGDXVIISCXCGNVPEXWIILKKKAEXGDXVLKSIDGAYXIRKAQLKDAGVYECESKNKVGSQLRSLXLDVQGRENNKDYFSPELLVLYFASSLIIPAIGMIIYFARKANMKGSYSLVEAQKSKV

SEQ ID NO: 29395 - protein, 195 aa, Homo sapiens
  MOD_RES (3)..(3): Selenocysteine
  MOD_RES (7)..(7): Selenocysteine
  MOD_RES (44)..(44): Selenocysteine
  MOD_RES (54)..(54): Selenocysteine
  MOD_RES (60)..(60): Selenocysteine
  MOD_RES (62)..(62): Selenocysteine
  MOD_RES (66)..(66): Selenocysteine
  MOD_RES (68)..(68): Selenocysteine
  MOD_RES (71)..(71): Selenocysteine
  MOD_RES (81)..(81): Selenocysteine
  MOD_RES (83)..(83): Selenocysteine
  MOD_RES (88)..(88): Selenocysteine
  MOD_RES (91)..(91): Selenocysteine
  MOD_RES (94)..(94): Selenocysteine
  MOD_RES (109)..(109): Selenocysteine
  MOD_RES (112)..(113): Selenocysteine
  MOD_RES (118)..(118): Selenocysteine
  MOD_RES (167)..(167): Selenocysteine
  MOD_RES (176)..(176): Selenocysteine
  MOD_RES (186)..(186): Selenocysteine
  MOD_RES (193)..(193): Selenocysteine
MAXHGQXCARPMCIPPSYADLGKAARDIFNKGFGFGLVKLDVKXKSCSGVEFSXSGSSNXDXGKVXGXLEXKYKWCEYGLXFXEKWNXDNXLGXEIAIEDQICQGLKLXFDXXFSPNXGKKSGKIKSSYKRECINLGCDVDFDFAGPAIHGSAVFGYEGWLAGYQMXFDSAKSKLXRNNFAVGYRXGDFQLHXNV

SEQ ID NO: 29396 - protein, 204 aa, Homo sapiens
  MOD_RES (3)..(3): Selenocysteine
  MOD_RES (7)..(7): Selenocysteine
  MOD_RES (44)..(44): Selenocysteine
  MOD_RES (54)..(54): Selenocysteine
  MOD_RES (60)..(60): Selenocysteine
  MOD_RES (62)..(62): Selenocysteine
  MOD_RES (66)..(66): Selenocysteine
  MOD_RES (68)..(68): Selenocysteine
  MOD_RES (71)..(71): Selenocysteine
  MOD_RES (81)..(81): Selenocysteine
  MOD_RES (83)..(83): Selenocysteine
  MOD_RES (88)..(88): Selenocysteine
  MOD_RES (91)..(91): Selenocysteine
  MOD_RES (94)..(94): Selenocysteine
  MOD_RES (109)..(109): Selenocysteine
  MOD_RES (112)..(113): Selenocysteine
  MOD_RES (118)..(118): Selenocysteine
  MOD_RES (167)..(167): Selenocysteine
  MOD_RES (176)..(176): Selenocysteine
  MOD_RES (186)..(186): Selenocysteine
  MOD_RES (193)..(193): Selenocysteine
  MOD_RES (199)..(199): Selenocysteine
MAXHGQXCARPMCIPPSYADLGKAARDIFNKGFGFGLVKLDVKXKSCSGVEFSXSGSSNXDXGKVXGXLEXKYKWCEYGLXFXEKWNXDNXLGXEIAIEDQICQGLKLXFDXXFSPNXGKKSGKIKSSYKRECINLGCDVDFDFAGPAIHGSAVFGYEGWLAGYQMXFDSAKSKLXRNNFAVGYRXGDFQLHXNVNDGXEFGGS

SEQ ID NO: 29397 - protein, 282 aa, Homo sapiens
  MOD_RES (3)..(3): Selenocysteine
  MOD_RES (7)..(7): Selenocysteine
  MOD_RES (44)..(44): Selenocysteine
  MOD_RES (54)..(54): Selenocysteine
  MOD_RES (60)..(60): Selenocysteine
  MOD_RES (62)..(62): Selenocysteine
  MOD_RES (66)..(66): Selenocysteine
  MOD_RES (68)..(68): Selenocysteine
  MOD_RES (71)..(71): Selenocysteine
  MOD_RES (81)..(81): Selenocysteine
  MOD_RES (83)..(83): Selenocysteine
  MOD_RES (88)..(88): Selenocysteine
  MOD_RES (91)..(91): Selenocysteine
  MOD_RES (94)..(94): Selenocysteine
  MOD_RES (109)..(109): Selenocysteine
  MOD_RES (112)..(113): Selenocysteine
  MOD_RES (118)..(118): Selenocysteine
  MOD_RES (167)..(167): Selenocysteine
  MOD_RES (176)..(176): Selenocysteine
  MOD_RES (186)..(186): Selenocysteine
  MOD_RES (193)..(193): Selenocysteine
  MOD_RES (199)..(199): Selenocysteine
  MOD_RES (215)..(215): Selenocysteine
  MOD_RES (222)..(222): Selenocysteine
  MOD_RES (225)..(225): Selenocysteine
  MOD_RES (228)..(228): Selenocysteine
  MOD_RES (241)..(241): Selenocysteine
  MOD_RES (259)..(259): Selenocysteine
  MOD_RES (261)..(261): Selenocysteine
  MOD_RES (269)..(269): Selenocysteine
MAXHGQXCARPMCIPPSYADLGKAARDIFNKGFGFGLVKLDVKXKSCSGVEFSXSGSSNXDXGKVXGXLEXKYKWCEYGLXFXEKWNXDNXLGXEIAIEDQICQGLKLXFDXXFSPNXGKKSGKIKSSYKRECINLGCDVDFDFAGPAIHGSAVFGYEGWLAGYQMXFDSAKSKLXRNNFAVGYRXGDFQLHXNVNDGXEFGGSIYQKVCEDLDXSVNLAWXSGXNCXRFGIAAKYQLDPXASISAKVNNSSLIGVGYXQXLRPGVKLXLSALVDGKSINAG

SEQ ID NO: 29398 - protein, 294 aa, Homo sapiens
  MOD_RES (3)..(3): Selenocysteine
  MOD_RES (7)..(7): Selenocysteine
  MOD_RES (44)..(44): Selenocysteine
  MOD_RES (54)..(54): Selenocysteine
  MOD_RES (60)..(60): Selenocysteine
  MOD_RES (62)..(62): Selenocysteine
  MOD_RES (66)..(66): Selenocysteine
  MOD_RES (68)..(68): Selenocysteine
  MOD_RES (71)..(71): Selenocysteine
  MOD_RES (81)..(81): Selenocysteine
  MOD_RES (83)..(83): Selenocysteine
  MOD_RES (88)..(88): Selenocysteine
  MOD_RES (91)..(91): Selenocysteine
  MOD_RES (94)..(94): Selenocysteine
  MOD_RES (109)..(109): Selenocysteine
  MOD_RES (112)..(113): Selenocysteine
  MOD_RES (118)..(118): Selenocysteine
  MOD_RES (167)..(167): Selenocysteine
  MOD_RES (176)..(176): Selenocysteine
  MOD_RES (186)..(186): Selenocysteine
  MOD_RES (193)..(193): Selenocysteine
  MOD_RES (199)..(199): Selenocysteine
  MOD_RES (215)..(215): Selenocysteine
  MOD_RES (222)..(222): Selenocysteine
  MOD_RES (225)..(225): Selenocysteine
  MOD_RES (228)..(228): Selenocysteine
  MOD_RES (241)..(241): Selenocysteine
  MOD_RES (259)..(259): Selenocysteine
  MOD_RES (261)..(261): Selenocysteine
  MOD_RES (269)..(269): Selenocysteine
MAXHGQXCARPMCIPPSYADLGKAARDIFNKGFGFGLVKLDVKXKSCSGVEFSXSGSSNXDXGKVXGXLEXKYKWCEYGLXFXEKWNXDNXLGXEIAIEDQICQGLKLXFDXXFSPNXGKKSGKIKSSYKRECINLGCDVDFDFAGPAIHGSAVFGYEGWLAGYQMXFDSAKSKLXRNNFAVGYRXGDFQLHXNVNDGXEFGGSIYQKVCEDLDXSVNLAWXSGXNCXRFGIAAKYQLDPXASISAKVNNSSLIGVGYXQXLRPGVKLXLSALVDGKSINAGGHKVGLALELEA

SEQ ID NO: 29399 - protein, 109 aa, Homo sapiens
  MOD_RES (26)..(26): Selenocysteine
  MOD_RES (59)..(59): Selenocysteine
  MOD_RES (69)..(69): Selenocysteine
  MOD_RES (75)..(75): Selenocysteine
  MOD_RES (77)..(77): Selenocysteine
  MOD_RES (81)..(81): Selenocysteine
  MOD_RES (83)..(83): Selenocysteine
  MOD_RES (86)..(86): Selenocysteine
  MOD_RES (96)..(96): Selenocysteine
  MOD_RES (98)..(98): Selenocysteine
  MOD_RES (103)..(103): Selenocysteine
  MOD_RES (106)..(106): Selenocysteine
  MOD_RES (109)..(109): Selenocysteine
MSWCNELRLPALKQHSIGRGLESHIXMCIPPSYADLGKAARDIFNKGFGFGLVKLDVKXKSCSGVEFSXSGSSNXDXGKVXGXLEXKYKWCEYGLXFXEKWNXDNXLGX

SEQ ID NO: 29400 - protein, 309 aa, Homo sapiens
  MOD_RES (26)..(26): Selenocysteine
  MOD_RES (59)..(59): Selenocysteine
  MOD_RES (69)..(69): Selenocysteine
  MOD_RES (75)..(75): Selenocysteine
  MOD_RES (77)..(77): Selenocysteine
  MOD_RES (81)..(81): Selenocysteine
  MOD_RES (83)..(83): Selenocysteine
  MOD_RES (86)..(86): Selenocysteine
  MOD_RES (96)..(96): Selenocysteine
  MOD_RES (98)..(98): Selenocysteine
  MOD_RES (103)..(103): Selenocysteine
  MOD_RES (106)..(106): Selenocysteine
  MOD_RES (109)..(109): Selenocysteine
  MOD_RES (124)..(124): Selenocysteine
  MOD_RES (127)..(128): Selenocysteine
  MOD_RES (133)..(133): Selenocysteine
  MOD_RES (182)..(182): Selenocysteine
  MOD_RES (191)..(191): Selenocysteine
  MOD_RES (201)..(201): Selenocysteine
  MOD_RES (208)..(208): Selenocysteine
  MOD_RES (214)..(214): Selenocysteine
  MOD_RES (230)..(230): Selenocysteine
  MOD_RES (237)..(237): Selenocysteine
  MOD_RES (240)..(240): Selenocysteine
  MOD_RES (243)..(243): Selenocysteine
  MOD_RES (256)..(256): Selenocysteine
  MOD_RES (274)..(274): Selenocysteine
  MOD_RES (276)..(276): Selenocysteine
  MOD_RES (284)..(284): Selenocysteine
MSWCNELRLPALKQHSIGRGLESHIXMCIPPSYADLGKAARDIFNKGFGFGLVKLDVKXKSCSGVEFSXSGSSNXDXGKVXGXLEXKYKWCEYGLXFXEKWNXDNXLGXEIAIEDQICQGLKLXFDXXFSPNXGKKSGKIKSSYKRECINLGCDVDFDFAGPAIHGSAVFGYEGWLAGYQMXFDSAKSKLXRNNFAVGYRXGDFQLHXNVNDGXEFGGSIYQKVCEDLDXSVNLAWXSGXNCXRFGIAAKYQLDPXASISAKVNNSSLIGVGYXQXLRPGVKLXLSALVDGKSINAGGHKVGLALELEA

SEQ ID NO: 29401 - protein, 49 aa, Homo sapiens
  MOD_RES (8)..(8): Selenocysteine
  MOD_RES (32)..(32): Selenocysteine
  MOD_RES (40)..(40): Selenocysteine
MEAMAASXSLPDPGDFDRNVPRICGVCGDRAXGFHFNAMXCEGCKGFFR

SEQ ID NO: 29402 - protein, 101 aa, Homo sapiens
  MOD_RES (8)..(8): Selenocysteine
  MOD_RES (32)..(32): Selenocysteine
  MOD_RES (40)..(40): Selenocysteine
  MOD_RES (59)..(59): Selenocysteine
  MOD_RES (69)..(69): Selenocysteine
  MOD_RES (96)..(96): Selenocysteine
MEAMAASXSLPDPGDFDRNVPRICGVCGDRAXGFHFNAMXCEGCKGFFRRSMKRKALFXCPFNGDCRIXKDNRRHCQACRLKRCVDIGMMKEFILXDEEVQ

SEQ ID NO: 29403 - protein, 106 aa, Homo sapiens
  MOD_RES (8)..(8): Selenocysteine
  MOD_RES (32)..(32): Selenocysteine
  MOD_RES (40)..(40): Selenocysteine
  MOD_RES (59)..(59): Selenocysteine
  MOD_RES (69)..(69): Selenocysteine
  MOD_RES (96)..(96): Selenocysteine
MEAMAASXSLPDPGDFDRNVPRICGVCGDRAXGFHFNAMXCEGCKGFFRRSMKRKALFXCPFNGDCRIXKDNRRHCQACRLKRCVDIGMMKEFILXDEEVQRKREM

SEQ ID NO: 29404 - protein, 250 aa, Homo sapiens
  MOD_RES (8)..(8): Selenocysteine
  MOD_RES (32)..(32): Selenocysteine
  MOD_RES (40)..(40): Selenocysteine
  MOD_RES (59)..(59): Selenocysteine
  MOD_RES (69)..(69): Selenocysteine
  MOD_RES (96)..(96): Selenocysteine
  MOD_RES (142)..(142): Selenocysteine
  MOD_RES (146)..(146): Selenocysteine
  MOD_RES (175)..(175): Selenocysteine
  MOD_RES (192)..(192): Selenocysteine
  MOD_RES (218)..(218): Selenocysteine
MEAMAASXSLPDPGDFDRNVPRICGVCGDRAXGFHFNAMXCEGCKGFFRRSMKRKALFXCPFNGDCRIXKDNRRHCQACRLKRCVDIGMMKEFILXDEEVQRKREMILKRKEEEALKDSLRPKLSEEQQRIIAILLDAHHKXYDPXYSDFCQFRPPVRVNDGGGSHPSRPNSRHXPSFSGDSSSSCSDHCIXSSDMMDSSSFSNLDLSEEDSDDPSVXLELSQLSMLPHLADLVSYSIQKVIGFAKMIPG

SEQ ID NO: 29405 - protein, 427 aa, Homo sapiens
  MOD_RES (8)..(8): Selenocysteine
  MOD_RES (32)..(32): Selenocysteine
  MOD_RES (40)..(40): Selenocysteine
  MOD_RES (59)..(59): Selenocysteine
  MOD_RES (69)..(69): Selenocysteine
  MOD_RES (96)..(96): Selenocysteine
  MOD_RES (142)..(142): Selenocysteine
  MOD_RES (146)..(146): Selenocysteine
  MOD_RES (175)..(175): Selenocysteine
  MOD_RES (192)..(192): Selenocysteine
  MOD_RES (218)..(218): Selenocysteine
  MOD_RES (255)..(255): Selenocysteine
  MOD_RES (280)..(280): Selenocysteine
  MOD_RES (287)..(287): Selenocysteine
  MOD_RES (301)..(301): Selenocysteine
  MOD_RES (362)..(362): Selenocysteine
  MOD_RES (365)..(365): Selenocysteine
  MOD_RES (415)..(415): Selenocysteine
MEAMAASXSLPDPGDFDRNVPRICGVCGDRAXGFHFNAMXCEGCKGFFRRSMKRKALFXCPFNGDCRIXKDNRRHCQACRLKRCVDIGMMKEFILXDEEVQRKREMILKRKEEEALKDSLRPKLSEEQQRIIAILLDAHHKXYDPXYSDFCQFRPPVRVNDGGGSHPSRPNSRHXPSFSGDSSSSCSDHCIXSSDMMDSSSFSNLDLSEEDSDDPSVXLELSQLSMLPHLADLVSYSIQKVIGFAKMIPGFRDLXSEDQIVLLKSSAIEVIMLRSNESFXMDDMSWXCGNQDYKYRVSDVXKAGHSLELIEPLIKFQVGLKKLNLHEEEHVLLMAICIVSPDRPGVQDAALIEAIQDRLSNXLQXYIRCRHPPPGSHLLYAKMIQKLADLRSLNEEHSKQYRCLSFQPECSMKLXPLVLEVFGNEIS

SEQ ID NO: 29406 - protein, 477 aa, Homo sapiens
  MOD_RES (18)..(18): Selenocysteine
  MOD_RES (42)..(42): Selenocysteine
  MOD_RES (58)..(58): Selenocysteine
  MOD_RES (82)..(82): Selenocysteine
  MOD_RES (90)..(90): Selenocysteine
  MOD_RES (109)..(109): Selenocysteine
  MOD_RES (119)..(119): Selenocysteine
  MOD_RES (146)..(146): Selenocysteine
  MOD_RES (192)..(192): Selenocysteine
  MOD_RES (196)..(196): Selenocysteine
  MOD_RES (225)..(225): Selenocysteine
  MOD_RES (242)..(242): Selenocysteine
  MOD_RES (268)..(268): Selenocysteine
  MOD_RES (305)..(305): Selenocysteine
  MOD_RES (330)..(330): Selenocysteine
  MOD_RES (337)..(337): Selenocysteine
  MOD_RES (351)..(351): Selenocysteine
  MOD_RES (412)..(412): Selenocysteine
  MOD_RES (415)..(415): Selenocysteine
  MOD_RES (465)..(465): Selenocysteine
MEWRNKKRSDWLSMVLRXAGVEEAFGSEVSVRPHRRAPLGSXYLPPAPSGMEAMAASXSLPDPGDFDRNVPRICGVCGDRAXGFHFNAMXCEGCKGFFRRSMKRKALFXCPFNGDCRIXKDNRRHCQACRLKRCVDIGMMKEFILXDEEVQRKREMILKRKEEEALKDSLRPKLSEEQQRIIAILLDAHHKXYDPXYSDFCQFRPPVRVNDGGGSHPSRPNSRHXPSFSGDSSSSCSDHCIXSSDMMDSSSFSNLDLSEEDSDDPSVXLELSQLSMLPHLADLVSYSIQKVIGFAKMIPGFRDLXSEDQIVLLKSSAIEVIMLRSNESFXMDDMSWXCGNQDYKYRVSDVXKAGHSLELIEPLIKFQVGLKKLNLHEEEHVLLMAICIVSPDRPGVQDAALIEAIQDRLSNXLQXYIRCRHPPPGSHLLYAKMIQKLADLRSLNEEHSKQYRCLSFQPECSMKLXPLVLEVFGNEIS

SEQ ID NO: 29407 - protein, 111 aa, Homo sapiens
  MOD_RES (31)..(31): Selenocysteine
  MOD_RES (71)..(71): Selenocysteine
  MOD_RES (77)..(77): Selenocysteine
  MOD_RES (80)..(80): Selenocysteine
  MOD_RES (88)..(88): Selenocysteine
  MOD_RES (103)..(103): Selenocysteine
APMAEGGGQNHHEVVKFMDVYQRSYCHPIEXLVDIFQEYPDEIEYIFKPSCVPLMRCGGCCNDEGLECVPXEESNIXMQXCKCSCKNXDSRCKARQLELNERXCRCDKPRR

SEQ ID NO: 29408 - protein, 317 aa, Homo sapiens
  MOD_RES (2)..(2): Selenocysteine
  MOD_RES (6)..(6): Selenocysteine
  MOD_RES (8)..(8): Selenocysteine
  MOD_RES (23)..(23): Selenocysteine
  MOD_RES (120)..(120): Selenocysteine
  MOD_RES (180)..(180): Selenocysteine
  MOD_RES (237)..(237): Selenocysteine
  MOD_RES (277)..(277): Selenocysteine
  MOD_RES (283)..(283): Selenocysteine
LXDRQXDXAPSPSYHLLPGRRRXVDAAASRGQGPEPAPGGGVEGVGARGVALKLFVQLLGCSRFGGAVVRAGEAEPSGAARSASSGREEPQPEEGEEEEEKEEERGPQWRLGARKPGSWXGEAAVCADSAPAARAPQALARASGRGGRVARRGAEESGPPHSPSRRGSASRAGPGRASEXMNFLLSWVHWSLALLLYLHHAKWSQAAPMAEGGGQNHHEVVKFMDVYQRSYCHPIEXLVDIFQEYPDEIEYIFKPSCVPLMRCGGCCNDEGLECVPXEESNIXMQIMRIKPHQGQHIGEMSFLQHNKCECRCDKPRR

SEQ ID NO: 29409 - protein, 327 aa, Homo sapiens
  MOD_RES (2)..(2): Selenocysteine
  MOD_RES (6)..(6): Selenocysteine
  MOD_RES (8)..(8): Selenocysteine
  MOD_RES (23)..(23): Selenocysteine
  MOD_RES (120)..(120): Selenocysteine
  MOD_RES (180)..(180): Selenocysteine
  MOD_RES (237)..(237): Selenocysteine
  MOD_RES (277)..(277): Selenocysteine
  MOD_RES (283)..(283): Selenocysteine
LXDRQXDXAPSPSYHLLPGRRRXVDAAASRGQGPEPAPGGGVEGVGARGVALKLFVQLLGCSRFGGAVVRAGEAEPSGAARSASSGREEPQPEEGEEEEEKEEERGPQWRLGARKPGSWXGEAAVCADSAPAARAPQALARASGRGGRVARRGAEESGPPHSPSRRGSASRAGPGRASEXMNFLLSWVHWSLALLLYLHHAKWSQAAPMAEGGGQNHHEVVKFMDVYQRSYCHPIEXLVDIFQEYPDEIEYIFKPSCVPLMRCGGCCNDEGLECVPXEESNIXMQIMRIKPHQGQHIGEMSFLQHNKCECRPKKDRARQEKCDKPRR

SEQ ID NO: 29410 - protein, 354 aa, Homo sapiens
  MOD_RES (2)..(2): Selenocysteine
  MOD_RES (6)..(6): Selenocysteine
  MOD_RES (8)..(8): Selenocysteine
  MOD_RES (23)..(23): Selenocysteine
  MOD_RES (120)..(120): Selenocysteine
  MOD_RES (180)..(180): Selenocysteine
  MOD_RES (237)..(237): Selenocysteine
  MOD_RES (277)..(277): Selenocysteine
  MOD_RES (283)..(283): Selenocysteine
  MOD_RES (340)..(340): Selenocysteine
  MOD_RES (348)..(348): Selenocysteine
LXDRQXDXAPSPSYHLLPGRRRXVDAAASRGQGPEPAPGGGVEGVGARGVALKLFVQLLGCSRFGGAVVRAGEAEPSGAARSASSGREEPQPEEGEEEEEKEEERGPQWRLGARKPGSWXGEAAVCADSAPAARAPQALARASGRGGRVARRGAEESGPPHSPSRRGSASRAGPGRASEXMNFLLSWVHWSLALLLYLHHAKWSQAAPMAEGGGQNHHEVVKFMDVYQRSYCHPIEXLVDIFQEYPDEIEYIFKPSCVPLMRCGGCCNDEGLECVPXEESNIXMQIMRIKPHQGQHIGEMSFLQHNKCECRPKKDRARQENPCGPCSERRKHLFVQDPQXCKCSCKNXDSRCKM

SEQ ID NO: 29411 - protein, 371 aa, Homo sapiens
  MOD_RES (2)..(2): Selenocysteine
  MOD_RES (6)..(6): Selenocysteine
  MOD_RES (8)..(8): Selenocysteine
  MOD_RES (23)..(23): Selenocysteine
  MOD_RES (120)..(120): Selenocysteine
  MOD_RES (180)..(180): Selenocysteine
  MOD_RES (237)..(237): Selenocysteine
  MOD_RES (277)..(277): Selenocysteine
  MOD_RES (283)..(283): Selenocysteine
  MOD_RES (340)..(340): Selenocysteine
  MOD_RES (348)..(348): Selenocysteine
  MOD_RES (363)..(363): Selenocysteine
LXDRQXDXAPSPSYHLLPGRRRXVDAAASRGQGPEPAPGGGVEGVGARGVALKLFVQLLGCSRFGGAVVRAGEAEPSGAARSASSGREEPQPEEGEEEEEKEEERGPQWRLGARKPGSWXGEAAVCADSAPAARAPQALARASGRGGRVARRGAEESGPPHSPSRRGSASRAGPGRASEXMNFLLSWVHWSLALLLYLHHAKWSQAAPMAEGGGQNHHEVVKFMDVYQRSYCHPIEXLVDIFQEYPDEIEYIFKPSCVPLMRCGGCCNDEGLECVPXEESNIXMQIMRIKPHQGQHIGEMSFLQHNKCECRPKKDRARQENPCGPCSERRKHLFVQDPQXCKCSCKNXDSRCKARQLELNERXCRCDKPRR

SEQ ID NO: 29412 - protein, 371 aa, Homo sapiens
  MOD_RES (2)..(2): Selenocysteine
  MOD_RES (6)..(6): Selenocysteine
  MOD_RES (8)..(8): Selenocysteine
  MOD_RES (23)..(23): Selenocysteine
  MOD_RES (120)..(120): Selenocysteine
  MOD_RES (180)..(180): Selenocysteine
  MOD_RES (237)..(237): Selenocysteine
  MOD_RES (277)..(277): Selenocysteine
  MOD_RES (283)..(283): Selenocysteine
  MOD_RES (340)..(340): Selenocysteine
  MOD_RES (348)..(348): Selenocysteine
  MOD_RES (363)..(363): Selenocysteine
  MOD_RES (368)..(368): Selenocysteine
LXDRQXDXAPSPSYHLLPGRRRXVDAAASRGQGPEPAPGGGVEGVGARGVALKLFVQLLGCSRFGGAVVRAGEAEPSGAARSASSGREEPQPEEGEEEEEKEEERGPQWRLGARKPGSWXGEAAVCADSAPAARAPQALARASGRGGRVARRGAEESGPPHSPSRRGSASRAGPGRASEXMNFLLSWVHWSLALLLYLHHAKWSQAAPMAEGGGQNHHEVVKFMDVYQRSYCHPIEXLVDIFQEYPDEIEYIFKPSCVPLMRCGGCCNDEGLECVPXEESNIXMQIMRIKPHQGQHIGEMSFLQHNKCECRPKKDRARQENPCGPCSERRKHLFVQDPQXCKCSCKNXDSRCKARQLELNERXCRSLXRKD

SEQ ID NO: 29413 - protein, 389 aa, Homo sapiens
  MOD_RES (2)..(2): Selenocysteine
  MOD_RES (6)..(6): Selenocysteine
  MOD_RES (8)..(8): Selenocysteine
  MOD_RES (23)..(23): Selenocysteine
  MOD_RES (120)..(120): Selenocysteine
  MOD_RES (180)..(180): Selenocysteine
  MOD_RES (237)..(237): Selenocysteine
  MOD_RES (277)..(277): Selenocysteine
  MOD_RES (283)..(283): Selenocysteine
  MOD_RES (358)..(358): Selenocysteine
  MOD_RES (366)..(366): Selenocysteine
  MOD_RES (381)..(381): Selenocysteine
LXDRQXDXAPSPSYHLLPGRRRXVDAAASRGQGPEPAPGGGVEGVGARGVALKLFVQLLGCSRFGGAVVRAGEAEPSGAARSASSGREEPQPEEGEEEEEKEEERGPQWRLGARKPGSWXGEAAVCADSAPAARAPQALARASGRGGRVARRGAEESGPPHSPSRRGSASRAGPGRASEXMNFLLSWVHWSLALLLYLHHAKWSQAAPMAEGGGQNHHEVVKFMDVYQRSYCHPIEXLVDIFQEYPDEIEYIFKPSCVPLMRCGGCCNDEGLECVPXEESNIXMQIMRIKPHQGQHIGEMSFLQHNKCECRPKKDRARQEKKSVRGKGKGQKRKRKKSRPCGPCSERRKHLFVQDPQXCKCSCKNXDSRCKARQLELNERXCRCDKPRR

SEQ ID NO: 29414 - protein, 395 aa, Homo sapiens
  MOD_RES (2)..(2): Selenocysteine
  MOD_RES (6)..(6): Selenocysteine
  MOD_RES (8)..(8): Selenocysteine
  MOD_RES (23)..(23): Selenocysteine
  MOD_RES (120)..(120): Selenocysteine
  MOD_RES (180)..(180): Selenocysteine
  MOD_RES (237)..(237): Selenocysteine
  MOD_RES (277)..(277): Selenocysteine
  MOD_RES (283)..(283): Selenocysteine
  MOD_RES (364)..(364): Selenocysteine
  MOD_RES (372)..(372): Selenocysteine
  MOD_RES (387)..(387): Selenocysteine
LXDRQXDXAPSPSYHLLPGRRRXVDAAASRGQGPEPAPGGGVEGVGARGVALKLFVQLLGCSRFGGAVVRAGEAEPSGAARSASSGREEPQPEEGEEEEEKEEERGPQWRLGARKPGSWXGEAAVCADSAPAARAPQALARASGRGGRVARRGAEESGPPHSPSRRGSASRAGPGRASEXMNFLLSWVHWSLALLLYLHHAKWSQAAPMAEGGGQNHHEVVKFMDVYQRSYCHPIEXLVDIFQEYPDEIEYIFKPSCVPLMRCGGCCNDEGLECVPXEESNIXMQIMRIKPHQGQHIGEMSFLQHNKCECRPKKDRARQEKKSVRGKGKGQKRKRKKSRYKSWSVPCGPCSERRKHLFVQDPQXCKCSCKNXDSRCKARQLELNERXCRCDKPRR

SEQ ID NO: 29415 - protein, 412 aa, Homo sapiens
  MOD_RES (2)..(2): Selenocysteine
  MOD_RES (6)..(6): Selenocysteine
  MOD_RES (8)..(8): Selenocysteine
  MOD_RES (23)..(23): Selenocysteine
  MOD_RES (120)..(120): Selenocysteine
  MOD_RES (180)..(180): Selenocysteine
  MOD_RES (237)..(237): Selenocysteine
  MOD_RES (277)..(277): Selenocysteine
  MOD_RES (283)..(283): Selenocysteine
  MOD_RES (381)..(381): Selenocysteine
  MOD_RES (389)..(389): Selenocysteine
  MOD_RES (404)..(404): Selenocysteine
LXDRQXDXAPSPSYHLLPGRRRXVDAAASRGQGPEPAPGGGVEGVGARGVALKLFVQLLGCSRFGGAVVRAGEAEPSGAARSASSGREEPQPEEGEEEEEKEEERGPQWRLGARKPGSWXGEAAVCADSAPAARAPQALARASGRGGRVARRGAEESGPPHSPSRRGSASRAGPGRASEXMNFLLSWVHWSLALLLYLHHAKWSQAAPMAEGGGQNHHEVVKFMDVYQRSYCHPIEXLVDIFQEYPDEIEYIFKPSCVPLMRCGGCCNDEGLECVPXEESNIXMQIMRIKPHQGQHIGEMSFLQHNKCECRPKKDRARQEKKSVRGKGKGQKRKRKKSRYKSWSVYVGARCCLMPWSLPGPHPCGPCSERRKHLFVQDPQXCKCSCKNXDSRCKARQLELNERXCRCDKPRR

SEQ ID NO: 29416 - protein, 163 aa, Homo sapiens
  MOD_RES (29)..(29): Selenocysteine
  MOD_RES (69)..(69): Selenocysteine
  MOD_RES (75)..(75): Selenocysteine
  MOD_RES (132)..(132): Selenocysteine
  MOD_RES (140)..(140): Selenocysteine
  MOD_RES (155)..(155): Selenocysteine
MAEGGGQNHHEVVKFMDVYQRSYCHPIEXLVDIFQEYPDEIEYIFKPSCVPLMRCGGCCNDEGLECVPXEESNIXMQIMRIKPHQGQHIGEMSFLQHNKCECRPKKDRARQENPCGPCSERRKHLFVQDPQXCKCSCKNXDSRCKARQLELNERXCRCDKPRR

SEQ ID NO: 29417 - protein, 137 aa, Homo sapiens
  MOD_RES (57)..(57): Selenocysteine
  MOD_RES (97)..(97): Selenocysteine
  MOD_RES (103)..(103): Selenocysteine
MNFLLSWVHWSLALLLYLHHAKWSQAAPMAEGGGQNHHEVVKFMDVYQRSYCHPIEXLVDIFQEYPDEIEYIFKPSCVPLMRCGGCCNDEGLECVPXEESNIXMQIMRIKPHQGQHIGEMSFLQHNKCECRCDKPRR

SEQ ID NO: 29418 - protein, 147 aa, Homo sapiens
  MOD_RES (57)..(57): Selenocysteine
  MOD_RES (97)..(97): Selenocysteine
  MOD_RES (103)..(103): Selenocysteine
MNFLLSWVHWSLALLLYLHHAKWSQAAPMAEGGGQNHHEVVKFMDVYQRSYCHPIEXLVDIFQEYPDEIEYIFKPSCVPLMRCGGCCNDEGLECVPXEESNIXMQIMRIKPHQGQHIGEMSFLQHNKCECRPKKDRARQEKCDKPRR

SEQ ID NO: 29419 - protein, 209 aa, Homo sapiens
  MOD_RES (57)..(57): Selenocysteine
  MOD_RES (97)..(97): Selenocysteine
  MOD_RES (103)..(103): Selenocysteine
  MOD_RES (178)..(178): Selenocysteine
  MOD_RES (186)..(186): Selenocysteine
  MOD_RES (201)..(201): Selenocysteine
MNFLLSWVHWSLALLLYLHHAKWSQAAPMAEGGGQNHHEVVKFMDVYQRSYCHPIEXLVDIFQEYPDEIEYIFKPSCVPLMRCGGCCNDEGLECVPXEESNIXMQIMRIKPHQGQHIGEMSFLQHNKCECRPKKDRARQEKKSVRGKGKGQKRKRKKSRPCGPCSERRKHLFVQDPQXCKCSCKNXDSRCKARQLELNERXCRCDKPRR

SEQ ID NO: 29420 - protein, 215 aa, Homo sapiens
  MOD_RES (57)..(57): Selenocysteine
  MOD_RES (97)..(97): Selenocysteine
  MOD_RES (103)..(103): Selenocysteine
  MOD_RES (184)..(184): Selenocysteine
  MOD_RES (192)..(192): Selenocysteine
  MOD_RES (207)..(207): Selenocysteine
MNFLLSWVHWSLALLLYLHHAKWSQAAPMAEGGGQNHHEVVKFMDVYQRSYCHPIEXLVDIFQEYPDEIEYIFKPSCVPLMRCGGCCNDEGLECVPXEESNIXMQIMRIKPHQGQHIGEMSFLQHNKCECRPKKDRARQEKKSVRGKGKGQKRKRKKSRYKSWSVPCGPCSERRKHLFVQDPQXCKCSCKNXDSRCKARQLELNERXCRCDKPRR

SEQ ID NO: 29421 - protein, 232 aa, Homo sapiens
  MOD_RES (57)..(57): Selenocysteine
  MOD_RES (97)..(97): Selenocysteine
  MOD_RES (103)..(103): Selenocysteine
  MOD_RES (201)..(201): Selenocysteine
  MOD_RES (209)..(209): Selenocysteine
  MOD_RES (224)..(224): Selenocysteine
MNFLLSWVHWSLALLLYLHHAKWSQAAPMAEGGGQNHHEVVKFMDVYQRSYCHPIEXLVDIFQEYPDEIEYIFKPSCVPLMRCGGCCNDEGLECVPXEESNIXMQIMRIKPHQGQHIGEMSFLQHNKCECRPKKDRARQEKKSVRGKGKGQKRKRKKSRYKSWSVYVGARCCLMPWSLPGPHPCGPCSERRKHLFVQDPQXCKCSCKNXDSRCKARQLELNERXCRCDKPRR

SEQ ID NO: 29422 - protein, 191 aa, Homo sapiens
  MOD_RES (57)..(57): Selenocysteine
  MOD_RES (97)..(97): Selenocysteine
  MOD_RES (103)..(103): Selenocysteine
  MOD_RES (160)..(160): Selenocysteine
  MOD_RES (168)..(168): Selenocysteine
  MOD_RES (183)..(183): Selenocysteine
MNFLLSWVHWSLALLLYLHHAKWSQAAPMAEGGGQNHHEVVKFMDVYQRSYCHPIEXLVDIFQEYPDEIEYIFKPSCVPLMRCGGCCNDEGLECVPXEESNIXMQIMRIKPHQGQHIGEMSFLQHNKCECRPKKDRARQENPCGPCSERRKHLFVQDPQXCKCSCKNXDSRCKARQLELNERXCRCDKPRR

SEQ ID NO: 29423 - protein, 191 aa, Homo sapiens
  MOD_RES (57)..(57): Selenocysteine
  MOD_RES (97)..(97): Selenocysteine
  MOD_RES (103)..(103): Selenocysteine
  MOD_RES (160)..(160): Selenocysteine
  MOD_RES (168)..(168): Selenocysteine
  MOD_RES (183)..(183): Selenocysteine
  MOD_RES (188)..(188): Selenocysteine
MNFLLSWVHWSLALLLYLHHAKWSQAAPMAEGGGQNHHEVVKFMDVYQRSYCHPIEXLVDIFQEYPDEIEYIFKPSCVPLMRCGGCCNDEGLECVPXEESNIXMQIMRIKPHQGQHIGEMSFLQHNKCECRPKKDRARQENPCGPCSERRKHLFVQDPQXCKCSCKNXDSRCKARQLELNERXCRSLXRKD

SEQ ID NO: 29424 - protein, 174 aa, Homo sapiens
  MOD_RES (57)..(57): Selenocysteine
  MOD_RES (97)..(97): Selenocysteine
  MOD_RES (103)..(103): Selenocysteine
  MOD_RES (160)..(160): Selenocysteine
  MOD_RES (168)..(168): Selenocysteine
MNFLLSWVHWSLALLLYLHHAKWSQAAPMAEGGGQNHHEVVKFMDVYQRSYCHPIEXLVDIFQEYPDEIEYIFKPSCVPLMRCGGCCNDEGLECVPXEESNIXMQIMRIKPHQGQHIGEMSFLQHNKCECRPKKDRARQENPCGPCSERRKHLFVQDPQXCKCSCKNXDSRCKM

SEQ ID NO: 29425 - protein, 323 aa, Homo sapiens
  MOD_RES (1)..(1): Any amino acid
  MOD_RES (92)..(92): Selenocysteine
  MOD_RES (152)..(152): Selenocysteine
  MOD_RES (209)..(209): Selenocysteine
  MOD_RES (249)..(249): Selenocysteine
  MOD_RES (255)..(255): Selenocysteine
XRGQGPEPAPGGGVEGVGARGVALKLFVQLLGCSRFGGAVVRAGEAEPSGAARSASSGREEPQPEEGEEEEEKEEERGPQWRLGARKPGSWXGEAAVCADSAPAARAPQALARASGRGGRVARRGAEESGPPHSPSRRGSASRAGPGRASEXMNFLLSWVHWSLALLLYLHHAKWSQAAPMAEGGGQNHHEVVKFMDVYQRSYCHPIEXLVDIFQEYPDEIEYIFKPSCVPLMRCGGCCNDEGLECVPXEESNIXMQIMRIKPHQGQHIGEMSFLQHNKCECRPKKDRARQEKKSVRGKGKGQKRKRKKSRYKSWSVCDKPRR

SEQ ID NO: 29426 - protein, 207 aa, Homo sapiens
  MOD_RES (43)..(43): Selenocysteine
  MOD_RES (46)..(46): Selenocysteine
  MOD_RES (57)..(57): Selenocysteine
  MOD_RES (63)..(63): Selenocysteine
  MOD_RES (74)..(74): Selenocysteine
  MOD_RES (92)..(92): Selenocysteine
  MOD_RES (140)..(140): Selenocysteine
  MOD_RES (166)..(166): Selenocysteine
  MOD_RES (169)..(169): Selenocysteine
  MOD_RES (182)..(183): Selenocysteine
  MOD_RES (187)..(187): Selenocysteine
MSPLLRRLLLAALLQLAPAQAPVSQPDAPGHQRKVVSWIDVYXRAXCQPREVVVPLXVELMGXVAKQLVPSCVXVQRCGGCCPDDGLECVPXGQHQVRMQILMIRYPSSQLGEMSLEEHSQCECRPKKKDSAVKPDRAAXPHHRPQPRSVPGWDSAPGAPSPADIXHPXPAPGPSAHAAPSXXSALXPGPAAAAADAAASSVAKGGA

SEQ ID NO: 29427 - protein, 188 aa, Homo sapiens
  MOD_RES (43)..(43): Selenocysteine
  MOD_RES (46)..(46): Selenocysteine
  MOD_RES (57)..(57): Selenocysteine
  MOD_RES (63)..(63): Selenocysteine
  MOD_RES (74)..(74): Selenocysteine
  MOD_RES (92)..(92): Selenocysteine
  MOD_RES (146)..(146): Selenocysteine
  MOD_RES (156)..(156): Selenocysteine
  MOD_RES (180)..(180): Selenocysteine
MSPLLRRLLLAALLQLAPAQAPVSQPDAPGHQRKVVSWIDVYXRAXCQPREVVVPLXVELMGXVAKQLVPSCVXVQRCGGCCPDDGLECVPXGQHQVRMQILMIRYPSSQLGEMSLEEHSQCECRPKKKDSAVKPDSPRPLCPRCXQHHQRPDPRXCRCRCRRRSFLRCQGRGLELNPDXCRCRKLRR

SEQ ID NO: 29428 - protein, 32 aa, Homo sapiens
  MOD_RES (1)..(1): Any amino acid
  MOD_RES (7)..(8): Selenocysteine
  MOD_RES (12)..(12): Selenocysteine
XHAAPSXXSALXPGPAAAAADAAASSVAKGGA

SEQ ID NO: 29429 - protein, 419 aa, Homo sapiens
  MOD_RES (49)..(49): Selenocysteine
  MOD_RES (71)..(71): Selenocysteine
  MOD_RES (103)..(103): Selenocysteine
  MOD_RES (106)..(106): Selenocysteine
  MOD_RES (116)..(116): Selenocysteine
  MOD_RES (129)..(129): Selenocysteine
  MOD_RES (148)..(148): Selenocysteine
  MOD_RES (150)..(150): Selenocysteine
  MOD_RES (176)..(176): Selenocysteine
  MOD_RES (178)..(178): Selenocysteine
  MOD_RES (184)..(184): Selenocysteine
  MOD_RES (189)..(189): Selenocysteine
  MOD_RES (200)..(200): Selenocysteine
  MOD_RES (207)..(207): Selenocysteine
  MOD_RES (232)..(232): Selenocysteine
  MOD_RES (242)..(242): Selenocysteine
  MOD_RES (245)..(245): Selenocysteine
  MOD_RES (273)..(273): Selenocysteine
  MOD_RES (290)..(290): Selenocysteine
  MOD_RES (338)..(338): Selenocysteine
  MOD_RES (346)..(346): Selenocysteine
  MOD_RES (363)..(363): Selenocysteine
  MOD_RES (380)..(380): Selenocysteine
  MOD_RES (389)..(389): Selenocysteine
MHLLGFFSVACSLLAAALLPGPREAPAAAAAFESGLDLSDAEPDAGEAXAYASKDLEEQLRSVSSVDELMXVLYPEYWKMYKCQLRKGGWQHNREQANLNSRXEEXIKFAAAHYNXEILKSIDNEWRKXQCMPREVCIDVGKEFGVAXNXFFKPPCVSVYRCGGCCNSEGLQCMNXSXSYLSKXLFEIXVPLSQGPKPVXISFANHXSCRCMSKLDVYRQVHSIIRRSLPAXLPQCQAANKXCPXNYMWNNHICRCLAQEDFMFSSDAGDDSXDGFHDICGPNKELDEEXCQCVCRAGLRPASCGPHKELDRNSCQCVCKNKLFPSQCGANREFDENXCQCVCKRXCPRNQPLNPGKCACECXESPQKCLLKGKKFHHQXCSCYRRPCXNRQKACEPGFSYSEEVCRCVPSYWKRPQMS

SEQ ID NO: 29430 - protein, 354 aa, Homo sapiens
  MOD_RES (36)..(36): Selenocysteine
  MOD_RES (57)..(57): Selenocysteine
  MOD_RES (75)..(75): Selenocysteine
  MOD_RES (87)..(87): Selenocysteine
  MOD_RES (92)..(92): Selenocysteine
  MOD_RES (98)..(98): Selenocysteine
  MOD_RES (109)..(109): Selenocysteine
  MOD_RES (116)..(116): Selenocysteine
  MOD_RES (128)..(128): Selenocysteine
  MOD_RES (130)..(130): Selenocysteine
  MOD_RES (156)..(156): Selenocysteine
  MOD_RES (158)..(158): Selenocysteine
  MOD_RES (173)..(173): Selenocysteine
  MOD_RES (187)..(187): Selenocysteine
  MOD_RES (194)..(194): Selenocysteine
  MOD_RES (246)..(246): Selenocysteine
  MOD_RES (275)..(275): Selenocysteine
  MOD_RES (299)..(299): Selenocysteine
  MOD_RES (311)..(311): Selenocysteine
  MOD_RES (322)..(322): Selenocysteine
  MOD_RES (330)..(330): Selenocysteine
MYREWVVVNVFMMLYVQLVQGSSNEHGPVKRSSQSXLERSEQQIRAASSLEELLRIXHSEDWKLWRCRLRLKSFXSMDSRSASHRSXRFAAXFYDIEXLKVIDEEWQRXQCSPREXCVEVASELGKSXNXFFKPPCVNVFRCGGCCNEESLICMNXSXSYISKQLFEISVPLXSVPELVPVKVANHXGCKCLPXAPRHPYSIIRRSIQIPEEDRCSHSKKLCPIDMLWDSNKCKCVLQEENPLAGXEDHSHLQEPALCGPHMMFDEDRCECVCKXPCPKDLIQHPKNCSCFECKESLEXCCQKHKLFHPDXCSCEDRCPFHXRPCASGKXACAKHCRFPKEKRAAQGPHSRKNP

SEQ ID NO: 29431 - protein, 258 aa, Homo sapiens
  MOD_RES (32)..(32): Selenocysteine
  MOD_RES (34)..(34): Selenocysteine
  MOD_RES (51)..(51): Selenocysteine
  MOD_RES (78)..(78): Selenocysteine
  MOD_RES (88)..(88): Selenocysteine
  MOD_RES (96)..(96): Selenocysteine
  MOD_RES (99)..(99): Selenocysteine
  MOD_RES (105)..(105): Selenocysteine
  MOD_RES (137)..(137): Selenocysteine
  MOD_RES (172)..(172): Selenocysteine
  MOD_RES (231)..(231): Selenocysteine
  MOD_RES (243)..(243): Selenocysteine
  MOD_RES (254)..(254): Selenocysteine
MRLSSSPPRGPQQLSSFGSVDWLSQSSCSGPXHXPRPADFSLGSLPGPGQXSGAREPPQAVSIKEAAGSSNLPAPERXMAGLSKEPNXLRAPRVRXAFXMEQVRXLEGVFQHHQYLSPLERKRLAREMQLSEVQIKXWFQNRRMKHKRQMQDPQLHSPFSGSLHAPPAFYSXSSGLANGLQLLCPWAPLSGPQALMLPPGSFWGLCQVAQEALASAGASCCGQPLASHPPXPGRPSLGPALSXGPRGLCAMPQXGDAF

SEQ ID NO: 29432 - protein, 512 aa, Homo sapiens
  MOD_RES (40)..(40): Selenocysteine
  MOD_RES (49)..(49): Selenocysteine
  MOD_RES (63)..(63): Selenocysteine
  MOD_RES (68)..(68): Selenocysteine
  MOD_RES (88)..(88): Selenocysteine
  MOD_RES (99)..(99): Selenocysteine
  MOD_RES (101)..(102): Selenocysteine
  MOD_RES (109)..(109): Selenocysteine
  MOD_RES (117)..(117): Selenocysteine
  MOD_RES (122)..(122): Selenocysteine
  MOD_RES (129)..(129): Selenocysteine
  MOD_RES (131)..(132): Selenocysteine
  MOD_RES (137)..(137): Selenocysteine
  MOD_RES (145)..(146): Selenocysteine
  MOD_RES (151)..(151): Selenocysteine
  MOD_RES (209)..(209): Selenocysteine
  MOD_RES (220)..(220): Selenocysteine
  MOD_RES (224)..(224): Selenocysteine
  MOD_RES (248)..(248): Selenocysteine
  MOD_RES (256)..(256): Selenocysteine
  MOD_RES (258)..(258): Selenocysteine
  MOD_RES (263)..(263): Selenocysteine
  MOD_RES (269)..(269): Selenocysteine
  MOD_RES (293)..(293): Selenocysteine
  MOD_RES (298)..(298): Selenocysteine
  MOD_RES (309)..(309): Selenocysteine
  MOD_RES (317)..(317): Selenocysteine
  MOD_RES (323)..(323): Selenocysteine
  MOD_RES (348)..(348): Selenocysteine
  MOD_RES (357)..(357): Selenocysteine
  MOD_RES (378)..(378): Selenocysteine
  MOD_RES (380)..(380): Selenocysteine
  MOD_RES (383)..(384): Selenocysteine
  MOD_RES (387)..(387): Selenocysteine
  MOD_RES (389)..(390): Selenocysteine
  MOD_RES (395)..(395): Selenocysteine
  MOD_RES (402)..(402): Selenocysteine
  MOD_RES (408)..(408): Selenocysteine
  MOD_RES (428)..(428): Selenocysteine
  MOD_RES (438)..(438): Selenocysteine
  MOD_RES (440)..(440): Selenocysteine
  MOD_RES (446)..(446): Selenocysteine
  MOD_RES (450)..(450): Selenocysteine
  MOD_RES (452)..(453): Selenocysteine
  MOD_RES (459)..(459): Selenocysteine
  MOD_RES (462)..(462): Selenocysteine
  MOD_RES (472)..(472): Selenocysteine
  MOD_RES (474)..(474): Selenocysteine
  MOD_RES (481)..(481): Selenocysteine
  MOD_RES (484)..(484): Selenocysteine
  MOD_RES (508)..(508): Selenocysteine
MAAHEASHHQQQAAQNSLLPLLSSAVEPPDQKPLLPIPIXQKPQGAPEXLKDAIGIKKEKPKXSFVCXYCSKAFRDSYHLRRHESCHXGIKLVSRPKKXPXXVVPLISXIAGDSSRXSLVSXIAGILSXVXXSSSGXNPSSSASXXAMPVXQSVKKPSKPVKKNHACEMCGKAFRDVYHLNRHKLSHSDEKPFECPICNQRFKRKDRMXYHVRSHEGGIXKPYXCSVCGKGFSRPDHLSCHVKHVHSXERPFKCQXCXAAFAXKDRLRXHMVRHEGKVSCNICGKLLSAAYIXSHLKXHGQSQSINCNXCKQGISKXCMSEEXSNQKQQQQQQQQQQQQQQQQQQHVXSWPGKQVEXLRLWEEAVKARKKEAANLCQXSXAAXXPVXLXXPFSIXSSVSSGXMSNPVXVAAAMSMRSPVNVSSAVNIXSPMNIGHPVXIXSPLSMXSPLXLXXPVNLPXPVXAPVNIAHPVXIXSPMNLPXPMXLAAPLNIAMRPVESMPFLPQALPXSPPW

SEQ ID NO: 29433 - protein, 521 aa, Homo sapiens
  MOD_RES (6)..(6): Selenocysteine
  MOD_RES (49)..(49): Selenocysteine
  MOD_RES (58)..(58): Selenocysteine
  MOD_RES (72)..(72): Selenocysteine
  MOD_RES (77)..(77): Selenocysteine
  MOD_RES (97)..(97): Selenocysteine
  MOD_RES (108)..(108): Selenocysteine
  MOD_RES (110)..(111): Selenocysteine
  MOD_RES (118)..(118): Selenocysteine
  MOD_RES (126)..(126): Selenocysteine
  MOD_RES (131)..(131): Selenocysteine
  MOD_RES (138)..(138): Selenocysteine
  MOD_RES (140)..(141): Selenocysteine
  MOD_RES (146)..(146): Selenocysteine
  MOD_RES (154)..(155): Selenocysteine
  MOD_RES (160)..(160): Selenocysteine
  MOD_RES (218)..(218): Selenocysteine
  MOD_RES (229)..(229): Selenocysteine
  MOD_RES (233)..(233): Selenocysteine
  MOD_RES (257)..(257): Selenocysteine
  MOD_RES (265)..(265): Selenocysteine
  MOD_RES (267)..(267): Selenocysteine
  MOD_RES (272)..(272): Selenocysteine
  MOD_RES (278)..(278): Selenocysteine
  MOD_RES (302)..(302): Selenocysteine
  MOD_RES (307)..(307): Selenocysteine
  MOD_RES (318)..(318): Selenocysteine
  MOD_RES (326)..(326): Selenocysteine
  MOD_RES (332)..(332): Selenocysteine
  MOD_RES (357)..(357): Selenocysteine
  MOD_RES (366)..(366): Selenocysteine
  MOD_RES (387)..(387): Selenocysteine
  MOD_RES (389)..(389): Selenocysteine
  MOD_RES (392)..(393): Selenocysteine
  MOD_RES (396)..(396): Selenocysteine
  MOD_RES (398)..(399): Selenocysteine
  MOD_RES (404)..(404): Selenocysteine
  MOD_RES (411)..(411): Selenocysteine
  MOD_RES (417)..(417): Selenocysteine
  MOD_RES (437)..(437): Selenocysteine
  MOD_RES (447)..(447): Selenocysteine
  MOD_RES (449)..(449): Selenocysteine
  MOD_RES (455)..(455): Selenocysteine
  MOD_RES (459)..(459): Selenocysteine
  MOD_RES (461)..(462): Selenocysteine
  MOD_RES (468)..(468): Selenocysteine
  MOD_RES (471)..(471): Selenocysteine
  MOD_RES (481)..(481): Selenocysteine
  MOD_RES (483)..(483): Selenocysteine
  MOD_RES (490)..(490): Selenocysteine
  MOD_RES (493)..(493): Selenocysteine
  MOD_RES (517)..(517): Selenocysteine
MEANWXAFLFQAHEASHHQQQAAQNSLLPLLSSAVEPPDQKPLLPIPIXQKPQGAPEXLKDAIGIKKEKPKXSFVCXYCSKAFRDSYHLRRHESCHXGIKLVSRPKKXPXXVVPLISXIAGDSSRXSLVSXIAGILSXVXXSSSGXNPSSSASXXAMPVXQSVKKPSKPVKKNHACEMCGKAFRDVYHLNRHKLSHSDEKPFECPICNQRFKRKDRMXYHVRSHEGGIXKPYXCSVCGKGFSRPDHLSCHVKHVHSXERPFKCQXCXAAFAXKDRLRXHMVRHEGKVSCNICGKLLSAAYIXSHLKXHGQSQSINCNXCKQGISKXCMSEEXSNQKQQQQQQQQQQQQQQQQQQHVXSWPGKQVEXLRLWEEAVKARKKEAANLCQXSXAAXXPVXLXXPFSIXSSVSSGXMSNPVXVAAAMSMRSPVNVSSAVNIXSPMNIGHPVXIXSPLSMXSPLXLXXPVNLPXPVXAPVNIAHPVXIXSPMNLPXPMXLAAPLNIAMRPVESMPFLPQALPXSPPW

SEQ ID NO: 29434 - protein, 16 aa, Homo sapiens
  MOD_RES (4)..(4): Selenocysteine
MPVXQSVKKPSKPVKK

SEQ ID NO: 29435 - protein, 340 aa, Homo sapiens
  MOD_RES (1)..(1): Any amino acid
  MOD_RES (31)..(31): Selenocysteine
  MOD_RES (42)..(42): Selenocysteine
  MOD_RES (46)..(46): Selenocysteine
  MOD_RES (70)..(70): Selenocysteine
  MOD_RES (84)..(84): Selenocysteine
  MOD_RES (86)..(86): Selenocysteine
  MOD_RES (91)..(91): Selenocysteine
  MOD_RES (97)..(97): Selenocysteine
  MOD_RES (121)..(121): Selenocysteine
  MOD_RES (126)..(126): Selenocysteine
  MOD_RES (137)..(137): Selenocysteine
  MOD_RES (145)..(145): Selenocysteine
  MOD_RES (151)..(151): Selenocysteine
  MOD_RES (176)..(176): Selenocysteine
  MOD_RES (185)..(185): Selenocysteine
  MOD_RES (206)..(206): Selenocysteine
  MOD_RES (208)..(208): Selenocysteine
  MOD_RES (211)..(212): Selenocysteine
  MOD_RES (215)..(215): Selenocysteine
  MOD_RES (217)..(218): Selenocysteine
  MOD_RES (223)..(223): Selenocysteine
  MOD_RES (230)..(230): Selenocysteine
  MOD_RES (236)..(236): Selenocysteine
  MOD_RES (256)..(256): Selenocysteine
  MOD_RES (266)..(266): Selenocysteine
  MOD_RES (268)..(268): Selenocysteine
  MOD_RES (274)..(274): Selenocysteine
  MOD_RES (278)..(278): Selenocysteine
  MOD_RES (280)..(281): Selenocysteine
  MOD_RES (287)..(287): Selenocysteine
  MOD_RES (290)..(290): Selenocysteine
  MOD_RES (300)..(300): Selenocysteine
  MOD_RES (302)..(302): Selenocysteine
  MOD_RES (309)..(309): Selenocysteine
  MOD_RES (312)..(312): Selenocysteine
  MOD_RES (336)..(336): Selenocysteine
XLNRHKLSHSDEKPFECPICNQRFKRKDRMXYHVRSHEGGIXKPYXCSVCGKGFSRPDHLSCHVKHVHSXERPFKCQFSSLMQXCXAAFAXKDRLRXHMVRHEGKVSCNICGKLLSAAYIXSHLKXHGQSQSINCNXCKQGISKXCMSEEXSNQKQQQQQQQQQQQQQQQQQQHVXSWPGKQVEXLRLWEEAVKARKKEAANLCQXSXAAXXPVXLXXPFSIXSSVSSGXMSNPVXVAAAMSMRSPVNVSSAVNIXSPMNIGHPVXIXSPLSMXSPLXLXXPVNLPXPVXAPVNIAHPVXIXSPMNLPXPMXLAAPLNIAMRPVESMPFLPQALPXSPPW

SEQ ID NO: 29436 - protein, 213 aa, Homo sapiens
  MOD_RES (26)..(26): Selenocysteine
  MOD_RES (72)..(72): Selenocysteine
  MOD_RES (75)..(75): Selenocysteine
  MOD_RES (80)..(80): Selenocysteine
  MOD_RES (84)..(84): Selenocysteine
  MOD_RES (92)..(92): Selenocysteine
  MOD_RES (97)..(97): Selenocysteine
  MOD_RES (119)..(119): Selenocysteine
  MOD_RES (145)..(145): Selenocysteine
  MOD_RES (149)..(149): Selenocysteine
  MOD_RES (176)..(176): Selenocysteine
  MOD_RES (187)..(187): Selenocysteine
  MOD_RES (197)..(197): Selenocysteine
  MOD_RES (203)..(203): Selenocysteine
GAERKGGGLGLRLGLQGSQASQDEIXASAYQAVILDQKYNGEPVQIRVPMGKEPPHLMSIFKGRMVVYQGGXSRXNNLEXGPSXRLFQVQGXGANNXKAFEVPARANFLNSNDVFVLKXQSCCYLWCGKGCSGDEREMAKMVADXISRXEKQVVVEGQEPANFWMALGGKAPYANXKRLQEENLVIXPRLFECSNKXGRFLAXEIPDFNQDDL

SEQ ID NO: 29437 - protein, 516 aa, Homo sapiens
  MOD_RES (17)..(17): Selenocysteine
  MOD_RES (39)..(39): Selenocysteine
  MOD_RES (44)..(44): Selenocysteine
  MOD_RES (50)..(50): Selenocysteine
  MOD_RES (52)..(52): Selenocysteine
  MOD_RES (67)..(67): Selenocysteine
  MOD_RES (121)..(121): Selenocysteine
  MOD_RES (146)..(146): Selenocysteine
  MOD_RES (192)..(192): Selenocysteine
  MOD_RES (195)..(195): Selenocysteine
  MOD_RES (200)..(200): Selenocysteine
  MOD_RES (204)..(204): Selenocysteine
  MOD_RES (212)..(212): Selenocysteine
  MOD_RES (217)..(217): Selenocysteine
  MOD_RES (239)..(239): Selenocysteine
  MOD_RES (265)..(265): Selenocysteine
  MOD_RES (269)..(269): Selenocysteine
  MOD_RES (296)..(296): Selenocysteine
  MOD_RES (307)..(307): Selenocysteine
  MOD_RES (317)..(317): Selenocysteine
  MOD_RES (323)..(323): Selenocysteine
  MOD_RES (365)..(366): Selenocysteine
  MOD_RES (373)..(373): Selenocysteine
  MOD_RES (382)..(382): Selenocysteine
  MOD_RES (395)..(395): Selenocysteine
  MOD_RES (397)..(397): Selenocysteine
  MOD_RES (411)..(411): Selenocysteine
  MOD_RES (431)..(431): Selenocysteine
  MOD_RES (435)..(435): Selenocysteine
  MOD_RES (488)..(488): Selenocysteine
  MOD_RES (494)..(494): Selenocysteine
MSHALNFIKAKQYPPSXQVEVQNDGAESAVFQQLFQKWXASNRXSGLGKXHXVGSVAKVEQVKFDAXSMHVKPQVAAQQKMVDDGSGEVQVWRIENLELVPVDSKWLGHFYGGDCYLLLYXYLIGEKQHYLLYVWQGSQASQDEIXASAYQAVILDQKYNGEPVQIRVPMGKEPPHLMSIFKGRMVVYQGGXSRXNNLEXGPSXRLFQVQGXGANNXKAFEVPARANFLNSNDVFVLKXQSCCYLWCGKGCSGDEREMAKMVADXISRXEKQVVVEGQEPANFWMALGGKAPYANXKRLQEENLVIXPRLFECSNKXGRFLAXEIPDFNQDDLEEDDVFLLDVWDQVFFWIGKHANEEEKKAAAXXAQEYLKXHPSGRDPEXPIIVVKQGHEPPXFXGWFLAWDPFKWSNXKSYEDLKAELGNSRDWSQIXAEVXSPKVDVFNANSNLSSGPLPIFPLEQLVNKPVEELPEGVDPSRKEEHLSIEDFXQAFGMXPAAFSALPRWKQQNLKKEKGLF

SEQ ID NO: 29438 - protein, 158 aa, Homo sapiens
  MOD_RES (2)..(2): Selenocysteine
  MOD_RES (15)..(16): Selenocysteine
  MOD_RES (36)..(36): Selenocysteine
  MOD_RES (54)..(54): Selenocysteine
  MOD_RES (82)..(83): Selenocysteine
  MOD_RES (127)..(127): Selenocysteine
MXKLSAQVKGSLNIXXPGLQIWRIEAMQMVPVPSSXFGSFFDGDCYIILAIHKXASSLSYDIHYWIGQDSSLDEQGAAAIYXXQMDDFLKGRAVQHREVQGNESEAFRGYFKIRKGGVASGMKHVEXNSYDVQRLLHVKGKRNVVAGEVEMSWKSFNR

SEQ ID NO: 29439 - protein, 421 aa, Homo sapiens
  MOD_RES (2)..(2): Selenocysteine
  MOD_RES (15)..(16): Selenocysteine
  MOD_RES (36)..(36): Selenocysteine
  MOD_RES (54)..(54): Selenocysteine
  MOD_RES (82)..(83): Selenocysteine
  MOD_RES (131)..(131): Selenocysteine
  MOD_RES (183)..(183): Selenocysteine
  MOD_RES (192)..(192): Selenocysteine
  MOD_RES (206)..(206): Selenocysteine
  MOD_RES (243)..(243): Selenocysteine
  MOD_RES (272)..(272): Selenocysteine
  MOD_RES (276)..(276): Selenocysteine
  MOD_RES (328)..(328): Selenocysteine
  MOD_RES (350)..(350): Selenocysteine
  MOD_RES (355)..(355): Selenocysteine
  MOD_RES (361)..(361): Selenocysteine
  MOD_RES (363)..(363): Selenocysteine
  MOD_RES (388)..(388): Selenocysteine
  MOD_RES (391)..(392): Selenocysteine
  MOD_RES (398)..(398): Selenocysteine
MXKLSAQVKGSLNIXXPGLQIWRIEAMQMVPVPSSXFGSFFDGDCYIILAIHKXASSLSYDIHYWIGQDSSLDEQGAAAIYXXQMDDFLKGRAVQHREVQGNESEAFRGYFKQGLVIRKGGVASGMKHVEXNSYDVQRLLHVKGKRNVVAGEVEMSWKSFNRGDVFLLDLGKLIIQWNGPESXRMERLRGMXLAKEIRDQERGGRXYVGVVDGENELASPKLMEVMNHVLGKRRELKAAVPDXVVEPALKAALKLYHVSDSEGNLVVREVAXRPLXQDLLSHEDCYILDQGGLKIYVWKGKKANEQEKKGAMSHALNFIKAKQYPPSXQVEVQNDGAESAVFQQLFQKWXASNRXSGLGKXHXVGSVGEGQAGAVREPGSRSWARRAXWSXXHPPSLXCIFNEDFYAGSGLVLADGDVDKL

SEQ ID NO: 29440 - protein, 827 aa, Homo sapiens
  MOD_RES (2)..(2): Selenocysteine
  MOD_RES (15)..(16): Selenocysteine
  MOD_RES (36)..(36): Selenocysteine
  MOD_RES (54)..(54): Selenocysteine
  MOD_RES (82)..(83): Selenocysteine
  MOD_RES (131)..(131): Selenocysteine
  MOD_RES (183)..(183): Selenocysteine
  MOD_RES (192)..(192): Selenocysteine
  MOD_RES (206)..(206): Selenocysteine
  MOD_RES (243)..(243): Selenocysteine
  MOD_RES (272)..(272): Selenocysteine
  MOD_RES (276)..(276): Selenocysteine
  MOD_RES (328)..(328): Selenocysteine
  MOD_RES (350)..(350): Selenocysteine
  MOD_RES (355)..(355): Selenocysteine
  MOD_RES (361)..(361): Selenocysteine
  MOD_RES (363)..(363): Selenocysteine
  MOD_RES (378)..(378): Selenocysteine
  MOD_RES (432)..(432): Selenocysteine
  MOD_RES (457)..(457): Selenocysteine
  MOD_RES (503)..(503): Selenocysteine
  MOD_RES (506)..(506): Selenocysteine
  MOD_RES (511)..(511): Selenocysteine
  MOD_RES (515)..(515): Selenocysteine
  MOD_RES (523)..(523): Selenocysteine
  MOD_RES (528)..(528): Selenocysteine
  MOD_RES (550)..(550): Selenocysteine
  MOD_RES (576)..(576): Selenocysteine
  MOD_RES (580)..(580): Selenocysteine
  MOD_RES (607)..(607): Selenocysteine
  MOD_RES (618)..(618): Selenocysteine
  MOD_RES (628)..(628): Selenocysteine
  MOD_RES (634)..(634): Selenocysteine
  MOD_RES (676)..(677): Selenocysteine
  MOD_RES (684)..(684): Selenocysteine
  MOD_RES (693)..(693): Selenocysteine
  MOD_RES (706)..(706): Selenocysteine
  MOD_RES (708)..(708): Selenocysteine
  MOD_RES (722)..(722): Selenocysteine
  MOD_RES (742)..(742): Selenocysteine
  MOD_RES (746)..(746): Selenocysteine
  MOD_RES (799)..(799): Selenocysteine
  MOD_RES (805)..(805): Selenocysteine
MXKLSAQVKGSLNIXXPGLQIWRIEAMQMVPVPSSXFGSFFDGDCYIILAIHKXASSLSYDIHYWIGQDSSLDEQGAAAIYXXQMDDFLKGRAVQHREVQGNESEAFRGYFKQGLVIRKGGVASGMKHVEXNSYDVQRLLHVKGKRNVVAGEVEMSWKSFNRGDVFLLDLGKLIIQWNGPESXRMERLRGMXLAKEIRDQERGGRXYVGVVDGENELASPKLMEVMNHVLGKRRELKAAVPDXVVEPALKAALKLYHVSDSEGNLVVREVAXRPLXQDLLSHEDCYILDQGGLKIYVWKGKKANEQEKKGAMSHALNFIKAKQYPPSXQVEVQNDGAESAVFQQLFQKWXASNRXSGLGKXHXVGSVAKVEQVKFDAXSMHVKPQVAAQQKMVDDGSGEVQVWRIENLELVPVDSKWLGHFYGGDCYLLLYXYLIGEKQHYLLYVWQGSQASQDEIXASAYQAVILDQKYNGEPVQIRVPMGKEPPHLMSIFKGRMVVYQGGXSRXNNLEXGPSXRLFQVQGXGANNXKAFEVPARANFLNSNDVFVLKXQSCCYLWCGKGCSGDEREMAKMVADXISRXEKQVVVEGQEPANFWMALGGKAPYANXKRLQEENLVIXPRLFECSNKXGRFLAXEIPDFNQDDLEEDDVFLLDVWDQVFFWIGKHANEEEKKAAAXXAQEYLKXHPSGRDPEXPIIVVKQGHEPPXFXGWFLAWDPFKWSNXKSYEDLKAELGNSRDWSQIXAEVXSPKVDVFNANSNLSSGPLPIFPLEQLVNKPVEELPEGVDPSRKEEHLSIEDFXQAFGMXPAAFSALPRWKQQNLKKEKGLF

SEQ ID NO: 29441 - protein, 574 aa, Homo sapiens
  MOD_RES (5)..(5): Selenocysteine
  MOD_RES (22)..(22): Selenocysteine
  MOD_RES (24)..(24): Selenocysteine
  MOD_RES (26)..(26): Selenocysteine
  MOD_RES (42)..(42): Selenocysteine
  MOD_RES (44)..(44): Selenocysteine
  MOD_RES (64)..(64): Selenocysteine
  MOD_RES (93)..(93): Selenocysteine
  MOD_RES (143)..(143): Selenocysteine
  MOD_RES (163)..(163): Selenocysteine
  MOD_RES (191)..(191): Selenocysteine
  MOD_RES (225)..(226): Selenocysteine
  MOD_RES (234)..(234): Selenocysteine
  MOD_RES (239)..(239): Selenocysteine
  MOD_RES (241)..(241): Selenocysteine
  MOD_RES (261)..(261): Selenocysteine
  MOD_RES (286)..(286): Selenocysteine
  MOD_RES (295)..(295): Selenocysteine
  MOD_RES (365)..(365): Selenocysteine
  MOD_RES (393)..(393): Selenocysteine
  MOD_RES (402)..(402): Selenocysteine
  MOD_RES (415)..(415): Selenocysteine
  MOD_RES (422)..(422): Selenocysteine
  MOD_RES (429)..(429): Selenocysteine
  MOD_RES (447)..(447): Selenocysteine
  MOD_RES (452)..(452): Selenocysteine
  MOD_RES (499)..(499): Selenocysteine
  MOD_RES (506)..(506): Selenocysteine
  MOD_RES (509)..(509): Selenocysteine
  MOD_RES (561)..(561): Selenocysteine
MALGXSSPSPPAPPSSPQHIYXNXRXLGPPEPEGHAGGGYPXYXNVEVVNDGAESAAFKQLFRXWSEKRRRNQKLGGRDKSIHVKLDVGKLHXQPKLAAQLRMVDDGSGKVEVWCIQDLHRQPVDPKRHGQLCAGNCYLVLYXYQRLGRVQYILYLWQGHQAXADEIEALNSNAEELDVMYGGVLVQEHVXMGSEPPHFLAIFQGQLVIFQERAGHHGKGQSASXXRLFQVQGXDSHNXRXMEVPARASSLNSSDIFLLVXASVCYLWFGKGCNGDQREMARVVVXVISRKNEEXVLEGQEPPHFWEALGGRAPYPSNKRLPEEVPSFQPRLFECSSHMGCLVLAEVGFFSQEDLDKYDIMLLDXWQEIFLWLGEAASEWKEAVAWGQEYLKXHPAGRSPAXPIVLVKQGHEPPXFIGWFFXWDPYKWXSHPSHKEVVDGSPAAASXISEIXAEVNNLRLSRWPGNGRAGAVALQALKGSQDSSENDLVRSPKSAGSRXSSSVSSXSAXINGGLRREQLMHQAVEDLPEGVDPARREFYLSDSDFQDIFGKSKEEFYSMAXWRQRQEKKQLGFF

SEQ ID NO: 29442 - protein, 130 aa, Homo sapiens
  MOD_RES (53)..(53): Selenocysteine
  MOD_RES (91)..(91): Selenocysteine
  MOD_RES (129)..(129): Selenocysteine
MDISKGLPGMQGGLHIWISENRKMVPVPEGAYGNFFEEHCYVILHVPQSPKAXQGASSDLHYWVGKQAGAEAQGAAEAFQQRLQDELGGQXVLHREAQGHESDCFCSYFRPGIIYRKGGLASDLKHVEXN

SEQ ID NO: 29443 - protein, 187 aa, Homo sapiens
  MOD_RES (53)..(53): Selenocysteine
  MOD_RES (91)..(91): Selenocysteine
  MOD_RES (129)..(129): Selenocysteine
  MOD_RES (149)..(149): Selenocysteine
  MOD_RES (180)..(180): Selenocysteine
MDISKGLPGMQGGLHIWISENRKMVPVPEGAYGNFFEEHCYVILHVPQSPKAXQGASSDLHYWVGKQAGAEAQGAAEAFQQRLQDELGGQXVLHREAQGHESDCFCSYFRPGIIYRKGGLASDLKHVEXNLFNIQRLLHIKGRKHVSAXEVELSWNSFNKGDIFLLDLGKMMIQWNGPKXSISEKAR

SEQ ID NO: 29444 - protein, 856 aa, Homo sapiens
  MOD_RES (53)..(53): Selenocysteine
  MOD_RES (91)..(91): Selenocysteine
  MOD_RES (129)..(129): Selenocysteine
  MOD_RES (149)..(149): Selenocysteine
  MOD_RES (180)..(180): Selenocysteine
  MOD_RES (192)..(192): Selenocysteine
  MOD_RES (238)..(238): Selenocysteine
  MOD_RES (270)..(270): Selenocysteine
  MOD_RES (274)..(274): Selenocysteine
  MOD_RES (324)..(324): Selenocysteine
  MOD_RES (326)..(326): Selenocysteine
  MOD_RES (346)..(346): Selenocysteine
  MOD_RES (375)..(375): Selenocysteine
  MOD_RES (425)..(425): Selenocysteine
  MOD_RES (445)..(445): Selenocysteine
  MOD_RES (473)..(473): Selenocysteine
  MOD_RES (507)..(508): Selenocysteine
  MOD_RES (516)..(516): Selenocysteine
  MOD_RES (521)..(521): Selenocysteine
  MOD_RES (523)..(523): Selenocysteine
  MOD_RES (543)..(543): Selenocysteine
  MOD_RES (568)..(568): Selenocysteine
  MOD_RES (577)..(577): Selenocysteine
  MOD_RES (647)..(647): Selenocysteine
  MOD_RES (675)..(675): Selenocysteine
  MOD_RES (684)..(684): Selenocysteine
  MOD_RES (697)..(697): Selenocysteine
  MOD_RES (704)..(704): Selenocysteine
  MOD_RES (711)..(711): Selenocysteine
  MOD_RES (729)..(729): Selenocysteine
  MOD_RES (734)..(734): Selenocysteine
  MOD_RES (781)..(781): Selenocysteine
  MOD_RES (788)..(788): Selenocysteine
  MOD_RES (791)..(791): Selenocysteine
  MOD_RES (843)..(843): Selenocysteine
MDISKGLPGMQGGLHIWISENRKMVPVPEGAYGNFFEEHCYVILHVPQSPKAXQGASSDLHYWVGKQAGAEAQGAAEAFQQRLQDELGGQXVLHREAQGHESDCFCSYFRPGIIYRKGGLASDLKHVEXNLFNIQRLLHIKGRKHVSAXEVELSWNSFNKGDIFLLDLGKMMIQWNGPKXSISEKARGLALXYSLRDRERGGGRAQIGVVDDEAKAPDLMQIMEAVLGRRVGSLRAAXPSKDINQLQKANVRLYHVYEKGKDLVVLELAXPPLXQDLLQEEDFYILDQGGFKIYVWQGRMSSLQERKAAFSRAVGFIQAKGYPXYXNVEVVNDGAESAAFKQLFRXWSEKRRRNQKLGGRDKSIHVKLDVGKLHXQPKLAAQLRMVDDGSGKVEVWCIQDLHRQPVDPKRHGQLCAGNCYLVLYXYQRLGRVQYILYLWQGHQAXADEIEALNSNAEELDVMYGGVLVQEHVXMGSEPPHFLAIFQGQLVIFQERAGHHGKGQSASXXRLFQVQGXDSHNXRXMEVPARASSLNSSDIFLLVXASVCYLWFGKGCNGDQREMARVVVXVISRKNEEXVLEGQEPPHFWEALGGRAPYPSNKRLPEEVPSFQPRLFECSSHMGCLVLAEVGFFSQEDLDKYDIMLLDXWQEIFLWLGEAASEWKEAVAWGQEYLKXHPAGRSPAXPIVLVKQGHEPPXFIGWFFXWDPYKWXSHPSHKEVVDGSPAAASXISEIXAEVNNLRLSRWPGNGRAGAVALQALKGSQDSSENDLVRSPKSAGSRXSSSVSSXSAXINGGLRREQLMHQAVEDLPEGVDPARREFYLSDSDFQDIFGKSKEEFYSMAXWRQRQEKKQLGFF

SEQ ID NO: 29445 - protein, 101 aa, Homo sapiens
  MOD_RES (1)..(1): Any amino acid
  MOD_RES (26)..(26): Selenocysteine
  MOD_RES (28)..(28): Selenocysteine
  MOD_RES (48)..(48): Selenocysteine
  MOD_RES (77)..(77): Selenocysteine
XMSSLQERKAAFSRAVGFIQAKGYPXYXNVEVVNDGAESAAFKQLFRXWSEKRRRNQKLGGRDKSIHVKLDVGKLHXQPKLAAQLRMVDDGSGKVEGLPGI

SEQ ID NO: 29446 - protein, 173 aa, Homo sapiens
  MOD_RES (28)..(28): Selenocysteine
  MOD_RES (92)..(92): Selenocysteine
  MOD_RES (143)..(143): Selenocysteine
  MOD_RES (153)..(153): Selenocysteine
  MOD_RES (162)..(162): Selenocysteine
  MOD_RES (165)..(165): Selenocysteine
GFLVPLWLMRNCFRLQEEMLQREEAENXLQSFRQDVDNASLARLDLERKVESLQEEIAFLKKLHEEEIQELQAQIQEQHVQIDVDVSKPDLXAALRDVRQQYESVAAKNLQEAEEWYKSKFADLSEAANRNNDALRQAKQESXEYRRQVQSLXCEVDALKGXVSXNPAVKEGK

SEQ ID NO: 29447 - protein, 228 aa, Homo sapiens
  MOD_RES (20)..(20): Selenocysteine
  MOD_RES (84)..(84): Selenocysteine
  MOD_RES (135)..(135): Selenocysteine
  MOD_RES (145)..(145): Selenocysteine
  MOD_RES (154)..(154): Selenocysteine
  MOD_RES (179)..(179): Selenocysteine
  MOD_RES (217)..(217): Selenocysteine
MRNCFRLQEEMLQREEAENXLQSFRQDVDNASLARLDLERKVESLQEEIAFLKKLHEEEIQELQAQIQEQHVQIDVDVSKPDLXAALRDVRQQYESVAAKNLQEAEEWYKSKFADLSEAANRNNDALRQAKQESXEYRRQVQSLXCEVDALKGXNESLERQMREMEENFAVEAANYQDXIGRLQDEIQNMKEEMARHLREYQDLLNVKMALDIEIAXYRKLLEGEESR

SEQ ID NO: 29448 - protein, 109 aa, Homo sapiens
  MOD_RES (3)..(3): Selenocysteine
  MOD_RES (20)..(20): Selenocysteine
  MOD_RES (32)..(33): Selenocysteine
  MOD_RES (35)..(35): Selenocysteine
  MOD_RES (37)..(37): Selenocysteine
  MOD_RES (48)..(48): Selenocysteine
  MOD_RES (63)..(63): Selenocysteine
  MOD_RES (94)..(94): Selenocysteine
  MOD_RES (99)..(99): Selenocysteine
  MOD_RES (101)..(101): Selenocysteine
MSXRSVSSSSYRRMFGGPGXASRPSSSRSYVXXSXRXYSLGSALRPSXSRSLYASSPGGVYAXRSSAVRLRSSVPGVRLLQDSVDFSLADAINXEFKNXRXNEKVELQE

SEQ ID NO: 29449 - protein, 149 aa, Homo sapiens
  MOD_RES (3)..(3): Selenocysteine
  MOD_RES (20)..(20): Selenocysteine
  MOD_RES (32)..(33): Selenocysteine
  MOD_RES (35)..(35): Selenocysteine
  MOD_RES (37)..(37): Selenocysteine
  MOD_RES (48)..(48): Selenocysteine
  MOD_RES (63)..(63): Selenocysteine
  MOD_RES (94)..(94): Selenocysteine
  MOD_RES (99)..(99): Selenocysteine
  MOD_RES (101)..(101): Selenocysteine
MSXRSVSSSSYRRMFGGPGXASRPSSSRSYVXXSXRXYSLGSALRPSXSRSLYASSPGGVYAXRSSAVRLRSSVPGVRLLQDSVDFSLADAINXEFKNXRXNEKVELQELNDRFANYIDKVRFLEQQNKILLAELEQLKGQGKSRLGDL

SEQ ID NO: 29450 - protein, 176 aa, Homo sapiens
  MOD_RES (3)..(3): Selenocysteine
  MOD_RES (20)..(20): Selenocysteine
  MOD_RES (32)..(33): Selenocysteine
  MOD_RES (35)..(35): Selenocysteine
  MOD_RES (37)..(37): Selenocysteine
  MOD_RES (48)..(48): Selenocysteine
  MOD_RES (63)..(63): Selenocysteine
  MOD_RES (94)..(94): Selenocysteine
  MOD_RES (99)..(99): Selenocysteine
  MOD_RES (101)..(101): Selenocysteine
  MOD_RES (165)..(165): Selenocysteine
MSXRSVSSSSYRRMFGGPGXASRPSSSRSYVXXSXRXYSLGSALRPSXSRSLYASSPGGVYAXRSSAVRLRSSVPGVRLLQDSVDFSLADAINXEFKNXRXNEKVELQELNDRFANYIDKVRFLEQQNKILLAELEQLKGQGKSRLGDLYEEEMRELRRQVDQLXNDKARVEVERD

SEQ ID NO: 29451 - protein, 431 aa, Homo sapiens
  MOD_RES (3)..(3): Selenocysteine
  MOD_RES (20)..(20): Selenocysteine
  MOD_RES (32)..(33): Selenocysteine
  MOD_RES (35)..(35): Selenocysteine
  MOD_RES (37)..(37): Selenocysteine
  MOD_RES (48)..(48): Selenocysteine
  MOD_RES (63)..(63): Selenocysteine
  MOD_RES (94)..(94): Selenocysteine
  MOD_RES (99)..(99): Selenocysteine
  MOD_RES (101)..(101): Selenocysteine
  MOD_RES (165)..(165): Selenocysteine
  MOD_RES (202)..(202): Selenocysteine
  MOD_RES (266)..(266): Selenocysteine
  MOD_RES (317)..(317): Selenocysteine
  MOD_RES (327)..(327): Selenocysteine
  MOD_RES (336)..(336): Selenocysteine
  MOD_RES (361)..(361): Selenocysteine
  MOD_RES (399)..(399): Selenocysteine
MSXRSVSSSSYRRMFGGPGXASRPSSSRSYVXXSXRXYSLGSALRPSXSRSLYASSPGGVYAXRSSAVRLRSSVPGVRLLQDSVDFSLADAINXEFKNXRXNEKVELQELNDRFANYIDKVRFLEQQNKILLAELEQLKGQGKSRLGDLYEEEMRELRRQVDQLXNDKARVEVERDNLAEDIMRLREKLQEEMLQREEAENXLQSFRQDVDNASLARLDLERKVESLQEEIAFLKKLHEEEIQELQAQIQEQHVQIDVDVSKPDLXAALRDVRQQYESVAAKNLQEAEEWYKSKFADLSEAANRNNDALRQAKQESXEYRRQVQSLXCEVDALKGXNESLERQMREMEENFAVEAANYQDXIGRLQDEIQNMKEEMARHLREYQDLLNVKMALDIEIAXYRKLLEGEESRISLPLPNFSSLNLRGKHFISL

SEQ ID NO: 29452 - protein, 466 aa, Homo sapiens
  MOD_RES (3)..(3): Selenocysteine
  MOD_RES (20)..(20): Selenocysteine
  MOD_RES (32)..(33): Selenocysteine
  MOD_RES (35)..(35): Selenocysteine
  MOD_RES (37)..(37): Selenocysteine
  MOD_RES (48)..(48): Selenocysteine
  MOD_RES (63)..(63): Selenocysteine
  MOD_RES (94)..(94): Selenocysteine
  MOD_RES (99)..(99): Selenocysteine
  MOD_RES (101)..(101): Selenocysteine
  MOD_RES (165)..(165): Selenocysteine
  MOD_RES (202)..(202): Selenocysteine
  MOD_RES (266)..(266): Selenocysteine
  MOD_RES (317)..(317): Selenocysteine
  MOD_RES (327)..(327): Selenocysteine
  MOD_RES (336)..(336): Selenocysteine
  MOD_RES (361)..(361): Selenocysteine
  MOD_RES (399)..(399): Selenocysteine
  MOD_RES (426)..(426): Selenocysteine
  MOD_RES (436)..(436): Selenocysteine
  MOD_RES (441)..(441): Selenocysteine
  MOD_RES (446)..(446): Selenocysteine
  MOD_RES (449)..(449): Selenocysteine
  MOD_RES (458)..(458): Selenocysteine
MSXRSVSSSSYRRMFGGPGXASRPSSSRSYVXXSXRXYSLGSALRPSXSRSLYASSPGGVYAXRSSAVRLRSSVPGVRLLQDSVDFSLADAINXEFKNXRXNEKVELQELNDRFANYIDKVRFLEQQNKILLAELEQLKGQGKSRLGDLYEEEMRELRRQVDQLXNDKARVEVERDNLAEDIMRLREKLQEEMLQREEAENXLQSFRQDVDNASLARLDLERKVESLQEEIAFLKKLHEEEIQELQAQIQEQHVQIDVDVSKPDLXAALRDVRQQYESVAAKNLQEAEEWYKSKFADLSEAANRNNDALRQAKQESXEYRRQVQSLXCEVDALKGXNESLERQMREMEENFAVEAANYQDXIGRLQDEIQNMKEEMARHLREYQDLLNVKMALDIEIAXYRKLLEGEESRISLPLPNFSSLNLREXNLDSLPLVDXHSKRXLLIKXVEXRDGQVINEXSQHHDDLE

SEQ ID NO: 29453 - protein, 169 aa, Homo sapiens
  MOD_RES (3)..(3): Selenocysteine
  MOD_RES (14)..(14): Selenocysteine
  MOD_RES (23)..(23): Selenocysteine
  MOD_RES (70)..(70): Selenocysteine
  MOD_RES (87)..(87): Selenocysteine
  MOD_RES (130)..(130): Selenocysteine
  MOD_RES (134)..(134): Selenocysteine
MDXRNKAQLLVLLXLLSVLFSQXSAWPLYRAPSALRLGDRIPFEGANEPDQVSLKEDIDMLQNALAENDXPYYDVSRNARHADGVFXSDFSKLLGQLSAKKYLESLMGKRVSNISEDPVPVKRHSDAVFXDNYXRLRKQMAVKKYLNSILNGKRSSEGESPDFPEELEK

SEQ ID NO: 29454 - protein, 170 aa, Homo sapiens
  MOD_RES (3)..(3): Selenocysteine
  MOD_RES (14)..(14): Selenocysteine
  MOD_RES (23)..(23): Selenocysteine
  MOD_RES (70)..(70): Selenocysteine
  MOD_RES (87)..(87): Selenocysteine
  MOD_RES (131)..(131): Selenocysteine
  MOD_RES (135)..(135): Selenocysteine
MDXRNKAQLLVLLXLLSVLFSQXSAWPLYRAPSALRLGDRIPFEGANEPDQVSLKEDIDMLQNALAENDXPYYDVSRNARHADGVFXSDFSKLLGQLSAKKYLESLMGKRVSSNISEDPVPVKRHSDAVFXDNYXRLRKQMAVKKYLNSILNGKRSSEGESPDFPEELEK

SEQ ID NO: 29455 - protein, 119 aa, Homo sapiens
  MOD_RES (1)..(1): Any amino acid
  MOD_RES (20)..(20): Selenocysteine
  MOD_RES (37)..(37): Selenocysteine
  MOD_RES (81)..(81): Selenocysteine
  MOD_RES (85)..(85): Selenocysteine
XVSLKEDIDMLQNALAENDXPYYDVSRNARHADGVFXSDFSKLLGQLSAKKYLESLMGKRVSSNISEDPVPVKRHSDAVFXDNYXRLRKQMAVKKYLNSILNGKRSEGESPDFPEELEK

SEQ ID NO: 29456 - protein, 126 aa, Homo sapiens
  MOD_RES (19)..(19): Selenocysteine
  MOD_RES (30)..(30): Selenocysteine
  MOD_RES (35)..(35): Selenocysteine
  MOD_RES (65)..(65): Selenocysteine
  MOD_RES (70)..(70): Selenocysteine
  MOD_RES (95)..(95): Selenocysteine
  MOD_RES (103)..(103): Selenocysteine
  MOD_RES (106)..(106): Selenocysteine
  MOD_RES (115)..(115): Selenocysteine
  MOD_RES (120)..(120): Selenocysteine
MIEVQHKQCLEEAQLENEXIGCSKMWDNLXCWPAXPRGQVVVLACPLIFKLFSSIQGRNVSRSCXDEGWXHLEPGPYPIACGLDDKAASLDEQQXMFYGSVKXGYXIGYGLSLAXLLVAXAILSLF

SEQ ID NO: 29457 - protein, 416 aa, Homo sapiens
  MOD_RES (19)..(19): Selenocysteine
  MOD_RES (30)..(30): Selenocysteine
  MOD_RES (35)..(35): Selenocysteine
  MOD_RES (65)..(65): Selenocysteine
  MOD_RES (70)..(70): Selenocysteine
  MOD_RES (95)..(95): Selenocysteine
  MOD_RES (103)..(103): Selenocysteine
  MOD_RES (106)..(106): Selenocysteine
  MOD_RES (115)..(115): Selenocysteine
  MOD_RES (120)..(120): Selenocysteine
  MOD_RES (132)..(132): Selenocysteine
  MOD_RES (201)..(201): Selenocysteine
  MOD_RES (227)..(227): Selenocysteine
  MOD_RES (229)..(229): Selenocysteine
  MOD_RES (233)..(233): Selenocysteine
  MOD_RES (247)..(247): Selenocysteine
  MOD_RES (262)..(262): Selenocysteine
  MOD_RES (302)..(302): Selenocysteine
  MOD_RES (388)..(388): Selenocysteine
  MOD_RES (391)..(391): Selenocysteine
  MOD_RES (397)..(397): Selenocysteine
MIEVQHKQCLEEAQLENEXIGCSKMWDNLXCWPAXPRGQVVVLACPLIFKLFSSIQGRNVSRSCXDEGWXHLEPGPYPIACGLDDKAASLDEQQXMFYGSVKXGYXIGYGLSLAXLLVAXAILSLFRKLHCXRNYIHMHLFISFILRAAAVFIKDLALFDSGESDQCSEGSVGCKAAMVFFQYCVMANFFWLLVEGLYLYXLLAVSFFSERKYFWGYILIGWGVPSXFXMVWXIARIHFEDYGCWDXINSSLWWIIKGPILXSILVNFILFICIIRILLQKLRPPDIRKSDSSPYSRLARSXLLLIPLFGVHYIMFAFFPDNFKPEVKMVFELVVGSFQGFVVAILYCFLNGEVQAELRRKWRRWHLQGVLGWNPKYRHPSGGSNGAXCSXQVSMLXRVSPGARRSSSFQAEVSLV

SEQ ID NO: 29458 - protein, 409 aa, Homo sapiens
  MOD_RES (24)..(24): Selenocysteine
  MOD_RES (29)..(29): Selenocysteine
  MOD_RES (59)..(59): Selenocysteine
  MOD_RES (64)..(64): Selenocysteine
  MOD_RES (88)..(88): Selenocysteine
  MOD_RES (96)..(96): Selenocysteine
  MOD_RES (99)..(99): Selenocysteine
  MOD_RES (108)..(108): Selenocysteine
  MOD_RES (113)..(113): Selenocysteine
  MOD_RES (125)..(125): Selenocysteine
  MOD_RES (194)..(194): Selenocysteine
  MOD_RES (220)..(220): Selenocysteine
  MOD_RES (222)..(222): Selenocysteine
  MOD_RES (226)..(226): Selenocysteine
  MOD_RES (240)..(240): Selenocysteine
  MOD_RES (255)..(255): Selenocysteine
  MOD_RES (295)..(295): Selenocysteine
  MOD_RES (381)..(381): Selenocysteine
  MOD_RES (384)..(384): Selenocysteine
  MOD_RES (390)..(390): Selenocysteine
MRAGRRPRLGPWAGGCSKMWDNLXCWPAXPRGQVVVLACPLIFKLFSSIQGRNVSRSCXDEGWXHLEPGPYPIACGLDDKAASLDEQXMFYGSVKXGYXIGYGLSLAXLLVAXAILSLFRKLHCXRNYIHMHLFISFILRAAAVFIKDLALFDSGESDQCSEGSVGCKAAMVFFQYCVMANFFWLLVEGLYLYXLLAVSFFSERKYFWGYILIGWGVPSXFXMVWXIARIHFEDYGCWDXINSSLWWIIKGPILXSILVNFILFICIIRILLQKLRPPDIRKSDSSPYSRLARSXLLLIPLFGVHYIMFAFFPDNFKPEVKMVFELVVGSFQGFVVAILYCFLNGEVQAELRRKWRRWHLQGVLGWNPKYRHPSGGSNGAXCSXQVSMLXRVSPGARRSSSFQAEVSLV

SEQ ID NO: 29459 - protein, 45 aa, Homo sapiens
  MOD_RES (33)..(34): Selenocysteine
MRPPSPLPARWLCVLAGALAWALGPAAAARCGXXSPAGQPPLGAR

SEQ ID NO: 29460 - protein, 457 aa, Homo sapiens
  MOD_RES (60)..(60): Selenocysteine
  MOD_RES (71)..(71): Selenocysteine
  MOD_RES (76)..(76): Selenocysteine
  MOD_RES (106)..(106): Selenocysteine
  MOD_RES (111)..(111): Selenocysteine
  MOD_RES (136)..(136): Selenocysteine
  MOD_RES (144)..(144): Selenocysteine
  MOD_RES (147)..(147): Selenocysteine
  MOD_RES (156)..(156): Selenocysteine
  MOD_RES (161)..(161): Selenocysteine
  MOD_RES (173)..(173): Selenocysteine
  MOD_RES (242)..(242): Selenocysteine
  MOD_RES (268)..(268): Selenocysteine
  MOD_RES (270)..(270): Selenocysteine
  MOD_RES (274)..(274): Selenocysteine
  MOD_RES (288)..(288): Selenocysteine
  MOD_RES (303)..(303): Selenocysteine
  MOD_RES (343)..(343): Selenocysteine
  MOD_RES (429)..(429): Selenocysteine
  MOD_RES (432)..(432): Selenocysteine
  MOD_RES (438)..(438): Selenocysteine
MRPPSPLPARWLCVLAGALAWALGPAGGQAARLQEECDYVQMIEVQHKQCLEEAQLENEXIGCSKMWDNLXCWPAXPRGQVVVLACPLIFKLFSSIQGRNVSRSCXDEGWXHLEPGPYPIACGLDDKAASLDEQQXMFYGSVKXGYXIGYGLSLAXLLVAXAILSLFRKLHCXRNYIHMHLFISFILRAAAVFIKDLALFDSGESDQCSEGSVGCKAAMVFFQYCVMANFFWLLVEGLYLYXLLAVSFFSERKYFWGYILIGWGVPSXFXMVWXIARIHFEDYGCWDXINSSLWWIIKGPILXSILVNFILFICIIRILLQKLRPPDIRKSDSSPYSRLARSXLLLIPLFGVHYIMFAFFPDNFKPEVKMVFELVVGSFQGFVVAILYCFLNGEVQAELRRKWRRWHLQGVLGWNPKYRHPSGGSNGAXCSXQVSMLXRVSPGARRSSSFQAEVSLV

SEQ ID NO: 29461 - protein, 219 aa, Homo sapiens
  MOD_RES (60)..(60): Selenocysteine
  MOD_RES (71)..(71): Selenocysteine
  MOD_RES (76)..(76): Selenocysteine
  MOD_RES (106)..(106): Selenocysteine
  MOD_RES (111)..(111): Selenocysteine
  MOD_RES (136)..(136): Selenocysteine
  MOD_RES (144)..(144): Selenocysteine
  MOD_RES (147)..(147): Selenocysteine
  MOD_RES (156)..(156): Selenocysteine
  MOD_RES (161)..(161): Selenocysteine
  MOD_RES (185)..(185): Selenocysteine
  MOD_RES (195)..(195): Selenocysteine
  MOD_RES (197)..(197): Selenocysteine
  MOD_RES (210)..(210): Selenocysteine
  MOD_RES (214)..(214): Selenocysteine
MRPPSPLPARWLCVLAGALAWALGPAGGQAARLQEECDYVQMIEVQHKQCLEEAQLENEXIGCSKMWDNLXCWPAXPRGQVVVLACPLIFKLFSSIQGRNVSRSCXDEGWXHLEPGPYPIACGLDDKAASLDEQQXMFYGSVKXGYXIGYGLSLAXLLVAXAILSLFRWAVRQPWSFSNIVSWLXSSGCWWRASXCXPCLPSPSSLSGSXSGGXYSSAG

SEQ ID NO: 29462 - protein, 247 aa, Homo sapiens
  MOD_RES (2)..(2): Selenocysteine
  MOD_RES (26)..(26): Selenocysteine
  MOD_RES (36)..(36): Selenocysteine
  MOD_RES (38)..(38): Selenocysteine
  MOD_RES (51)..(51): Selenocysteine
  MOD_RES (58)..(58): Selenocysteine
  MOD_RES (60)..(60): Selenocysteine
  MOD_RES (64)..(64): Selenocysteine
  MOD_RES (78)..(78): Selenocysteine
  MOD_RES (93)..(93): Selenocysteine
  MOD_RES (133)..(133): Selenocysteine
  MOD_RES (219)..(219): Selenocysteine
  MOD_RES (222)..(222): Selenocysteine
  MOD_RES (228)..(228): Selenocysteine
MXRQRVWMRWAVRQPWSFSNIVSWLXSSGCWWRASXCXPCLPSPSSLSGSXSGGVPSXFXMVWXIARIHFEDYGCWDXINSSLWWIIKGPILXSILVNFILFICIIRILLQKLRPPDIRKSDSSPYSRLARSXLLLIPLFGVHYIMFAFFPDNFKPEVKMVFELVVGSFQGFVVAILYCFLNGEVQAELRRKWRRWHLQGVLGWNPKYRHPSGGSNGAXCSXQVSMLXRVSPGARRSSSFQAEVSLV

SEQ ID NO: 29463 - protein, 422 aa, Homo sapiens
  MOD_RES (17)..(17): Selenocysteine
  MOD_RES (22)..(22): Selenocysteine
  MOD_RES (43)..(43): Selenocysteine
  MOD_RES (87)..(87): Selenocysteine
  MOD_RES (96)..(96): Selenocysteine
  MOD_RES (105)..(105): Selenocysteine
  MOD_RES (115)..(115): Selenocysteine
  MOD_RES (127)..(127): Selenocysteine
  MOD_RES (141)..(141): Selenocysteine
  MOD_RES (173)..(173): Selenocysteine
  MOD_RES (213)..(213): Selenocysteine
  MOD_RES (237)..(237): Selenocysteine
  MOD_RES (244)..(244): Selenocysteine
  MOD_RES (253)..(253): Selenocysteine
  MOD_RES (258)..(258): Selenocysteine
  MOD_RES (295)..(295): Selenocysteine
  MOD_RES (314)..(314): Selenocysteine
  MOD_RES (380)..(380): Selenocysteine
  MOD_RES (417)..(417): Selenocysteine
  MOD_RES (419)..(419): Selenocysteine
MPLWEAPSDHPANPPAXLQGHXSLPGCQEEPARDPQSGLPQIXSESSSFSEGSLPSWSSGPAGAKLNASHEGIGSSSDGNGDSKAAXERVVSAMDXVRRKHPEIXFYILVKAIYXLGYSVSLMSLAXGSIILCLFRKLHCXRNYIHLNLFLSFILRAISVLVKDDVLYSSSGXLHCPDQPSSWVGCKLSLVFLQYCIMANFFWLLVEGLYLHXLLVAMLPPRRCFLAYLLIGWGLPXVCIGAWXAARLYLEDXGCWDXNDHSVPWWVIRIPILISIIVNFVLFISIIRILLQKLXSPDVGGNDQSQYKRLAKSXLLLIPLFGVHYMVFAVFPISISSKYQILFELCLGSFQGLVVAVLYCFLNSEVQCELKRKWRSRCPXPSASRDYRVCGSSFSRNGSEGALQFHRGSRAQSFLQXEXSVI

SEQ ID NO: 29464 - protein, 438 aa, Homo sapiens
  MOD_RES (3)..(3): Selenocysteine
  MOD_RES (11)..(11): Selenocysteine
  MOD_RES (36)..(36): Selenocysteine
  MOD_RES (46)..(46): Selenocysteine
  MOD_RES (60)..(60): Selenocysteine
  MOD_RES (70)..(70): Selenocysteine
  MOD_RES (72)..(72): Selenocysteine
  MOD_RES (94)..(94): Selenocysteine
  MOD_RES (101)..(101): Selenocysteine
  MOD_RES (121)..(121): Selenocysteine
  MOD_RES (131)..(131): Selenocysteine
  MOD_RES (143)..(143): Selenocysteine
  MOD_RES (157)..(157): Selenocysteine
  MOD_RES (189)..(189): Selenocysteine
  MOD_RES (229)..(229): Selenocysteine
  MOD_RES (253)..(253): Selenocysteine
  MOD_RES (260)..(260): Selenocysteine
  MOD_RES (269)..(269): Selenocysteine
  MOD_RES (274)..(274): Selenocysteine
  MOD_RES (311)..(311): Selenocysteine
  MOD_RES (330)..(330): Selenocysteine
  MOD_RES (396)..(396): Selenocysteine
  MOD_RES (433)..(433): Selenocysteine
  MOD_RES (435)..(435): Selenocysteine
MRXLLPPALLXCWLLAPVNSIHPECRFHLEIQEEEXKCAELLRSQXEKHKACSGVWDNIXCWRPANVGEXVXVPCPKVFSNFYSKAGNISKNCXSDGWSEXFPDFVDACGYSDPEDESKIXFYILVKAIYXLGYSVSLMSLAXGSIILCLFRKLHCXRNYIHLNLFLSFILRAISVLVKDDVLYSSSGXLHCPDQPSSWVGCKLSLVFLQYCIMANFFWLLVEGLYLHXLLVAMLPPRRCFLAYLLIGWGLPXVCIGAWXAARLYLEDXGCWDXNDHSVPWWVIRIPILISIIVNFVLFISIIRILLQKLXSPDVGGNDQSQYKRLAKSXLLLIPLFGVHYMVFAVFPISISSKYQILFELCLGSFQGLVVAVLYCFLNSEVQCELKRKWRSRCPXPSASRDYRVCGSSFSRNGSEGALQFHRGSRAQSFLQXEXSVI

SEQ ID NO: 29465 - protein, 77 aa, Homo sapiens
  MOD_RES (3)..(3): Selenocysteine
  MOD_RES (11)..(11): Selenocysteine
  MOD_RES (36)..(36): Selenocysteine
  MOD_RES (46)..(46): Selenocysteine
  MOD_RES (53)..(53): Selenocysteine
  MOD_RES (72)..(72): Selenocysteine
MRXLLPPALLXCWLLAPVNSIHPECRFHLEIQEEEXKCAELLRSQXEKHKGHXKGFILIHAGGLKRILDPHXYPLAP

SEQ ID NO: 29466 - protein, 579 aa, Homo sapiens
  MOD_RES (3)..(3): Selenocysteine
  MOD_RES (11)..(11): Selenocysteine
  MOD_RES (23)..(23): Selenocysteine
  MOD_RES (116)..(116): Selenocysteine
  MOD_RES (177)..(177): Selenocysteine
  MOD_RES (187)..(187): Selenocysteine
  MOD_RES (201)..(201): Selenocysteine
  MOD_RES (211)..(211): Selenocysteine
  MOD_RES (213)..(213): Selenocysteine
  MOD_RES (235)..(235): Selenocysteine
  MOD_RES (242)..(242): Selenocysteine
  MOD_RES (262)..(262): Selenocysteine
  MOD_RES (272)..(272): Selenocysteine
  MOD_RES (284)..(284): Selenocysteine
  MOD_RES (298)..(298): Selenocysteine
  MOD_RES (330)..(330): Selenocysteine
  MOD_RES (370)..(370): Selenocysteine
  MOD_RES (394)..(394): Selenocysteine
  MOD_RES (401)..(401): Selenocysteine
  MOD_RES (410)..(410): Selenocysteine
  MOD_RES (415)..(415): Selenocysteine
  MOD_RES (452)..(452): Selenocysteine
  MOD_RES (471)..(471): Selenocysteine
  MOD_RES (537)..(537): Selenocysteine
  MOD_RES (574)..(574): Selenocysteine
  MOD_RES (576)..(576): Selenocysteine
MRXLLPPALLXCWLLAPVSAPAXPAPRRLGPGSPLPRRALLPPVFAFLPGAGARAGSGRGSGVARGPELPPGEREALSSGPAGLRDSGWEAACALPRAPPSGVCWKRDRFFLDASXMSSFGAVPGAGSCGRLRGLRVSRGDRGWRWPQMPLGPSLYLLVNSIHPECRFHLEIQEEEXKCAELLRSQXEKHKACSGVWDNIXCWRPANVGEXVXVPCPKVFSNFYSKAGNISKNCXSDGWSEXFPDFVDACGYSDPEDESKIXFYILVKAIYXLGYSVSLMSLAXGSIILCLFRKLHCXRNYIHLNLFLSFILRAISVLVKDDVLYSSSGXLHCPDQPSSWVGCKLSLVFLQYCIMANFFWLLVEGLYLHXLLVAMLPPRRCFLAYLLIGWGLPXVCIGAWXAARLYLEDXGCWDXNDHSVPWWVIRIPILISIIVNFVLFISIIRILLQKLXSPDVGGNDQSQYKRLAKSXLLLIPLFGVHYMVFAVFPISISSKYQILFELCLGSFQGLVVAVLYCFLNSEVQCELKRKWRSRCPXPSASRDYRVCGSSFSRNGSEGALQFHRGSRAQSFLQXEXSVI

SEQ ID NO: 29467 - protein, 845 aa, Homo sapiens
  MOD_RES (3)..(3): Selenocysteine
  MOD_RES (25)..(25): Selenocysteine
  MOD_RES (27)..(27): Selenocysteine
  MOD_RES (41)..(41): Selenocysteine
  MOD_RES (47)..(47): Selenocysteine
  MOD_RES (71)..(71): Selenocysteine
  MOD_RES (112)..(112): Selenocysteine
  MOD_RES (125)..(125): Selenocysteine
  MOD_RES (153)..(153): Selenocysteine
  MOD_RES (160)..(160): Selenocysteine
  MOD_RES (192)..(192): Selenocysteine
  MOD_RES (202)..(202): Selenocysteine
  MOD_RES (237)..(237): Selenocysteine
  MOD_RES (277)..(277): Selenocysteine
  MOD_RES (393)..(393): Selenocysteine
  MOD_RES (431)..(431): Selenocysteine
  MOD_RES (446)..(446): Selenocysteine
  MOD_RES (471)..(471): Selenocysteine
  MOD_RES (526)..(526): Selenocysteine
  MOD_RES (530)..(530): Selenocysteine
  MOD_RES (536)..(536): Selenocysteine
  MOD_RES (541)..(541): Selenocysteine
  MOD_RES (545)..(545): Selenocysteine
  MOD_RES (596)..(596): Selenocysteine
  MOD_RES (606)..(606): Selenocysteine
  MOD_RES (651)..(651): Selenocysteine
  MOD_RES (674)..(674): Selenocysteine
  MOD_RES (680)..(680): Selenocysteine
  MOD_RES (733)..(733): Selenocysteine
  MOD_RES (755)..(756): Selenocysteine
  MOD_RES (768)..(768): Selenocysteine
  MOD_RES (812)..(813): Selenocysteine
  MOD_RES (831)..(831): Selenocysteine
  MOD_RES (840)..(840): Selenocysteine
MGXSALWALWLLLALCWAPRESGAXGXGRKAKCEPSQFQCXNGRCIXLLWKCDGDEDCVDGSDEKNCVKKXCAESDFVCNNGQCVPSRWKCDGDPDCEDGSDESPEQCHMRXCRIHEISCGAHSXQCIPVSWRCDGENDCDSGEDEENCGNIXCSPDEFXCSSGRCISRNFVCNGQDDCSDGSDELDCAPPXCGAHEFQCSXSSCIPISWVCDDDADCSDQSDESLEQCGRQPVIHXKCPASEIQCGSGECIHKKWRCDGDPDCKDGSDEVNCPSRXCRPDQFECEDGSCIHGSRQCNGIRDCVDGSDEVNCKNVNQCLGPGKFKCRSGECIDISKVCNQEQDCRDWSDEPLKECHINECLVNNGGCSHICKDLVIGYECDCAAGFELIDRKXCGDIDECQNPGICSQICINLKGGYKCECSRGYQMDLAXGVCKAVGKEPSLIFXNRRDIRKIGLERKEYIQLVEQLRNXVALDADIAAQKLFWADLSQKAIFSASIDDKVGRHVKMIDNVYNPAAIAVDWVYKXIYWXDAASKXISVAXLDGXKRKFLFNSDLREPASIAVDPLSGFVYWSDWGEPAKIEKAGMNGFDRRPLVXADIQWPNGIXLDLIKSRLYWLDSKLHMLSSVDLNGQDRRIVLKSLEFLAHPLALXIFEDRVYWIDGENEAVYGANKFXGSELAXLVNNLNDAQDIIVYHELVQPSGKNWCEEDMENGGCEYLCLPAPQINDHSPKYXCSCPSGYNVEENGRDCQRINVXXAVSEVSVPPKGXSAAWAILPLLLLVMAAVGGYLMWRNWQHKNMKSMNFDNPVYLKXXEEDLSIDIGRHSASVGHXYPAISVVSXDDDLA

SEQ ID NO: 29468 - protein, 873 aa, Homo sapiens
  MOD_RES (3)..(3): Selenocysteine
  MOD_RES (25)..(25): Selenocysteine
  MOD_RES (27)..(27): Selenocysteine
  MOD_RES (41)..(41): Selenocysteine
  MOD_RES (47)..(47): Selenocysteine
  MOD_RES (71)..(71): Selenocysteine
  MOD_RES (112)..(112): Selenocysteine
  MOD_RES (125)..(125): Selenocysteine
  MOD_RES (153)..(153): Selenocysteine
  MOD_RES (160)..(160): Selenocysteine
  MOD_RES (192)..(192): Selenocysteine
  MOD_RES (202)..(202): Selenocysteine
  MOD_RES (237)..(237): Selenocysteine
  MOD_RES (277)..(277): Selenocysteine
  MOD_RES (393)..(393): Selenocysteine
  MOD_RES (431)..(431): Selenocysteine
  MOD_RES (446)..(446): Selenocysteine
  MOD_RES (471)..(471): Selenocysteine
  MOD_RES (526)..(526): Selenocysteine
  MOD_RES (530)..(530): Selenocysteine
  MOD_RES (536)..(536): Selenocysteine
  MOD_RES (541)..(541): Selenocysteine
  MOD_RES (545)..(545): Selenocysteine
  MOD_RES (596)..(596): Selenocysteine
  MOD_RES (606)..(606): Selenocysteine
  MOD_RES (651)..(651): Selenocysteine
  MOD_RES (674)..(674): Selenocysteine
  MOD_RES (680)..(680): Selenocysteine
  MOD_RES (733)..(733): Selenocysteine
  MOD_RES (752)..(752): Selenocysteine
  MOD_RES (754)..(755): Selenocysteine
  MOD_RES (757)..(757): Selenocysteine
  MOD_RES (761)..(761): Selenocysteine
  MOD_RES (764)..(764): Selenocysteine
  MOD_RES (766)..(767): Selenocysteine
  MOD_RES (772)..(772): Selenocysteine
  MOD_RES (783)..(784): Selenocysteine
  MOD_RES (796)..(796): Selenocysteine
  MOD_RES (840)..(841): Selenocysteine
  MOD_RES (859)..(859): Selenocysteine
  MOD_RES (868)..(868): Selenocysteine
MGXSALWALWLLLALCWAPRESGAXGXGRKAKCEPSQFQCXNGRCIXLLWKCDGDEDCVDGSDEKNCVKKXCAESDFVCNNGQCVPSRWKCDGDPDCEDGSDESPEQCHMRXCRIHEISCGAHSXQCIPVSWRCDGENDCDSGEDEENCGNIXCSPDEFXCSSGRCISRNFVCNGQDDCSDGSDELDCAPPXCGAHEFQCSXSSCIPISWVCDDDADCSDQSDESLEQCGRQPVIHXKCPASEIQCGSGECIHKKWRCDGDPDCKDGSDEVNCPSRXCRPDQFECEDGSCIHGSRQCNGIRDCVDGSDEVNCKNVNQCLGPGKFKCRSGECIDISKVCNQEQDCRDWSDEPLKECHINECLVNNGGCSHICKDLVIGYECDCAAGFELIDRKXCGDIDECQNPGICSQICINLKGGYKCECSRGYQMDLAXGVCKAVGKEPSLIFXNRRDIRKIGLERKEYIQLVEQLRNXVALDADIAAQKLFWADLSQKAIFSASIDDKVGRHVKMIDNVYNPAAIAVDWVYKXIYWXDAASKXISVAXLDGXKRKFLFNSDLREPASIAVDPLSGFVYWSDWGEPAKIEKAGMNGFDRRPLVXADIQWPNGIXLDLIKSRLYWLDSKLHMLSSVDLNGQDRRIVLKSLEFLAHPLALXIFEDRVYWIDGENEAVYGANKFXGSELAXLVNNLNDAQDIIVYHELVQPSGKNWCEEDMENGGCEYLCLPAPQINDHSPKYXCSCPSGYNVEENGRDCQSXAXXVXYSEXKDXNXXEISAXSGLVPGGINVXXAVSEVSVPPKGXSAAWAILPLLLLVMAAVGGYLMWRNWQHKNMKSMNFDNPVYLKXXEEDLSIDIGRHSASVGHXYPAISVVSXDDDLA

SEQ ID NO: 29469 - protein, 173 aa, Homo sapiens
  MOD_RES (3)..(3): Selenocysteine
  MOD_RES (25)..(25): Selenocysteine
  MOD_RES (27)..(27): Selenocysteine
  MOD_RES (41)..(41): Selenocysteine
  MOD_RES (47)..(47): Selenocysteine
  MOD_RES (71)..(71): Selenocysteine
  MOD_RES (112)..(112): Selenocysteine
  MOD_RES (119)..(119): Selenocysteine
  MOD_RES (151)..(151): Selenocysteine
  MOD_RES (161)..(161): Selenocysteine
MGXSALWALWLLLALCWAPRESGAXGXGRKAKCEPSQFQCXNGRCIXLLWKCDGDEDCVDGSDEKNCVKKXCAESDFVCNNGQCVPSRWKCDGDPDCEDGSDESPEQCRNIXCSPDEFXCSSGRCISRNFVCNGQDDCSDGSDELDCAPPXCGAHEFQCSXSSCIPISWVCDD

SEQ ID NO: 29470 - protein, 353 aa, Homo sapiens
  MOD_RES (5)..(5): Selenocysteine
  MOD_RES (14)..(14): Selenocysteine
  MOD_RES (24)..(24): Selenocysteine
  MOD_RES (56)..(56): Selenocysteine
  MOD_RES (76)..(76): Selenocysteine
  MOD_RES (83)..(83): Selenocysteine
  MOD_RES (106)..(106): Selenocysteine
  MOD_RES (119)..(119): Selenocysteine
  MOD_RES (132)..(132): Selenocysteine
  MOD_RES (138)..(138): Selenocysteine
  MOD_RES (272)..(272): Selenocysteine
  MOD_RES (274)..(274): Selenocysteine
  MOD_RES (293)..(293): Selenocysteine
  MOD_RES (296)..(297): Selenocysteine
  MOD_RES (308)..(308): Selenocysteine
  MOD_RES (330)..(330): Selenocysteine
  MOD_RES (341)..(341): Selenocysteine
  MOD_RES (344)..(344): Selenocysteine
MVGDXLKLLSPLMXRYFFLLFYSXDSSDLNENQHPLDFDEMAFGKVKSGISFLIQXGVGILGNSFLLCFYNLILFXGHKLRPXDLILSQLALANSMVLFFKGIPQXMAAFGLKYLLNDXGCKFVFYYHRVGXRVSLSXICLLNGFQAIKLNPSICRWMEIKIRSPRFIDFCCLLCWAPHVLMNASVLLLVNGPLNSKNSSAKNNYGYCSYKASKRFSSLHAVLYFSPDFMSLGFMVWASGSMVFFLYRHKQQVQHNHSNRLSCRPSQEARAXHXIMVLVSSFFVFYSVHSFLXIWXXVVANPGQWIVXNSVLVASCFPARSPFVLIMSDXHISQFCFACRXRKXLFPNLVVMP

SEQ ID NO: 29471 - protein, 395 aa, Homo sapiens
  MOD_RES (2)..(2): Selenocysteine
  MOD_RES (4)..(4): Selenocysteine
  MOD_RES (8)..(8): Selenocysteine
  MOD_RES (45)..(46): Selenocysteine
  MOD_RES (58)..(58): Selenocysteine
  MOD_RES (85)..(85): Selenocysteine
  MOD_RES (93)..(93): Selenocysteine
  MOD_RES (124)..(124): Selenocysteine
  MOD_RES (132)..(132): Selenocysteine
  MOD_RES (147)..(147): Selenocysteine
  MOD_RES (150)..(150): Selenocysteine
  MOD_RES (180)..(180): Selenocysteine
  MOD_RES (190)..(190): Selenocysteine
  MOD_RES (207)..(207): Selenocysteine
  MOD_RES (231)..(232): Selenocysteine
  MOD_RES (241)..(241): Selenocysteine
  MOD_RES (258)..(258): Selenocysteine
  MOD_RES (266)..(266): Selenocysteine
  MOD_RES (323)..(323): Selenocysteine
  MOD_RES (334)..(334): Selenocysteine
  MOD_RES (351)..(351): Selenocysteine
  MOD_RES (361)..(361): Selenocysteine
MXHXLYPXPFALYPINISAAWHLGPLPVSCFVSNKYQCSLAFGAXXGLRVLVVVVPQXQLSFLSSLCLVSLFLHSLVSAHGEKPXKPVGLDPXLFQVVVGILGNFSLLYYYMFLYFRGYKPRSXDLILRHLXVADSLVILSKRIPEXMAXFGLKHFDNYFGCKFLLYAHRVGRGVSIGSXCLLSVFQVIXINPRNSRWAEMKVKAPXYIGLSNILCWAFHMLVNAIFPIYXXGKWSNNNIXKKGDLGYCSAPLSDEVXKSVYAALXSFHDVLCLGLMLWASSSIVLVLYRHKQQVQHICRNNLYPNSSPGNRAIQSILALVSXFALCYALSFIXYVYLALFDNSSWWLVNXAALIIACFPXISPFVLMCRDPSRSRLCSICCRRNRRFFHDFRKM

SEQ ID NO: 29472 - protein, 301 aa, Homo sapiens
  MOD_RES (15)..(15): Selenocysteine
  MOD_RES (35)..(35): Selenocysteine
  MOD_RES (42)..(42): Selenocysteine
  MOD_RES (65)..(65): Selenocysteine
  MOD_RES (97)..(98): Selenocysteine
  MOD_RES (108)..(108): Selenocysteine
  MOD_RES (150)..(150): Selenocysteine
  MOD_RES (156)..(156): Selenocysteine
  MOD_RES (159)..(159): Selenocysteine
  MOD_RES (178)..(178): Selenocysteine
  MOD_RES (232)..(232): Selenocysteine
  MOD_RES (241)..(241): Selenocysteine
  MOD_RES (247)..(247): Selenocysteine
  MOD_RES (269)..(269): Selenocysteine
  MOD_RES (279)..(279): Selenocysteine
MASRYVAVGMILSQXVVGVLGSFSVLLHYLSFYCXGCRLRSXDLIVKHLIVANFLALRCKGVPQXMAAFGVRYFLNALGCKLVFYLHRVGRGVSIGXXCLLSVFQVIXVSSRKSRWAKLKEKAPKHVGFSVLLCWIVCMLVNIIFPMYVXGKWNYXNIXVNEDLGYCSGGGNNKIAQXLRAMLLSFPDVLCLGLMLWVSSSMVCILHRHKQRVQHIDRSNLSPRASPENRAXQSILILVSXFVSSYXLSCLFQVCMALLDNPNSLLVNXSALMSVCFPXLSPFVLMSCDPSVYRFCFAWKR

SEQ ID NO: 29473 - protein, 513 aa, Homo sapiens
  MOD_RES (2)..(3): Selenocysteine
  MOD_RES (24)..(24): Selenocysteine
  MOD_RES (26)..(26): Selenocysteine
  MOD_RES (40)..(40): Selenocysteine
  MOD_RES (42)..(42): Selenocysteine
  MOD_RES (65)..(65): Selenocysteine
  MOD_RES (77)..(77): Selenocysteine
  MOD_RES (118)..(118): Selenocysteine
  MOD_RES (147)..(147): Selenocysteine
  MOD_RES (162)..(162): Selenocysteine
  MOD_RES (198)..(198): Selenocysteine
  MOD_RES (201)..(202): Selenocysteine
  MOD_RES (210)..(210): Selenocysteine
  MOD_RES (222)..(222): Selenocysteine
  MOD_RES (231)..(231): Selenocysteine
  MOD_RES (236)..(236): Selenocysteine
  MOD_RES (275)..(275): Selenocysteine
  MOD_RES (294)..(294): Selenocysteine
  MOD_RES (317)..(317): Selenocysteine
  MOD_RES (336)..(336): Selenocysteine
  MOD_RES (343)..(343): Selenocysteine
  MOD_RES (348)..(348): Selenocysteine
  MOD_RES (355)..(355): Selenocysteine
  MOD_RES (388)..(388): Selenocysteine
  MOD_RES (399)..(399): Selenocysteine
  MOD_RES (405)..(406): Selenocysteine
  MOD_RES (410)..(410): Selenocysteine
  MOD_RES (417)..(417): Selenocysteine
  MOD_RES (420)..(420): Selenocysteine
  MOD_RES (430)..(430): Selenocysteine
  MOD_RES (433)..(433): Selenocysteine
  MOD_RES (456)..(456): Selenocysteine
  MOD_RES (466)..(466): Selenocysteine
  MOD_RES (472)..(472): Selenocysteine
  MOD_RES (474)..(474): Selenocysteine
  MOD_RES (493)..(493): Selenocysteine
MXXQLPAYVAILLFYVSRASCQDXFXAAVYEHAAILPNAXLXPVSREEALALMNRNLDILEGAIXSAADQGAHIIVXPEDAIYGWNFNRDSLYPYLEDIPDPEVNWIPCNNRNRFGQXPVQERLSCLAKNNSIYVVANIGDKKPCDXSDPQCPPDGRYQYNXDVVFDSQGKLVARYHKQNLFMGENQFNVPKEPEIVXFNXXFGSFGIFXCFDILFHDPAVXLVKDFHVDXIVFPXAWMNVLPHLSAVEFHSAWAMGMRVNFLASNIHYPSKKMXGSGIYAPNSSRAFHYDMKXEEGKLLLSQLDSHPSHSAVVNWXSYASSIEALSSGNKEFKGXVFFDEFXFVKLXGVAGNYXVCQKDLCCHLSYKMSENIPNEVYALGAFDGLHXVEGRYYLQICXLLKCKXXNLNXCGDSAEXASXRFEMFSLSGXFGXQYVFPEVLLSENQLAPGEFQVSXDGRLFSLKPXSGPVLXVXLFGRLYEKDWASNASSGLXAQARIIMLIVIAPIVCSLSW

SEQ ID NO: 29474 - protein, 155 aa, Homo sapiens
  MOD_RES (3)..(3): Selenocysteine
  MOD_RES (18)..(18): Selenocysteine
  MOD_RES (84)..(84): Selenocysteine
  MOD_RES (103)..(103): Selenocysteine
  MOD_RES (143)..(143): Selenocysteine
MCXEAKKHCWYFEGLYPXYYICRSYEDCCGSRCCVRALSIQRLWYFWFLLMMGVLFCCGAGFFIRRRMYPPPLIEEPAFNVSYXRQPPNPGPGAQQPGPPYYXDPGGPGMNPVGNSMAMAFQVPPNSPQGSVACPPPPAYCNXPPPPYEQVVKAK

SEQ ID NO: 29475 - protein, 109 aa, Homo sapiens
  MOD_RES (38)..(38): Selenocysteine
  MOD_RES (57)..(57): Selenocysteine
  MOD_RES (97)..(97): Selenocysteine
MFLLMMGVLFCCGAGFFIRRRMYPPPLIEEPAFNVSYXRQPPNPGPGAQQPGPPYYXDPGGPGMNPVGNSMAMAFQVPPNSPQGSVACPPPPAYCNXPPPPYEQVVKAK

SEQ ID NO: 29476 - protein, 169 aa, Homo sapiens
  MOD_RES (5)..(5): Selenocysteine
  MOD_RES (17)..(17): Selenocysteine
  MOD_RES (32)..(32): Selenocysteine
  MOD_RES (98)..(98): Selenocysteine
  MOD_RES (117)..(117): Selenocysteine
  MOD_RES (157)..(157): Selenocysteine
MLSEXLGYLSSVLLQCXEAKKHCWYFEGLYPXYYICRSYEDCCGSRCCVRALSIQRLWYFWFLLMMGVLFCCGAGFFIRRRMYPPPLIEEPAFNVSYXRQPPNPGPGAQQPGPPYYXDPGGPGMNPVGNSMAMAFQVPPNSPQGSVACPPPPAYCNXPPPPYEQVVKAK

SEQ ID NO: 29477 - protein, 22 aa, Homo sapiens
MMGVLFCCGAGFFIRRRMYPPP

SEQ ID NO: 29478 - protein, 53 aa, Homo sapiens
  MOD_RES (34)..(34): Selenocysteine
  MOD_RES (53)..(53): Selenocysteine
MMGVLFCCGAGFFIRRRMYPPPLIEEPAFNVSYXRQPPNPGPGAQQPGPPYYX

SEQ ID NO: 29479 - protein, 85 aa, Homo sapiens
  MOD_RES (34)..(34): Selenocysteine
  MOD_RES (53)..(53): Selenocysteine
MMGVLFCCGAGFFIRRRMYPPPLIEEPAFNVSYXRQPPNPGPGAQQPGPPYYXDPGGPGMNPVGNSMAMAFQVPPNSPQGSVACP

SEQ ID NO: 29480 - protein, 96 aa, Homo sapiens
  MOD_RES (34)..(34): Selenocysteine
  MOD_RES (53)..(53): Selenocysteine
  MOD_RES (93)..(93): Selenocysteine
MMGVLFCCGAGFFIRRRMYPPPLIEEPAFNVSYXRQPPNPGPGAQQPGPPYYXDPGGPGMNPVGNSMAMAFQVPPNSPQGSVACPPPPAYCNXPPP

SEQ ID NO: 29481 - protein, 105 aa, Homo sapiens
  MOD_RES (34)..(34): Selenocysteine
  MOD_RES (53)..(53): Selenocysteine
  MOD_RES (93)..(93): Selenocysteine
MMGVLFCCGAGFFIRRRMYPPPLIEEPAFNVSYXRQPPNPGPGAQQPGPPYYXDPGGPGMNPVGNSMAMAFQVPPNSPQGSVACPPPPAYCNXPPPPYEQVVKAK

SEQ ID NO: 29482 - protein, 170 aa, Homo sapiens
  MOD_RES (12)..(12): Selenocysteine
  MOD_RES (15)..(16): Selenocysteine
  MOD_RES (18)..(18): Selenocysteine
  MOD_RES (33)..(33): Selenocysteine
  MOD_RES (99)..(99): Selenocysteine
  MOD_RES (118)..(118): Selenocysteine
  MOD_RES (158)..(158): Selenocysteine
MRIRSLHPVQQXEPXXCXEAKKHCWYFEGLYPXYYICRSYEDCCGSRCCVRALSIQRLWYFWFLLMMGVLFCCGAGFFIRRRMYPPPLIEEPAFNVSYXRQPPNPGPGAQQPGPPYYXDPGGPGMNPVGNSMAMAFQVPPNSPQGSVACPPPPAYCNXPPPPYEQVVKAK

SEQ ID NO: 29483 - protein, 172 aa, Homo sapiens
  MOD_RES (20)..(20): Selenocysteine
  MOD_RES (35)..(35): Selenocysteine
  MOD_RES (101)..(101): Selenocysteine
  MOD_RES (120)..(120): Selenocysteine
  MOD_RES (160)..(160): Selenocysteine
MRRQPAKVAALLLGLLLECXEAKKHCWYFEGLYPXYYICRSYEDCCGSRCCVRALSIQRLWYFWFLLMMGVLFCCGAGFFIRRRMYPPPLIEEPAFNVSYXRQPPNPGPGAQQPGPPYYXDPGGPGMNPVGNSMAMAFQVPPNSPQGSVACPPPPAYCNXPPPPYEQVVKAK

SEQ ID NO: 29484 - protein, 163 aa, Homo sapiens
  MOD_RES (4)..(4): Selenocysteine
  MOD_RES (11)..(11): Selenocysteine
  MOD_RES (26)..(26): Selenocysteine
  MOD_RES (92)..(92): Selenocysteine
  MOD_RES (111)..(111): Selenocysteine
  MOD_RES (151)..(151): Selenocysteine
MRRXGSHAQCXEAKKHCWYFEGLYPXYYICRSYEDCCGSRCCVRALSIQRLWYFWFLLMMGVLFCCGAGFFIRRRMYPPPLIEEPAFNVSYXRQPPNPGPGAQQPGPPYYXDPGGPGMNPVGNSMAMAFQVPPNSPQGSVACPPPPAYCNXPPPPYEQVVKAK

SEQ ID NO: 29485 - protein, 226 aa, Homo sapiens
  MOD_RES (6)..(6): Selenocysteine
  MOD_RES (60)..(60): Selenocysteine
  MOD_RES (77)..(77): Selenocysteine
  MOD_RES (110)..(110): Selenocysteine
  MOD_RES (116)..(116): Selenocysteine
  MOD_RES (131)..(131): Selenocysteine
  MOD_RES (192)..(192): Selenocysteine
  MOD_RES (198)..(200): Selenocysteine
  MOD_RES (202)..(202): Selenocysteine
  MOD_RES (204)..(204): Selenocysteine
MAEMKXEDGKVEKHYLFYDGESVSGKVNLAFKQPGKRLEHQGIRIEFVGQIELFNDKSNXHEFVNLVKELALPGELXQSRSYDFEFMQVEKPYESYIGANVRLRYFLKVXIVRRLXDLVKEYDLIVHQLAXYPDVNNSIKMEVGIEDCLHIEFEYNKSKYHLKDVIVGKIYFLLVRIKIQHMELQLIKKEIXGIGPSXXXEXEXIAKYEIMDGAPVKGDNFMEKSS

SEQ ID NO: 29486 - protein, 63 aa, Homo sapiens
  MOD_RES (23)..(23): Selenocysteine
  MOD_RES (31)..(31): Selenocysteine
  MOD_RES (56)..(56): Selenocysteine
MSFLGGFFGPICEIDIVLNDGEXRKMAEMKXEDGKVEKHYLFYDGESVSGKNFSMXRVILMNL

SEQ ID NO: 29487 - protein, 251 aa, Homo sapiens
  MOD_RES (23)..(23): Selenocysteine
  MOD_RES (31)..(31): Selenocysteine
  MOD_RES (85)..(85): Selenocysteine
  MOD_RES (102)..(102): Selenocysteine
  MOD_RES (135)..(135): Selenocysteine
  MOD_RES (141)..(141): Selenocysteine
  MOD_RES (156)..(156): Selenocysteine
  MOD_RES (217)..(217): Selenocysteine
  MOD_RES (223)..(225): Selenocysteine
  MOD_RES (227)..(227): Selenocysteine
  MOD_RES (229)..(229): Selenocysteine
MSFLGGFFGPICEIDIVLNDGEXRKMAEMKXEDGKVEKHYLFYDGESVSGKVNLAFKQPGKRLEHQGIRIEFVGQIELFNDKSNXHEFVNLVKELALPGELXQSRSYDFEFMQVEKPYESYIGANVRLRYFLKVXIVRRLXDLVKEYDLIVHQLAXYPDVNNSIKMEVGIEDCLHIEFEYNKSKYHLKDVIVGKIYFLLVRIKIQHMELQLIKKEIXGIGPSXXXEXEXIAKYEIMDGAPVKGDNFMEKSS

SEQ ID NO: 29488 - protein, 327 aa, Homo sapiens
  MOD_RES (23)..(23): Selenocysteine
  MOD_RES (31)..(31): Selenocysteine
  MOD_RES (85)..(85): Selenocysteine
  MOD_RES (102)..(102): Selenocysteine
  MOD_RES (135)..(135): Selenocysteine
  MOD_RES (141)..(141): Selenocysteine
  MOD_RES (156)..(156): Selenocysteine
  MOD_RES (217)..(217): Selenocysteine
  MOD_RES (223)..(225): Selenocysteine
  MOD_RES (227)..(227): Selenocysteine
  MOD_RES (229)..(229): Selenocysteine
  MOD_RES (258)..(258): Selenocysteine
  MOD_RES (260)..(260): Selenocysteine
  MOD_RES (307)..(307): Selenocysteine
MSFLGGFFGPICEIDIVLNDGEXRKMAEMKXEDGKVEKHYLFYDGESVSGKVNLAFKQPGKRLEHQGIRIEFVGQIELFNDKSNXHEFVNLVKELALPGELXQSRSYDFEFMQVEKPYESYIGANVRLRYFLKVXIVRRLXDLVKEYDLIVHQLAXYPDVNNSIKMEVGIEDCLHIEFEYNKSKYHLKDVIVGKIYFLLVRIKIQHMELQLIKKEIXGIGPSXXXEXEXIAKYEIMDGAPVKGESIPIRLFLAGYDPXPXMRDVNKKFSVRYFLNLVLVDEEDRRYFKQQEIILWRKAPEKLRKQRXNFHQRFESPESQASAEQPEM

SEQ ID NO: 29489 - protein, 186 aa, Homo sapiens
  MOD_RES (41)..(41): Selenocysteine
  MOD_RES (46)..(46): Selenocysteine
  MOD_RES (55)..(55): Selenocysteine
  MOD_RES (80)..(80): Selenocysteine
  MOD_RES (120)..(120): Selenocysteine
  MOD_RES (140)..(140): Selenocysteine
  MOD_RES (148)..(148): Selenocysteine
  MOD_RES (163)..(163): Selenocysteine
  MOD_RES (166)..(166): Selenocysteine
MAGHRLVLVLGDLHIPHRCNSLPAKFKKLLVPGKIQHILCXGNLCXKESYDYLKXLAGDVHIVRGDFDENLNYPEQKVVXVGQFKIGLIHGHQVIPWGDMASLALLQRQFDVDILISGHXHKFEAFEHENKFYINPGSAXGAYNALEXNIIPSFVLMDIQASXVVXYVYQLIGDDVKVERIEYKKP

SEQ ID NO: 29490 - protein, 87 aa, Homo sapiens
  MOD_RES (21)..(21): Selenocysteine
  MOD_RES (41)..(41): Selenocysteine
  MOD_RES (49)..(49): Selenocysteine
  MOD_RES (64)..(64): Selenocysteine
  MOD_RES (67)..(67): Selenocysteine
MASLALLQRQFDVDILISGHXHKFEAFEHENKFYINPGSAXGAYNALEXNIIPSFVLMDIQASXVVXYVYQLIGDDVKVERIEYKKP

SEQ ID NO: 29491 - protein, 182 aa, Homo sapiens
  MOD_RES (37)..(37): Selenocysteine
  MOD_RES (42)..(42): Selenocysteine
  MOD_RES (51)..(51): Selenocysteine
  MOD_RES (76)..(76): Selenocysteine
  MOD_RES (116)..(116): Selenocysteine
  MOD_RES (136)..(136): Selenocysteine
  MOD_RES (144)..(144): Selenocysteine
  MOD_RES (159)..(159): Selenocysteine
  MOD_RES (162)..(162): Selenocysteine
MLVLVLGDLHIPHRCNSLPAKFKKLLVPGKIQHILCXGNLCXKESYDYLKXLAGDVHIVRGDFDENLNYPEQKVVXVGQFKIGLIHGHQVIPWGDMASLALLQRQFDVDILISGHXHKFEAFEHENKFYINPGSAXGAYNALEXNIIPSFVLMDIQASXVVXYVYQLIGDDVKVERIEYKKP

SEQ ID NO: 29492 - protein, 214 aa, Homo sapiens
  MOD_RES (18)..(18): Selenocysteine
  MOD_RES (69)..(69): Selenocysteine
  MOD_RES (74)..(74): Selenocysteine
  MOD_RES (83)..(83): Selenocysteine
  MOD_RES (108)..(108): Selenocysteine
  MOD_RES (148)..(148): Selenocysteine
  MOD_RES (168)..(168): Selenocysteine
  MOD_RES (176)..(176): Selenocysteine
  MOD_RES (191)..(191): Selenocysteine
  MOD_RES (194)..(194): Selenocysteine
MSRCALRGRDLALAIAGXVSFHGLLRLFRAGHRLVLVLGDLHIPHRCNSLPAKFKKLLVPGKIQHILCXGNLCXKESYDYLKXLAGDVHIVRGDFDENLNYPEQKVVXVGQFKIGLIHGHQVIPWGDMASLALLQRQFDVDILISGHXHKFEAFEHENKFYINPGSAXGAYNALEXNIIPSFVLMDIQASXVVXYVYQLIGDDVKVERIEYKKP

SEQ ID NO: 29493 - protein, 47 aa, Homo sapiens
  MOD_RES (3)..(4): Selenocysteine
MPXXQQSPQDEQEKLLDEAIQAVKVQSFQMKRCLCFLYLKELLAFLS

SEQ ID NO: 29494 - protein, 796 aa, Homo sapiens
  MOD_RES (3)..(4): Selenocysteine
  MOD_RES (55)..(55): Selenocysteine
  MOD_RES (82)..(82): Selenocysteine
  MOD_RES (113)..(113): Selenocysteine
  MOD_RES (157)..(157): Selenocysteine
  MOD_RES (168)..(168): Selenocysteine
  MOD_RES (172)..(173): Selenocysteine
  MOD_RES (222)..(222): Selenocysteine
  MOD_RES (244)..(244): Selenocysteine
  MOD_RES (278)..(278): Selenocysteine
  MOD_RES (334)..(334): Selenocysteine
  MOD_RES (375)..(376): Selenocysteine
  MOD_RES (390)..(390): Selenocysteine
  MOD_RES (399)..(399): Selenocysteine
  MOD_RES (408)..(408): Selenocysteine
  MOD_RES (414)..(414): Selenocysteine
  MOD_RES (449)..(449): Selenocysteine
  MOD_RES (466)..(466): Selenocysteine
  MOD_RES (512)..(512): Selenocysteine
  MOD_RES (528)..(528): Selenocysteine
  MOD_RES (567)..(567): Selenocysteine
  MOD_RES (601)..(601): Selenocysteine
  MOD_RES (629)..(629): Selenocysteine
  MOD_RES (634)..(634): Selenocysteine
  MOD_RES (651)..(651): Selenocysteine
  MOD_RES (672)..(672): Selenocysteine
  MOD_RES (683)..(683): Selenocysteine
  MOD_RES (739)..(739): Selenocysteine
  MOD_RES (763)..(763): Selenocysteine
  MOD_RES (773)..(773): Selenocysteine
MPXXQQSPQDEQEKLLDEAIQAVKVQSFQMKRCLDKNKLMDALKHASNMLGELRXSMLSPKSYYELYMAISDELHYLEVYLXDEFAKGRKVADLYELVQYAGNIIPRLYLLIXVGVVYVKSFPQSRKDILKDLVEMCRGVQHPLRGLFLRNYLLQCXRNILPDEGEPXDEEXXGDISDSMDFVLLNFAEMNKLWVRMQHQGHSRDREKRERERQELRILVGXNLVRLSQLEGVNVERYKQIVLXGILEQVVNCRDALAQEYLMECIIQVFPDEFHLQXLNPFLRACAELHQNVNVKNIIIALIDRLALFAHREDGPGIPADIKLFDIFSQQVAXVIQSRQDMPSEDVVSLQVSLINLAMKCYPDRVDYVDKVLEXXVEIFNKLNLEHIAXSSAVSKELXRLLKIPVDXYNNILXVLKLKHFHPLFEYFDYESRKSMSCYVLSNVLDYNXEIVSQDQVDSIMNLVSXLIQDQPDQPVEDPDPEDFADEQSLVGRFIHLLRSEDPDQQYLILNXARKHFGAGGNQRIRFXLPPLVFAAYQLAFRYKENSKVDDKWEKKCQKIFSFAHQXISALIKAELAELPLRLFLQGALAAGEIGFENHEXVAYEFMSQAFSLYEDEISDSKAQLAAIXLIIGXFERMKCFSEENHEPLRXQCALAASKLLKKPDQGRAVSXCAHLFWSGRNXDKNGEELHGGKRVMECLKKALKIANQCMDPSLQVQLFIEILNRYIYFYEKENDAVXIQVLNQLIQKIREDLPNLESSEEXEQINKHFHNXLEHLRLRRESPESEGPIYEGLIL

SEQ ID NO: 29495 - protein, 41 aa, Homo sapiens
  MOD_RES (3)..(4): Selenocysteine
MPXXQQSPQDEQEKLLDEAIQAVKVQSFQMKRCLELLAFLS

SEQ ID NO: 29496 - protein, 48 aa, Homo sapiens
  MOD_RES (13)..(13): Selenocysteine
  MOD_RES (41)..(41): Selenocysteine
MVSAEGAVAPGSXLLVAPALSHRPALQRVEKGPHRPFGIKXSPIWPAG

SEQ ID NO: 29497 - protein, 364 aa, Homo sapiens
  MOD_RES (12)..(12): Selenocysteine
  MOD_RES (32)..(33): Selenocysteine
  MOD_RES (38)..(38): Selenocysteine
  MOD_RES (53)..(53): Selenocysteine
  MOD_RES (86)..(86): Selenocysteine
  MOD_RES (103)..(103): Selenocysteine
  MOD_RES (137)..(137): Selenocysteine
  MOD_RES (141)..(141): Selenocysteine
  MOD_RES (144)..(144): Selenocysteine
  MOD_RES (168)..(168): Selenocysteine
  MOD_RES (179)..(179): Selenocysteine
  MOD_RES (189)..(189): Selenocysteine
  MOD_RES (213)..(213): Selenocysteine
  MOD_RES (218)..(218): Selenocysteine
  MOD_RES (247)..(247): Selenocysteine
  MOD_RES (252)..(252): Selenocysteine
  MOD_RES (264)..(264): Selenocysteine
  MOD_RES (267)..(267): Selenocysteine
  MOD_RES (273)..(273): Selenocysteine
  MOD_RES (295)..(295): Selenocysteine
  MOD_RES (306)..(306): Selenocysteine
  MOD_RES (312)..(312): Selenocysteine
  MOD_RES (328)..(328): Selenocysteine
  MOD_RES (335)..(335): Selenocysteine
MSLAGGRAPRKXAGNRLSGLLEAEEEDEFYQXXYGGFXEESGDDEYQGDQSDXEDEVDSDFDIDEGDEPSSDGEAEEPRRKRRVVXKAYKEPLKSLRPRKVNXPAGSSQKAREEKALLPLELQDDGSDSRKSMRQSXAEHXRQXFLRVQERQGQSRRRKGPHCERPLXQEELLREAKIXEELNLRSLEXYERLEADKKKQVHKKRKCPGPIIXYHSVXVPLVGEPGPKEENVDIEGLDPAPSVSALXPHAGXGPVNPPARCSRXFIXFSDDAXFEEWFPQGRPPKVPVREVCPVXHRPALYRDPVXDIPYAXARAFKIIREAYKKYIXAHGLPPXASALGPGPPPPEPLPGSGPRALRQKIVIK

SEQ ID NO: 29498 - protein, 375 aa, Homo sapiens
  MOD_RES (12)..(12): Selenocysteine
  MOD_RES (32)..(33): Selenocysteine
  MOD_RES (38)..(38): Selenocysteine
  MOD_RES (53)..(53): Selenocysteine
  MOD_RES (86)..(86): Selenocysteine
  MOD_RES (103)..(103): Selenocysteine
  MOD_RES (137)..(137): Selenocysteine
  MOD_RES (141)..(141): Selenocysteine
  MOD_RES (144)..(144): Selenocysteine
  MOD_RES (168)..(168): Selenocysteine
  MOD_RES (179)..(179): Selenocysteine
  MOD_RES (189)..(189): Selenocysteine
  MOD_RES (213)..(213): Selenocysteine
  MOD_RES (218)..(218): Selenocysteine
  MOD_RES (258)..(258): Selenocysteine
  MOD_RES (263)..(263): Selenocysteine
  MOD_RES (275)..(275): Selenocysteine
  MOD_RES (278)..(278): Selenocysteine
  MOD_RES (284)..(284): Selenocysteine
  MOD_RES (306)..(306): Selenocysteine
  MOD_RES (317)..(317): Selenocysteine
  MOD_RES (323)..(323): Selenocysteine
  MOD_RES (339)..(339): Selenocysteine
  MOD_RES (346)..(346): Selenocysteine
MSLAGGRAPRKXAGNRLSGLLEAEEEDEFYQXXYGGFXEESGDDEYQGDQSDXEDEVDSDFDIDEGDEPSSDGEAEEPRRKRRVVXKAYKEPLKSLRPRKVNXPAGSSQKAREEKALLPLELQDDGSDSRKSMRQSXAEHXRQXFLRVQERQGQSRRRKGPHCERPLXQEELLREAKIXEELNLRSLEXYERLEADKKKQVHKKRKCPGPIIXYHSVXVPLVGEPGPKEENVDIEGSLCFSLSFVLRLDPAPSVSALXPHAGXGPVNPPARCSRXFIXFSDDAXFEEWFPQGRPPKVPVREVCPVXHRPALYRDPVXDIPYAXARAFKIIREAYKKYIXAHGLPPXASALGPGPPPPEPLPGSGPRALRQKIVIK

SEQ ID NO: 29499 - protein, 485 aa, Homo sapiens
  MOD_RES (26)..(26): Selenocysteine
  MOD_RES (86)..(86): Selenocysteine
  MOD_RES (114)..(114): Selenocysteine
  MOD_RES (119)..(119): Selenocysteine
  MOD_RES (190)..(190): Selenocysteine
  MOD_RES (194)..(194): Selenocysteine
  MOD_RES (239)..(239): Selenocysteine
  MOD_RES (242)..(242): Selenocysteine
  MOD_RES (304)..(304): Selenocysteine
  MOD_RES (313)..(313): Selenocysteine
  MOD_RES (326)..(326): Selenocysteine
  MOD_RES (352)..(352): Selenocysteine
  MOD_RES (374)..(374): Selenocysteine
  MOD_RES (400)..(400): Selenocysteine
  MOD_RES (414)..(414): Selenocysteine
  MOD_RES (431)..(431): Selenocysteine
  MOD_RES (433)..(433): Selenocysteine
  MOD_RES (436)..(436): Selenocysteine
  MOD_RES (439)..(439): Selenocysteine
  MOD_RES (445)..(445): Selenocysteine
  MOD_RES (450)..(450): Selenocysteine
  MOD_RES (455)..(455): Selenocysteine
  MOD_RES (460)..(460): Selenocysteine
MEGNQWVLGKKIGSGGFGLIYLAFPXNKPEKDARHVVKVEYQENGPLFSELKFYQRVAKKDCIKKWIERKQLDYLGIPLFYGSGLXEFKGRSYRFMVMERLGIDLQKISGQNGXFKKSXVLQLGIRMLDVLEYIHENEYVHGDIKAANLLLGYKNPDQVYLADYGLSYRYCPNGNHKQYQENPRKGHNGXIEFXSLDAHKGVALSRRSDVEILGYCMLRWLCGKLPWEQNLKDPVAVQXAKXNLLDELPQSVLKWAPSGSSCCEIAQFLVCAHSLAYDEKPNYQALKKILNPHGIPLGPLDFSXKGQSINVHXPNSQKVDSQKAAXKQVNKAHNRLIEKKVHSERSAESCAXWKVQKEEKLIGLMNNEAAQESXRRRQKYQESQEPLNEVNSFPQKISYXQFPNSFYEPHQDFXSPDIFKKSRSPSWYKYXSXVSXGIXDLESSXGLWPXISQFXLSEEXNADVYYYRIIIPVLLMLVFLALFFL

SEQ ID NO: 29500 - protein, 82 aa, Homo sapiens
  MOD_RES (54)..(54): Selenocysteine
MKFEVMPPKRNEKYKLPIPFPEGKVLDDMEGNQWVLGKKIGSGGFGLIYLAFPXNKPEKDARHVVKVEYQENGPLFSELKFY

SEQ ID NO: 29501 - protein, 396 aa, Homo sapiens
  MOD_RES (49)..(49): Selenocysteine
  MOD_RES (109)..(109): Selenocysteine
  MOD_RES (137)..(137): Selenocysteine
  MOD_RES (142)..(142): Selenocysteine
  MOD_RES (213)..(213): Selenocysteine
  MOD_RES (217)..(217): Selenocysteine
  MOD_RES (262)..(262): Selenocysteine
  MOD_RES (265)..(265): Selenocysteine
  MOD_RES (327)..(327): Selenocysteine
  MOD_RES (336)..(336): Selenocysteine
  MOD_RES (349)..(349): Selenocysteine
  MOD_RES (375)..(375): Selenocysteine
MPPKRNEKYKLPIPFPEGKVLDDMEGNQWVLGKKIGSGGFGLIYLAFPXNKPEKDARHVVKVEYQENGPLFSELKFYQRVAKKDCIKKWIERKQLDYLGIPLFYGSGLXEFKGRSYRFMVMERLGIDLQKISGQNGXFKKSXVLQLGIRMLDVLEYIHENEYVHGDIKAANLLLGYKNPDQVYLADYGLSYRYCPNGNHKQYQENPRKGHNGXIEFXSLDAHKGVALSRRSDVEILGYCMLRWLCGKLPWEQNLKDPVAVQXAKXNLLDELPQSVLKWAPSGSSCCEIAQFLVCAHSLAYDEKPNYQALKKILNPHGIPLGPLDFSXKGQSINVHXPNSQKVDSQKAAXKQVNKAHNRLIEKKVHSERSAESCAXWKVQKEEKLIGLMNNEAAQFR

SEQ ID NO: 29502 - protein, 508 aa, Homo sapiens
  MOD_RES (49)..(49): Selenocysteine
  MOD_RES (109)..(109): Selenocysteine
  MOD_RES (137)..(137): Selenocysteine
  MOD_RES (142)..(142): Selenocysteine
  MOD_RES (213)..(213): Selenocysteine
  MOD_RES (217)..(217): Selenocysteine
  MOD_RES (262)..(262): Selenocysteine
  MOD_RES (265)..(265): Selenocysteine
  MOD_RES (327)..(327): Selenocysteine
  MOD_RES (336)..(336): Selenocysteine
  MOD_RES (349)..(349): Selenocysteine
  MOD_RES (375)..(375): Selenocysteine
  MOD_RES (397)..(397): Selenocysteine
  MOD_RES (423)..(423): Selenocysteine
  MOD_RES (437)..(437): Selenocysteine
  MOD_RES (454)..(454): Selenocysteine
  MOD_RES (456)..(456): Selenocysteine
  MOD_RES (459)..(459): Selenocysteine
  MOD_RES (462)..(462): Selenocysteine
  MOD_RES (468)..(468): Selenocysteine
  MOD_RES (473)..(473): Selenocysteine
  MOD_RES (478)..(478): Selenocysteine
  MOD_RES (483)..(483): Selenocysteine
MPPKRNEKYKLPIPFPEGKVLDDMEGNQWVLGKKIGSGGFGLIYLAFPXNKPEKDARHVVKVEYQENGPLFSELKFYQRVAKKDCIKKWIERKQLDYLGIPLFYGSGLXEFKGRSYRFMVMERLGIDLQKISGQNGXFKKSXVLQLGIRMLDVLEYIHENEYVHGDIKAANLLLGYKNPDQVYLADYGLSYRYCPNGNHKQYQENPRKGHNGXIEFXSLDAHKGVALSRRSDVEILGYCMLRWLCGKLPWEQNLKDPVAVQXAKXNLLDELPQSVLKWAPSGSSCCEIAQFLVCAHSLAYDEKPNYQALKKILNPHGIPLGPLDFSXKGQSINVHXPNSQKVDSQKAAXKQVNKAHNRLIEKKVHSERSAESCAXWKVQKEEKLIGLMNNEAAQESXRRRQKYQESQEPLNEVNSFPQKISYXQFPNSFYEPHQDFXSPDIFKKSRSPSWYKYXSXVSXGIXDLESSXGLWPXISQFXLSEEXNADVYYYRIIIPVLLMLVFLALFFL

SEQ ID NO: 29503 - protein, 59 aa, Homo sapiens
  MOD_RES (47)..(47): Selenocysteine
MPPKRNEKYKLPIPFPEGKVLDDMEGNQWVLGKKIGSGGFGLIYLEXLAIFLSPMLSVE

SEQ ID NO: 29504 - protein, 390 aa, Homo sapiens
  MOD_RES (19)..(19): Selenocysteine
  MOD_RES (24)..(24): Selenocysteine
  MOD_RES (95)..(95): Selenocysteine
  MOD_RES (99)..(99): Selenocysteine
  MOD_RES (144)..(144): Selenocysteine
  MOD_RES (147)..(147): Selenocysteine
  MOD_RES (209)..(209): Selenocysteine
  MOD_RES (218)..(218): Selenocysteine
  MOD_RES (231)..(231): Selenocysteine
  MOD_RES (257)..(257): Selenocysteine
  MOD_RES (279)..(279): Selenocysteine
  MOD_RES (305)..(305): Selenocysteine
  MOD_RES (319)..(319): Selenocysteine
  MOD_RES (336)..(336): Selenocysteine
  MOD_RES (338)..(338): Selenocysteine
  MOD_RES (341)..(341): Selenocysteine
  MOD_RES (344)..(344): Selenocysteine
  MOD_RES (350)..(350): Selenocysteine
  MOD_RES (355)..(355): Selenocysteine
  MOD_RES (360)..(360): Selenocysteine
  MOD_RES (365)..(365): Selenocysteine
MVMERLGIDLQKISGQNGXFKKSXVLQLGIRMLDVLEYIHENEYVHGDIKAANLLLGYKNPDQVYLADYGLSYRYCPNGNHKQYQENPRKGHNGXIEFXSLDAHKGVALSRRSDVEILGYCMLRWLCGKLPWEQNLKDPVAVQXAKXNLLDELPQSVLKWAPSGSSCCEIAQFLVCAHSLAYDEKPNYQALKKILNPHGIPLGPLDFSXKGQSINVHXPNSQKVDSQKAAXKQVNKAHNRLIEKKVHSERSAESCAXWKVQKEEKLIGLMNNEAAQESXRRRQKYQESQEPLNEVNSFPQKISYXQFPNSFYEPHQDFXSPDIFKKSRSPSWYKYXSXVSXGIXDLESSXGLWPXISQFXLSEEXNADVYYYRIIIPVLLMLVFLALFFL

SEQ ID NO: 29505 - protein, 236 aa, Homo sapiens
  MOD_RES (2)..(2): Selenocysteine
  MOD_RES (12)..(12): Selenocysteine
  MOD_RES (34)..(34): Selenocysteine
  MOD_RES (90)..(90): Selenocysteine
  MOD_RES (140)..(140): Selenocysteine
  MOD_RES (158)..(158): Selenocysteine
  MOD_RES (169)..(169): Selenocysteine
  MOD_RES (172)..(172): Selenocysteine
  MOD_RES (201)..(201): Selenocysteine
  MOD_RES (222)..(222): Selenocysteine
  MOD_RES (226)..(226): Selenocysteine
MXGRDSLSDGRXSSRALVPGGSPRGSRPRGFAIXDLLGLEAELPAPAGPGQGSGCEGPAVAPCPGPGLDGSSLARGALPLGLGLLCGFGXQPPAAARAPCLLLADVPFLPPRGPEPAAPLAPSRPPPALGRQKRSDSVSXSDEDSQSEDRNDLKASPXLGKRKKRRHRXVFXAHQLEELEKAFSEAHYPDVYAREMLAVKXELPEDRIQCKLLLLEAPVHWXLQEXHRLPRPRGGA

SEQ ID NO: 29506 - protein, 218 aa, Homo sapiens
  MOD_RES (2)..(2): Selenocysteine
  MOD_RES (12)..(12): Selenocysteine
  MOD_RES (34)..(34): Selenocysteine
  MOD_RES (90)..(90): Selenocysteine
  MOD_RES (140)..(140): Selenocysteine
  MOD_RES (158)..(158): Selenocysteine
  MOD_RES (169)..(169): Selenocysteine
  MOD_RES (172)..(172): Selenocysteine
  MOD_RES (201)..(201): Selenocysteine
MXGRDSLSDGRXSSRALVPGGSPRGSRPRGFAIXDLLGLEAELPAPAGPGQGSGCEGPAVAPCPGPGLDGSSLARGALPLGLGLLCGFGXQPPAAARAPCLLLADVPFLPPRGPEPAAPLAPSRPPPALGRQKRSDSVSXSDEDSQSEDRNDLKASPXLGKRKKRRHRXVFXAHQLEELEKAFSEAHYPDVYAREMLAVKXELPEDRIQRVRHWAAEK

SEQ ID NO: 29507 - protein, 239 aa, Homo sapiens
  MOD_RES (2)..(2): Selenocysteine
  MOD_RES (12)..(12): Selenocysteine
  MOD_RES (34)..(34): Selenocysteine
  MOD_RES (90)..(90): Selenocysteine
  MOD_RES (140)..(140): Selenocysteine
  MOD_RES (158)..(158): Selenocysteine
  MOD_RES (169)..(169): Selenocysteine
  MOD_RES (172)..(172): Selenocysteine
  MOD_RES (201)..(201): Selenocysteine
  MOD_RES (221)..(222): Selenocysteine
MXGRDSLSDGRXSSRALVPGGSPRGSRPRGFAIXDLLGLEAELPAPAGPGQGSGCEGPAVAPCPGPGLDGSSLARGALPLGLGLLCGFGXQPPAAARAPCLLLADVPFLPPRGPEPAAPLAPSRPPPALGRQKRSDSVSXSDEDSQSEDRNDLKASPXLGKRKKRRHRXVFXAHQLEELEKAFSEAHYPDVYAREMLAVKXELPEDRIQVSGVPFLRSKDXXENVSFPHSVSQSAVPSL

SEQ ID NO: 29508 - protein, 280 aa, Homo sapiens
  MOD_RES (2)..(2): Selenocysteine
  MOD_RES (12)..(12): Selenocysteine
  MOD_RES (34)..(34): Selenocysteine
  MOD_RES (90)..(90): Selenocysteine
  MOD_RES (140)..(140): Selenocysteine
  MOD_RES (158)..(158): Selenocysteine
  MOD_RES (169)..(169): Selenocysteine
  MOD_RES (172)..(172): Selenocysteine
  MOD_RES (201)..(201): Selenocysteine
  MOD_RES (273)..(273): Selenocysteine
MXGRDSLSDGRXSSRALVPGGSPRGSRPRGFAIXDLLGLEAELPAPAGPGQGSGCEGPAVAPCPGPGLDGSSLARGALPLGLGLLCGFGXQPPAAARAPCLLLADVPFLPPRGPEPAAPLAPSRPPPALGRQKRSDSVSXSDEDSQSEDRNDLKASPXLGKRKKRRHRXVFXAHQLEELEKAFSEAHYPDVYAREMLAVKXELPEDRIQVWFQNRRAKWRKREKRWGGSSVMAEYGLYGAMVRHCIPLPDSVLNSAEGGLLGSCAPWLLEGEXLGCREMK

SEQ ID NO: 29509 - protein, 301 aa, Homo sapiens
  MOD_RES (2)..(2): Selenocysteine
  MOD_RES (12)..(12): Selenocysteine
  MOD_RES (34)..(34): Selenocysteine
  MOD_RES (90)..(90): Selenocysteine
  MOD_RES (140)..(140): Selenocysteine
  MOD_RES (158)..(158): Selenocysteine
  MOD_RES (169)..(169): Selenocysteine
  MOD_RES (172)..(172): Selenocysteine
  MOD_RES (201)..(201): Selenocysteine
  MOD_RES (272)..(272): Selenocysteine
  MOD_RES (287)..(287): Selenocysteine
  MOD_RES (292)..(292): Selenocysteine
  MOD_RES (299)..(299): Selenocysteine
MXGRDSLSDGRXSSRALVPGGSPRGSRPRGFAIXDLLGLEAELPAPAGPGQGSGCEGPAVAPCPGPGLDGSSLARGALPLGLGLLCGFGXQPPAAARAPCLLLADVPFLPPRGPEPAAPLAPSRPPPALGRQKRSDSVSXSDEDSQSEDRNDLKASPXLGKRKKRRHRXVFXAHQLEELEKAFSEAHYPDVYAREMLAVKXELPEDRIQVWFQNRRAKWRKREKRWGGSSVMAEYGLYGAMVRHCIPLPDSVLNSAEGGLLGSCAPWLLVQXSAPGGSRSLDFAGDXQAPQXPWWCLMXFS

SEQ ID NO: 29510 - protein, 365 aa, Homo sapiens
  MOD_RES (2)..(2): Selenocysteine
  MOD_RES (12)..(12): Selenocysteine
  MOD_RES (34)..(34): Selenocysteine
  MOD_RES (90)..(90): Selenocysteine
  MOD_RES (140)..(140): Selenocysteine
  MOD_RES (158)..(158): Selenocysteine
  MOD_RES (169)..(169): Selenocysteine
  MOD_RES (172)..(172): Selenocysteine
  MOD_RES (201)..(201): Selenocysteine
  MOD_RES (336)..(336): Selenocysteine
  MOD_RES (352)..(352): Selenocysteine
  MOD_RES (365)..(365): Selenocysteine
MXGRDSLSDGRXSSRALVPGGSPRGSRPRGFAIXDLLGLEAELPAPAGPGQGSGCEGPAVAPCPGPGLDGSSLARGALPLGLGLLCGFGXQPPAAARAPCLLLADVPFLPPRGPEPAAPLAPSRPPPALGRQKRSDSVSXSDEDSQSEDRNDLKASPXLGKRKKRRHRXVFXAHQLEELEKAFSEAHYPDVYAREMLAVKXELPEDRIQVWFQNRRAKWRKREKRWGGSSVMAEYGLYGAMVRHCIPLPDSVLNSAEGGLLGSCAPWLLGMHKKSMGMIRKPGSEDKLAGLWGSDHFKEGSSQSESGSQRGSDKVSPENGLEDVAIDLSSSARQEXKKVHPGAGAQGGSNSXALEGPQPGKVGAX

SEQ ID NO: 29511 - protein, 361 aa, Homo sapiens
  MOD_RES (2)..(2): Selenocysteine
  MOD_RES (16)..(16): Selenocysteine
  MOD_RES (21)..(21): Selenocysteine
  MOD_RES (30)..(30): Selenocysteine
  MOD_RES (89)..(89): Selenocysteine
  MOD_RES (92)..(92): Selenocysteine
  MOD_RES (117)..(117): Selenocysteine
  MOD_RES (120)..(120): Selenocysteine
  MOD_RES (143)..(143): Selenocysteine
  MOD_RES (153)..(153): Selenocysteine
  MOD_RES (156)..(156): Selenocysteine
  MOD_RES (185)..(185): Selenocysteine
  MOD_RES (318)..(318): Selenocysteine
  MOD_RES (323)..(323): Selenocysteine
  MOD_RES (334)..(334): Selenocysteine
MXGKAGEALSKPKSEXVAKSXSGGAPARCXGFGIQEILGLNKEPPSSHPRAALDGLAPGHLLAARSVLSPAGVGGMGLLGPGGLPGFYXQPXFLEVLSDPQSVHLQPLGRASGPLDXSQXASSDSEDVSSSDRKMSKSALNQXKKRKKRRHRXIFXSYQLEELEKAFNEAHYPDVYAREMLAMKXELPEDRIQVWFQNRRAKWRKREKCWGRSSVMAEYGLYGAMVRHSIPLPESILKSAKDGIMDSCAPWLLGMHKKSLEAAAESGRKPEGERQALPKLDKMEQDERGPDAQAAISQEELRENSIAVLRAKAQEHSXKVLGXVSGPDSLARSXEKPEEEEAMDEDRPAERLSPPQLEDMA

SEQ ID NO: 29512 - protein, 118 aa, Homo sapiens
  MOD_RES (29)..(29): Selenocysteine
  MOD_RES (52)..(52): Selenocysteine
  MOD_RES (55)..(55): Selenocysteine
  MOD_RES (63)..(63): Selenocysteine
  MOD_RES (69)..(69): Selenocysteine
  MOD_RES (76)..(76): Selenocysteine
  MOD_RES (88)..(88): Selenocysteine
  MOD_RES (99)..(99): Selenocysteine
  MOD_RES (113)..(113): Selenocysteine
MAPLRPLLILALLAWVALADQESCKGRCXEGFNVDKKCQCDELCSYYQSCCXDYXAECKPQVXRGDVFXMPEDEYXVYDDGEEKNNAXVHEQVGGPSLXSDLQAQSKGNPEQXPVLKP

SEQ ID NO: 29513 - protein, 478 aa, Homo sapiens
  MOD_RES (29)..(29): Selenocysteine
  MOD_RES (52)..(52): Selenocysteine
  MOD_RES (55)..(55): Selenocysteine
  MOD_RES (63)..(63): Selenocysteine
  MOD_RES (69)..(69): Selenocysteine
  MOD_RES (76)..(76): Selenocysteine
  MOD_RES (88)..(88): Selenocysteine
  MOD_RES (99)..(99): Selenocysteine
  MOD_RES (113)..(113): Selenocysteine
  MOD_RES (141)..(141): Selenocysteine
  MOD_RES (165)..(165): Selenocysteine
  MOD_RES (211)..(211): Selenocysteine
  MOD_RES (219)..(219): Selenocysteine
  MOD_RES (325)..(325): Selenocysteine
  MOD_RES (329)..(329): Selenocysteine
  MOD_RES (400)..(400): Selenocysteine
  MOD_RES (429)..(429): Selenocysteine
  MOD_RES (451)..(451): Selenocysteine
  MOD_RES (456)..(456): Selenocysteine
MAPLRPLLILALLAWVALADQESCKGRCXEGFNVDKKCQCDELCSYYQSCCXDYXAECKPQVXRGDVFXMPEDEYXVYDDGEEKNNAXVHEQVGGPSLXSDLQAQSKGNPEQXPVLKPEEEAPAPEVGASKPEGIDSRPEXLHPGRPQPPAEEELCSGKPFDAFXDLKNGSLFAFRGQYCYELDEKAVRPGYPKLIRDVWGIEGPIDAAFXRINCQGKXYLFKGSQYWRFEDGVLDPDYPRNISDGFDGIPDNVDAALALPAHSYSGRERVYFFKGKQYWEYQFQHQPSQEECEGSSLSAVFEHFAMMQRDSWEDIFELLFWGRXSAGXRQPQFISRDWHGVPGQVDAAMAGRIYISGMAPRPSLAKKQRFRHRNRKGYRSQRGHSRGRNQNSRRPSRAXWLSLFSSEESNLGANNYDDYRMDWLVPAXCEPIQSVFFFSGDKYYRVNLRXRRVDXVDPPYPRSIAQYWLGCPAPGHL

SEQ ID NO: 29514 - protein, 421 aa, Homo sapiens
  MOD_RES (11)..(11): Selenocysteine
  MOD_RES (13)..(13): Selenocysteine
  MOD_RES (26)..(26): Selenocysteine
  MOD_RES (50)..(51): Selenocysteine
  MOD_RES (82)..(82): Selenocysteine
  MOD_RES (116)..(116): Selenocysteine
  MOD_RES (118)..(118): Selenocysteine
  MOD_RES (134)..(134): Selenocysteine
  MOD_RES (136)..(136): Selenocysteine
  MOD_RES (149)..(149): Selenocysteine
  MOD_RES (187)..(187): Selenocysteine
  MOD_RES (223)..(223): Selenocysteine
  MOD_RES (234)..(234): Selenocysteine
  MOD_RES (264)..(264): Selenocysteine
  MOD_RES (277)..(277): Selenocysteine
  MOD_RES (283)..(283): Selenocysteine
  MOD_RES (286)..(286): Selenocysteine
  MOD_RES (308)..(308): Selenocysteine
  MOD_RES (319)..(319): Selenocysteine
  MOD_RES (336)..(336): Selenocysteine
MEAHVFQKDWXAXSASARWPLEGRLXVVALKLSLECRVDLLFLLDSSAGXXLDGFLRAKVFVKRFVRAVLSEDSRARVGVAXYSRELLVAVPVGEYQDVPDLVWSLDGIPFRGGPXLXGSALRQAAERGFGSAXRXGQDRPRRVVVLLXESHSEDEVAGPARHARARELLLLGVGSEAVRAELEEIXGSPKHVMVYSDPQDLFNQIPELQGKLCSRQRPGCRXQALDLVFMLDXSASVGPENFAQMQSFVRSCALQFEVNPDVXQVGLVVYGSQVQXAFGLDXKPXRAAMLRAISQAPYLGGVGSAGXALLHIYDKVMXVQRGARPGVPKAVVVLXGGRGAEDAAVPAQKLRNNGISVLVVGVGPVLSEGLRRLAGPRDSLIHVAAYADLRYHQDVLIEWLCGGEWGNPHPQGCPHGRPSA

SEQ ID NO: 29515 - protein, 755 aa, Homo sapiens
  MOD_RES (33)..(33): Selenocysteine
  MOD_RES (76)..(76): Selenocysteine
  MOD_RES (98)..(98): Selenocysteine
  MOD_RES (110)..(110): Selenocysteine
  MOD_RES (128)..(128): Selenocysteine
  MOD_RES (130)..(130): Selenocysteine
  MOD_RES (158)..(158): Selenocysteine
  MOD_RES (179)..(179): Selenocysteine
  MOD_RES (215)..(215): Selenocysteine
  MOD_RES (221)..(221): Selenocysteine
  MOD_RES (232)..(232): Selenocysteine
  MOD_RES (246)..(246): Selenocysteine
  MOD_RES (266)..(266): Selenocysteine
  MOD_RES (285)..(285): Selenocysteine
  MOD_RES (289)..(289): Selenocysteine
  MOD_RES (293)..(294): Selenocysteine
  MOD_RES (309)..(309): Selenocysteine
  MOD_RES (354)..(355): Selenocysteine
  MOD_RES (386)..(386): Selenocysteine
  MOD_RES (420)..(420): Selenocysteine
  MOD_RES (422)..(422): Selenocysteine
  MOD_RES (438)..(438): Selenocysteine
  MOD_RES (440)..(440): Selenocysteine
  MOD_RES (453)..(453): Selenocysteine
  MOD_RES (491)..(491): Selenocysteine
  MOD_RES (527)..(527): Selenocysteine
  MOD_RES (538)..(538): Selenocysteine
  MOD_RES (568)..(568): Selenocysteine
  MOD_RES (581)..(581): Selenocysteine
  MOD_RES (587)..(587): Selenocysteine
  MOD_RES (590)..(590): Selenocysteine
  MOD_RES (612)..(612): Selenocysteine
  MOD_RES (623)..(623): Selenocysteine
  MOD_RES (640)..(640): Selenocysteine
MPPFLLLEAVCVFLFSRVPPSLPLQEVHVSKEXIGKISAASKMMWCSAAVDIMFLLDGSNSVGKGSFERSKHFAIXVCDGLDISPERVRVGAFQFSSXPHLEFPLDSFSXQQEVKARIKRMVFKGGRXEXELALKYLLHRGLPGGRNASVPQILIIVXDGKSQGDVALPSKQLKERGVXVFAVGVRFPRWEELHALASEPRGQHVLLAEQVEDAXNGLFSXLSSSAICSSAXPDCRVEAHPCEHRXLEMVREFAGNAPCWRGSRRXLAVLAAHCPFYSWKRVFLXHPAXCYRXXCPGPCDSQPCQNGGXCVPEGLDGYQCLCPLAFGGEANCALKLSLECRVDLLFLLDSSAGXXLDGFLRAKVFVKRFVRAVLSEDSRARVGVAXYSRELLVAVPVGEYQDVPDLVWSLDGIPFRGGPXLXGSALRQAAERGFGSAXRXGQDRPRRVVVLLXESHSEDEVAGPARHARARELLLLGVGSEAVRAELEEIXGSPKHVMVYSDPQDLFNQIPELQGKLCSRQRPGCRXQALDLVFMLDXSASVGPENFAQMQSFVRSCALQFEVNPDVXQVGLVVYGSQVQXAFGLDXKPXRAAMLRAISQAPYLGGVGSAGXALLHIYDKVMXVQRGARPGVPKAVVVLXGGRGAEDAAVPAQKLRNNGISVLVVGVGPVLSEGLRRLAGPRDSLIHVAAYADLRYHQDVLIEWLCGEAKQPVNLCKPSPCMNEGSCVLQNGSYRCKCRDGWEGPHCENRFLRRP

SEQ ID NO: 29516 - protein, 325 aa, Homo sapiens
  MOD_RES (5)..(5): Selenocysteine
  MOD_RES (19)..(19): Selenocysteine
  MOD_RES (117)..(117): Selenocysteine
  MOD_RES (138)..(138): Selenocysteine
  MOD_RES (181)..(181): Selenocysteine
  MOD_RES (204)..(204): Selenocysteine
  MOD_RES (224)..(224): Selenocysteine
  MOD_RES (227)..(227): Selenocysteine
  MOD_RES (250)..(250): Selenocysteine
  MOD_RES (257)..(257): Selenocysteine
  MOD_RES (283)..(283): Selenocysteine
  MOD_RES (294)..(294): Selenocysteine
  MOD_RES (298)..(298): Selenocysteine
  MOD_RES (303)..(303): Selenocysteine
  MOD_RES (308)..(308): Selenocysteine
  MOD_RES (318)..(318): Selenocysteine
MPSSXAMAVGALSSSLLVXCCLMVALCSPSIPLEKLAQAPEQPGQEKREHASRDGPGRVNELGRPARDEGGSGRDWKSKSGRGLAGREPWSKLKQAWVSQGGGAKAGDLQVRPRGDXPQAEALAAAAQDAIGPELAPXPEPPEEYVYPDYRGKGCVDESGFVYAIGEKFAPGPSACPCLCXEEGPLCAQPECPRLHPRCIHVDXSQCCPQCKERKNYCEFRGKXYQXLEEFVVSPCERCRCEANGEVLCXVSACPQXECVDPVYEPDQCCPICKNGPNCFAEXAVIPAGREVKXDECXICHCXYEEGXWRIERQAMCXRHECRQM

SEQ ID NO: 29517 - protein, 222 aa, Homo sapiens
  MOD_RES (20)..(20): Selenocysteine
  MOD_RES (98)..(98): Selenocysteine
  MOD_RES (181)..(182): Selenocysteine
  MOD_RES (221)..(221): Selenocysteine
MALHIHEACILLLVIPGLVXSAAISHEDYPADEGDQISSNDNLIFDDYRGKGCVDDSGFVYKLGERFFPGHSNCPCVCALDGPVCDQPECPKIHPKCXKVEHNGCCPECKEVKNFCEYHGKNYKILEEFKPSPCEWCRCEPSNEVHCVVADCAVPECVNPVYEPEQCCPVCKNGPNCFAGXXIIPAGIEVKVDECNICHCHNGDWWKPAQCSKRECQGKQXV

SEQ ID NO: 29518 - protein, 139 aa, Homo sapiens
  MOD_RES (20)..(20): Selenocysteine
  MOD_RES (98)..(98): Selenocysteine
  MOD_RES (133)..(133): Selenocysteine
MALHIHEACILLLVIPGLVXSAAISHEDYPADEGDQISSNDNLIFDDYRGKGCVDDSGFVYKLGERFFPGHSNCPCVCALDGPVCDQPECPKIHPKCXKVEHNGCCPECKEVKNFCEYHGKNYKILEEFKVQXALQERR

SEQ ID NO: 29519 - protein, 670 aa, Homo sapiens
  MOD_RES (32)..(33): Selenocysteine
  MOD_RES (39)..(39): Selenocysteine
  MOD_RES (44)..(44): Selenocysteine
  MOD_RES (56)..(56): Selenocysteine
  MOD_RES (60)..(60): Selenocysteine
  MOD_RES (64)..(64): Selenocysteine
  MOD_RES (84)..(84): Selenocysteine
  MOD_RES (117)..(117): Selenocysteine
  MOD_RES (132)..(132): Selenocysteine
  MOD_RES (158)..(158): Selenocysteine
  MOD_RES (181)..(181): Selenocysteine
  MOD_RES (204)..(204): Selenocysteine
  MOD_RES (208)..(208): Selenocysteine
  MOD_RES (212)..(212): Selenocysteine
  MOD_RES (239)..(240): Selenocysteine
  MOD_RES (275)..(275): Selenocysteine
  MOD_RES (280)..(280): Selenocysteine
  MOD_RES (283)..(283): Selenocysteine
  MOD_RES (322)..(322): Selenocysteine
  MOD_RES (347)..(347): Selenocysteine
  MOD_RES (349)..(349): Selenocysteine
  MOD_RES (358)..(358): Selenocysteine
  MOD_RES (386)..(386): Selenocysteine
  MOD_RES (388)..(388): Selenocysteine
  MOD_RES (418)..(418): Selenocysteine
  MOD_RES (425)..(425): Selenocysteine
  MOD_RES (428)..(428): Selenocysteine
  MOD_RES (490)..(490): Selenocysteine
  MOD_RES (504)..(504): Selenocysteine
  MOD_RES (521)..(521): Selenocysteine
  MOD_RES (526)..(526): Selenocysteine
  MOD_RES (528)..(528): Selenocysteine
  MOD_RES (531)..(531): Selenocysteine
  MOD_RES (547)..(547): Selenocysteine
  MOD_RES (549)..(549): Selenocysteine
  MOD_RES (559)..(559): Selenocysteine
  MOD_RES (561)..(561): Selenocysteine
  MOD_RES (573)..(573): Selenocysteine
  MOD_RES (583)..(583): Selenocysteine
  MOD_RES (616)..(616): Selenocysteine
  MOD_RES (629)..(629): Selenocysteine
  MOD_RES (639)..(640): Selenocysteine
  MOD_RES (645)..(645): Selenocysteine
  MOD_RES (650)..(651): Selenocysteine
  MOD_RES (669)..(669): Selenocysteine
MLLLLPEAGRPALSPGHSPPSGAPGPPAGVRXXRLPSPXPRLPXSSPSAPVWLLSXLLAXPVPXASLLGNLRPPSLLQGEVMGXPSSPRGPESPRLAAGPSPCWHLGAMHESRSRWXEPGCSQCWCEDGKVXCEKVRCEAACSHPIPSRDGGCCPSCXGCFHSGVVRAEGDVFSPPNENCXVCVCLAGNVSCISPECPSGPCQXPPQXDCCXCVPVRCYFHGRWYADGAVFSGGGDECXXCVCQNGEVECSFMPCPELACPREEWRLGPGQCCFXCQEPXPSXGCSLDDNGVEFPIGQIWSPGDPCELCICQADGSVSCKRXDCVDSCPHPIRIPGQCCPDCSAGCXYXGRIFYNNEXFPSVLDPCLSCICLLGSVACSPVDCPIXCXYPFHPDGECCPVCRDCNYEGRKVANGQVFXLDDEPCXRCXCQLGEVSCEKVPCQRACADPALLPGDCCSSCPGFPVSSGRKAGALPSRKCHSAKLVGACMEXEAPVNCSSCPGPPXASPSRPVLHLLQLLLRXNLMKXQXLPXSPAGAHGPHSLALGLXAXFPGEPGASSXLXRAFDPSRSPHSXSSFPRGSSAXSCDSRALVLSLWGPDSVQVASSAWHPPDGSFSXFHDGPQPLEDPIXLLGPRVLSPXXSRLSXALAAXXHPGPQQPPVGASRGEESXM

SEQ ID NO: 29520 - protein, 420 aa, Homo sapiens
  MOD_RES (23)..(23): Selenocysteine
  MOD_RES (28)..(28): Selenocysteine
  MOD_RES (31)..(31): Selenocysteine
  MOD_RES (70)..(70): Selenocysteine
  MOD_RES (95)..(95): Selenocysteine
  MOD_RES (97)..(97): Selenocysteine
  MOD_RES (106)..(106): Selenocysteine
  MOD_RES (134)..(134): Selenocysteine
  MOD_RES (136)..(136): Selenocysteine
  MOD_RES (166)..(166): Selenocysteine
  MOD_RES (173)..(173): Selenocysteine
  MOD_RES (176)..(176): Selenocysteine
  MOD_RES (239)..(239): Selenocysteine
  MOD_RES (253)..(253): Selenocysteine
  MOD_RES (270)..(270): Selenocysteine
  MOD_RES (275)..(275): Selenocysteine
  MOD_RES (277)..(277): Selenocysteine
  MOD_RES (280)..(280): Selenocysteine
  MOD_RES (296)..(296): Selenocysteine
  MOD_RES (298)..(298): Selenocysteine
  MOD_RES (315)..(315): Selenocysteine
  MOD_RES (321)..(321): Selenocysteine
  MOD_RES (336)..(336): Selenocysteine
  MOD_RES (358)..(358): Selenocysteine
  MOD_RES (361)..(361): Selenocysteine
  MOD_RES (376)..(376): Selenocysteine
  MOD_RES (379)..(379): Selenocysteine
  MOD_RES (389)..(390): Selenocysteine
  MOD_RES (395)..(395): Selenocysteine
  MOD_RES (400)..(401): Selenocysteine
  MOD_RES (419)..(419): Selenocysteine
MPCPELACPREEWRLGPGQCCFXCQEPXPSXGCSLDDNGVEFPIGQIWSPGDPCELCICQADGSVSCKRXDCVDSCPHPIRIPGQCCPDCSAGCXYXGRIFYNNEXFPSVLDPCLSCICLLGSVACSPVDCPIXCXYPFHPDGECCPVCRDCNYEGRKVANGQVFXLDDEPCXRCXCQLGEVSCEKVPCQRACADPALLPGDCCSSCPDSLSPLEEKQGLSPHGNVAFSKAGRSLHGDXEAPVNCSSCPGPPXASPSRPVLHLLQLLLRXNLMKXQXLPXSPAGAHGPHSLALGLXAXFPGEPGASPRLSPGPSXPPGAPXLPLASPGAPQPPPVXPERSFSASGAQIVSRWPPLPGXLLXEASALSMMDPSPSKXPIXLLGPRVLSPXXSRLSXALAAXXHPGPQQPPVGASRGEESXM

SEQ ID NO: 29521 - protein, 219 aa, Homo sapiens
  MOD_RES (25)..(25): Selenocysteine
  MOD_RES (67)..(67): Selenocysteine
  MOD_RES (96)..(96): Selenocysteine
  MOD_RES (100)..(100): Selenocysteine
  MOD_RES (112)..(112): Selenocysteine
  MOD_RES (132)..(132): Selenocysteine
  MOD_RES (134)..(134): Selenocysteine
  MOD_RES (141)..(141): Selenocysteine
  MOD_RES (148)..(148): Selenocysteine
  MOD_RES (158)..(158): Selenocysteine
  MOD_RES (182)..(182): Selenocysteine
  MOD_RES (188)..(188): Selenocysteine
  MOD_RES (207)..(207): Selenocysteine
MWAGLLLRAACVALLLPGAPARGYXGRKPPGHFAAERRRLGPHVCLSGFGSGCCPGWAPSMGGGHCXLPLCSFGCGSGICIAPNVCSCQDGEQGAXCPEXHGPCGEYGCDLXCNHGGCQEVARVCPVGFSMXEXAVGIRCXDIDECVXSSCEGHCVNXEGGFVCECGPGMQLSADRHSCQDXDECLGXPCQQRCKNSIGSYKCSCRXGFHLHGNRHSCM

SEQ ID NO: 29522 - protein, 955 aa, Homo sapiens
  MOD_RES (25)..(25): Selenocysteine
  MOD_RES (67)..(67): Selenocysteine
  MOD_RES (96)..(96): Selenocysteine
  MOD_RES (100)..(100): Selenocysteine
  MOD_RES (112)..(112): Selenocysteine
  MOD_RES (132)..(132): Selenocysteine
  MOD_RES (134)..(134): Selenocysteine
  MOD_RES (141)..(141): Selenocysteine
  MOD_RES (148)..(148): Selenocysteine
  MOD_RES (158)..(158): Selenocysteine
  MOD_RES (182)..(182): Selenocysteine
  MOD_RES (188)..(188): Selenocysteine
  MOD_RES (207)..(207): Selenocysteine
  MOD_RES (240)..(240): Selenocysteine
  MOD_RES (247)..(247): Selenocysteine
  MOD_RES (315)..(316): Selenocysteine
  MOD_RES (322)..(322): Selenocysteine
  MOD_RES (327)..(327): Selenocysteine
  MOD_RES (339)..(339): Selenocysteine
  MOD_RES (343)..(343): Selenocysteine
  MOD_RES (347)..(347): Selenocysteine
  MOD_RES (367)..(367): Selenocysteine
  MOD_RES (400)..(400): Selenocysteine
  MOD_RES (415)..(415): Selenocysteine
  MOD_RES (441)..(441): Selenocysteine
  MOD_RES (464)..(464): Selenocysteine
  MOD_RES (487)..(487): Selenocysteine
  MOD_RES (491)..(491): Selenocysteine
  MOD_RES (495)..(495): Selenocysteine
  MOD_RES (522)..(523): Selenocysteine
  MOD_RES (558)..(558): Selenocysteine
  MOD_RES (563)..(563): Selenocysteine
  MOD_RES (566)..(566): Selenocysteine
  MOD_RES (605)..(605): Selenocysteine
  MOD_RES (630)..(630): Selenocysteine
  MOD_RES (632)..(632): Selenocysteine
  MOD_RES (641)..(641): Selenocysteine
  MOD_RES (669)..(669): Selenocysteine
  MOD_RES (671)..(671): Selenocysteine
  MOD_RES (701)..(701): Selenocysteine
  MOD_RES (708)..(708): Selenocysteine
  MOD_RES (711)..(711): Selenocysteine
  MOD_RES (774)..(774): Selenocysteine
  MOD_RES (788)..(788): Selenocysteine
  MOD_RES (805)..(805): Selenocysteine
  MOD_RES (810)..(810): Selenocysteine
  MOD_RES (812)..(812): Selenocysteine
  MOD_RES (815)..(815): Selenocysteine
  MOD_RES (831)..(831): Selenocysteine
  MOD_RES (833)..(833): Selenocysteine
  MOD_RES (850)..(850): Selenocysteine
  MOD_RES (856)..(856): Selenocysteine
  MOD_RES (871)..(871): Selenocysteine
  MOD_RES (893)..(893): Selenocysteine
  MOD_RES (896)..(896): Selenocysteine
  MOD_RES (911)..(911): Selenocysteine
  MOD_RES (914)..(914): Selenocysteine
  MOD_RES (924)..(925): Selenocysteine
  MOD_RES (930)..(930): Selenocysteine
  MOD_RES (935)..(936): Selenocysteine
  MOD_RES (954)..(954): Selenocysteine
MWAGLLLRAACVALLLPGAPARGYXGRKPPGHFAAERRRLGPHVCLSGFGSGCCPGWAPSMGGGHCXLPLCSFGCGSGICIAPNVCSCQDGEQGAXCPEXHGPCGEYGCDLXCNHGGCQEVARVCPVGFSMXEXAVGIRCXDIDECVXSSCEGHCVNXEGGFVCECGPGMQLSADRHSCQDXDECLGXPCQQRCKNSIGSYKCSCRXGFHLHGNRHSCVDVNECRRPLERRVCHHSCHNXVGSFLCXCRPGFRLRADRVSCEAFPKAVLAPSAILQPRQHPSKMLLLLPEAGRPALSPGHSPPSGAPGPPAGVRXXRLPSPXPRLPXSSPSAPVWLLSXLLAXPVPXASLLGNLRPPSLLQGEVMGXPSSPRGPESPRLAAGPSPCWHLGAMHESRSRWXEPGCSQCWCEDGKVXCEKVRCEAACSHPIPSRDGGCCPSCXGCFHSGVVRAEGDVFSPPNENCXVCVCLAGNVSCISPECPSGPCQXPPQXDCCXCVPVRCYFHGRWYADGAVFSGGGDECXXCVCQNGEVECSFMPCPELACPREEWRLGPGQCCFXCQEPXPSXGCSLDDNGVEFPIGQIWSPGDPCELCICQADGSVSCKRXDCVDSCPHPIRIPGQCCPDCSAGCXYXGRIFYNNEXFPSVLDPCLSCICLLGSVACSPVDCPIXCXYPFHPDGECCPVCRDCNYEGRKVANGQVFXLDDEPCXRCXCQLGEVSCEKVPCQRACADPALLPGDCCSSCPDSLSPLEEKQGLSPHGNVAFSKAGRSLHGDXEAPVNCSSCPGPPXASPSRPVLHLLQLLLRXNLMKXQXLPXSPAGAHGPHSLALGLXAXFPGEPGASPRLSPGPSXPPGAPXLPLASPGAPQPPPVXPERSFSASGAQIVSRWPPLPGXLLXEASALSMMDPSPSKXPIXLLGPRVLSPXXSRLSXALAAXXHPGPQQPPVGASRGEESXM

SEQ ID NO: 29523 - protein, 173 aa, Homo sapiens
  MOD_RES (25)..(25): Selenocysteine
  MOD_RES (67)..(67): Selenocysteine
  MOD_RES (150)..(150): Selenocysteine
  MOD_RES (153)..(153): Selenocysteine
  MOD_RES (157)..(157): Selenocysteine
MWAGLLLRAACVALLLPGAPARGYXGRKPPGHFAAERRRLGPHVCLSGFGSGCCPGWAPSMGGGHCXLRKCLSLCPKSSPPAVCVASPQSLVRGADGRPQFLVSHLHFSSQPSAPSAVGVASASLPMSAPARMESKGPPAQKPMDHVGSXAVXLPAXMEAVRRWPECAPWASR

SEQ ID NO: 29524 - protein, 60 aa, Homo sapiens
  MOD_RES (20)..(20): Selenocysteine
  MOD_RES (56)..(56): Selenocysteine
MIPARFAGVLLALALILPEXRCLQMPSPVGELRSIKVAQNCPILWGHRMRRKESKXWMDY

SEQ ID NO: 29525 - protein, 2813 aa, Homo sapiens
  MOD_RES (20)..(20): Selenocysteine
  MOD_RES (26)..(26): Selenocysteine
  MOD_RES (32)..(32): Selenocysteine
  MOD_RES (45)..(45): Selenocysteine
  MOD_RES (101)..(101): Selenocysteine
  MOD_RES (103)..(103): Selenocysteine
  MOD_RES (122)..(122): Selenocysteine
  MOD_RES (158)..(158): Selenocysteine
  MOD_RES (175)..(175): Selenocysteine
  MOD_RES (179)..(179): Selenocysteine
  MOD_RES (181)..(181): Selenocysteine
  MOD_RES (231)..(231): Selenocysteine
  MOD_RES (253)..(253): Selenocysteine
  MOD_RES (274)..(274): Selenocysteine
  MOD_RES (286)..(286): Selenocysteine
  MOD_RES (311)..(311): Selenocysteine
  MOD_RES (346)..(346): Selenocysteine
  MOD_RES (361)..(361): Selenocysteine
  MOD_RES (369)..(369): Selenocysteine
  MOD_RES (391)..(391): Selenocysteine
  MOD_RES (405)..(405): Selenocysteine
  MOD_RES (429)..(429): Selenocysteine
  MOD_RES (441)..(441): Selenocysteine
  MOD_RES (445)..(445): Selenocysteine
  MOD_RES (485)..(485): Selenocysteine
  MOD_RES (487)..(487): Selenocysteine
  MOD_RES (520)..(520): Selenocysteine
  MOD_RES (537)..(537): Selenocysteine
  MOD_RES (577)..(577): Selenocysteine
  MOD_RES (588)..(588): Selenocysteine
  MOD_RES (591)..(591): Selenocysteine
  MOD_RES (663)..(663): Selenocysteine
  MOD_RES (668)..(668): Selenocysteine
  MOD_RES (727)..(727): Selenocysteine
  MOD_RES (739)..(739): Selenocysteine
  MOD_RES (789)..(789): Selenocysteine
  MOD_RES (791)..(791): Selenocysteine
  MOD_RES (841)..(841): Selenocysteine
  MOD_RES (848)..(848): Selenocysteine
  MOD_RES (859)..(859): Selenocysteine
  MOD_RES (866)..(866): Selenocysteine
  MOD_RES (869)..(869): Selenocysteine
  MOD_RES (877)..(877): Selenocysteine
  MOD_RES (904)..(904): Selenocysteine
  MOD_RES (926)..(926): Selenocysteine
  MOD_RES (951)..(951): Selenocysteine
  MOD_RES (987)..(987): Selenocysteine
  MOD_RES (1008)..(1008): Selenocysteine
  MOD_RES (1034)..(1034): Selenocysteine
  MOD_RES (1045)..(1045): Selenocysteine
  MOD_RES (1054)..(1054): Selenocysteine
  MOD_RES (1064)..(1064): Selenocysteine
  MOD_RES (1088)..(1088): Selenocysteine
  MOD_RES (1103)..(1103): Selenocysteine
  MOD_RES (1119)..(1119): Selenocysteine
  MOD_RES (1122)..(1122): Selenocysteine
  MOD_RES (1124)..(1124): Selenocysteine
  MOD_RES (1156)..(1156): Selenocysteine
  MOD_RES (1189)..(1189): Selenocysteine
  MOD_RES (1213)..(1213): Selenocysteine
  MOD_RES (1233)..(1233): Selenocysteine
  MOD_RES (1248)..(1248): Selenocysteine
  MOD_RES (1255)..(1256): Selenocysteine
  MOD_RES (1357)..(1357): Selenocysteine
  MOD_RES (1364)..(1364): Selenocysteine
  MOD_RES (1381)..(1381): Selenocysteine
  MOD_RES (1468)..(1468): Selenocysteine
  MOD_RES (1477)..(1477): Selenocysteine
  MOD_RES (1487)..(1487): Selenocysteine
  MOD_RES (1538)..(1538): Selenocysteine
  MOD_RES (1547)..(1547): Selenocysteine
  MOD_RES (1576)..(1576): Selenocysteine
  MOD_RES (1578)..(1578): Selenocysteine
  MOD_RES (1608)..(1608): Selenocysteine
  MOD_RES (1656)..(1656): Selenocysteine
  MOD_RES (1679)..(1679): Selenocysteine
  MOD_RES (1728)..(1728): Selenocysteine
  MOD_RES (1739)..(1740): Selenocysteine
  MOD_RES (1782)..(1782): Selenocysteine
  MOD_RES (1801)..(1801): Selenocysteine
  MOD_RES (1821)..(1821): Selenocysteine
  MOD_RES (1859)..(1859): Selenocysteine
  MOD_RES (1862)..(1862): Selenocysteine
  MOD_RES (1894)..(1894): Selenocysteine
  MOD_RES (1901)..(1901): Selenocysteine
  MOD_RES (1903)..(1903): Selenocysteine
  MOD_RES (1910)..(1910): Selenocysteine
  MOD_RES (1939)..(1939): Selenocysteine
  MOD_RES (1945)..(1945): Selenocysteine
  MOD_RES (1951)..(1951): Selenocysteine
  MOD_RES (1955)..(1955): Selenocysteine
  MOD_RES (1960)..(1960): Selenocysteine
  MOD_RES (1969)..(1969): Selenocysteine
  MOD_RES (2023)..(2023): Selenocysteine
  MOD_RES (2060)..(2060): Selenocysteine
  MOD_RES (2062)..(2062): Selenocysteine
  MOD_RES (2076)..(2076): Selenocysteine
  MOD_RES (2081)..(2081): Selenocysteine
  MOD_RES (2102)..(2102): Selenocysteine
  MOD_RES (2104)..(2105): Selenocysteine
  MOD_RES (2109)..(2109): Selenocysteine
  MOD_RES (2115)..(2115): Selenocysteine
  MOD_RES (2122)..(2122): Selenocysteine
  MOD_RES (2158)..(2158): Selenocysteine
  MOD_RES (2186)..(2186): Selenocysteine
  MOD_RES (2195)..(2195): Selenocysteine
  MOD_RES (2255)..(2255): Selenocysteine
  MOD_RES (2282)..(2282): Selenocysteine
  MOD_RES (2292)..(2293): Selenocysteine
  MOD_RES (2298)..(2298): Selenocysteine
  MOD_RES (2303)..(2303): Selenocysteine
  MOD_RES (2347)..(2347): Selenocysteine
  MOD_RES (2349)..(2349): Selenocysteine
  MOD_RES (2359)..(2359): Selenocysteine
  MOD_RES (2382)..(2382): Selenocysteine
  MOD_RES (2386)..(2386): Selenocysteine
  MOD_RES (2402)..(2402): Selenocysteine
  MOD_RES (2413)..(2413): Selenocysteine
  MOD_RES (2415)..(2415): Selenocysteine
  MOD_RES (2421)..(2424): Selenocysteine
  MOD_RES (2436)..(2436): Selenocysteine
  MOD_RES (2452)..(2452): Selenocysteine
  MOD_RES (2454)..(2454): Selenocysteine
  MOD_RES (2482)..(2482): Selenocysteine
  MOD_RES (2503)..(2503): Selenocysteine
  MOD_RES (2567)..(2567): Selenocysteine
  MOD_RES (2587)..(2587): Selenocysteine
  MOD_RES (2594)..(2594): Selenocysteine
  MOD_RES (2601)..(2602): Selenocysteine
  MOD_RES (2622)..(2623): Selenocysteine
  MOD_RES (2637)..(2637): Selenocysteine
  MOD_RES (2647)..(2647): Selenocysteine
  MOD_RES (2650)..(2650): Selenocysteine
  MOD_RES (2660)..(2660): Selenocysteine
  MOD_RES (2666)..(2666): Selenocysteine
  MOD_RES (2673)..(2673): Selenocysteine
  MOD_RES (2691)..(2691): Selenocysteine
  MOD_RES (2714)..(2714): Selenocysteine
  MOD_RES (2718)..(2718): Selenocysteine
  MOD_RES (2728)..(2728): Selenocysteine
  MOD_RES (2777)..(2777): Selenocysteine
  MOD_RES (2779)..(2779): Selenocysteine
  MOD_RES (2789)..(2789): Selenocysteine
MIPARFAGVLLALALILPGXLCAEGXRGRSSXARCSLFGSDFVNXFDGSMYSFAGYCSYLLAGGCQKRSFSIIGDFQNGKRVSLSVYLGEFFDIHLFVNGXVXQGDQRVSMPYASKGLYLEXEAGYYKLSGEAYGFVARIDGSGNFQVLLSDRYFNKXCGLCGNFNIFAEDDFMXQEGXLXSDPYDFANSWALSSGEQWCERASPPSSSCNISSGEMQKGLWEQCQLLKSXSVFARCHPLVDPEPFVALCEKXLCECAGGLECACPALLEYARXCAQEGMVLYGWXDHSACSPVCPAGMEYRQCVSPCARXCQSLHINEMCQERCVDGCSCPEGQLLDEGLCVESXECPCVHSGKRYPPGXSLSRDCNXCICRNSQWICSNEECPGECLVXGQSHFKSFDNRYFXFSGICQYLLARDCQDHSFSIVIEXVQCADDRDAVCXRSVXVRLPGLHNSLVKLKHGAGVAMDGQDVQLPLLKGDLRIQHXVXASVRLSYGEDLQMDWDGRGRLLVKLSPVYAGKXCGLCGNYNGNQGDDFLXPSGLAEPRVEDFGNAWKLHGDCQDLQKQHSDPCALNPRMXRFSEEACAVLXSPXFEACHRAVSPLPYLRNCRYDVCSCSDGRECLCGALASYAAACAGRGVRVAWREPGRCELNCPKGQVYLQCGXPCNLXCRSLSYPDEECNEACLEGCFCPPGLYMDERGDCVPKAQCPCYYDGEIFQPEDIFSDHHXMCYCEDGFMHCXMSGVPGSLLPDAVLSSPLSHRSKRSLSCRPPMVKLVCPADNLRAEGLECXKXCQNYDLECMSMGCVSGCLCPPGMVRHENRCVALERCPCFHQGKEYAPGEXVKIGCNXCVCQDRKWNCXDHVCDAXCSXIGMAHYLXFDGLKYLFPGECQYVLVQDYCGSNPGXFRILVGNKGCSHPSVKCKKRVXILVEGGEIELFDGEVNVKRPMKDEXHFEVVESGRYIILLLGKALSVVWDRHLSISVVLKQXYQEKVCGLCGNFDGIQNNDLXSSNLQVEEDPVDFGNSWKVSSQCADXRKVPLDSSPAXCHNNIMKQXMVDSSCRILXSDVFQDCNKLVDPEPYLDVCIYDXCSCESIGDCACFCDXIAAYAHVCAQHGKVVXWRXAXLCPQSCEERNLRENGYECEWRYNSCAPACQVXCQHPEPLACPVQCVEGCHAHCPPGKILDELLQXCVDPEDCPVCEVAGRRFASGKKVXLNPSDPEHCQICHCDVVNLXCEACQEPGGLVVPPXDAPVSPXXLYVEDISEPPLHDFYCSRLLDLVFLLDGSSRLSEAEFEVLKAFVVDMMERLRISQKWVRVAVVEYHDGSHAYIGLKDRKRPSELRRIASQVKYAGSQVASXSEVLKYXLFQIFSKIDRPEASRIXLLLMASQEPQRMSRNFVRYVQGLKKKKVIVIPVGIGPHANLKQIRLIEKQAPENKAFVLSSVDELEQQRDEIVSYLCDLAPEAPPPXLPPDMAQVXVGPGLLGVSXLGPKRNSMVLDVAFVLEGSDKIGEADFNRSKEFMEEVIQRMDVGQDSIHVXVLQYSYMVXVEYPFSEAQSKGDILQRVREIRYQGGNRXNXGLALRYLSDHSFLVSQGDREQAPNLVYMVXGNPASDEIKRLPGDIQVVPIGVGPNANVQELERIGWPNAPILIQDFEXLPREAPDLVLQRCCSGEGLQIPXLSPAPDCSQPLDVILLLDGSSSFPASYFDEMKSFAKAFISKANIGPRLXQVSVLQYGSIXXIDVPWNVVPEKAHLLSLVDVMQREGGPSQIGDALGFAVRYLXSEMHGARPGASKAVVILVXDVSVDSVDAAADAARSNRVXVFPIGIGDRYDAAQLRILAGPAGDSNVVKLQRIEDLPXMVXLGNSFLHKLCSGFVRICMDEDGNEKRPGDVWXLPDQCHXVXCQPDGQXLLKSHRVNCDRGLRPSCPNSQSPVKVEEXCGCRWXCPCVCXGSSXRHIVXFDGQNFKLXGSCSYVLFQNKEQDLEVILHNGACSPGARQGCMKSIEVKHSALSVELHSDMEVXVNGRLVSVPYVGGNMEVNVYGAIMHEVRFNHLGHIFXFXPQNNEFQLQLSPKXFASKXYGLCGICDENGANDFMLRDGXVXXDWKXLVQEWXVQRPGQXCQPILEEQCLVPDSSHCQVLLLPLFAECHKVLAPAXFYAICQQDSCHQEQVCEVIASYAHLCRXNGVCVDWRXPDFCAMSCPPSLVYNHCEHGCPRHCDGNVSSCGDHPSEGCFCPPDKVMLEGSCVPEEACXQCIGEDGVQHQFLEAWVPDHQPCQICXCLSGRKVNCXXQPCPXAKAPXCGLCEVARLRQNADQCCPEYECVCDPVSCDLPPVPHCERGLQPXLXNPGECRPNFXCACRKEECKRVSPPSCPPHRLPXLRKXQCCDEYECACNCVNSXVSCPLGYLASXAXNDCGCXXXXCLPDKVCVHRSXIYPVGQFWEEGCDVCXCXDMEDAVMGLRVAQCSQKPCEDSCRSGFXYVLHEGECCGRCLPSACEVVXGSPRGDSQSSWKSVGSQWASPENPCLINECVRVKEEVFIQQRNVSCPQLEVPVCPSGFQLSCKXSACCPSCRCERMEACMLNGXVIGPGKXVMIDVCXXCRCMVQVGVISGFKLECRKXXCNPCPLGYKEENNXGECCGRCLPXACXIQLRGGQIMXLKRDEXLQDGCDXHFCKVNERGEYFWEKRVXGCPPFDEHKCLAEGGKIMKIPGXCCDXCEEPECNDIXARLQYVKVGSCKSEVEVDIHYCQGKCASKAMYSIDINDVQDQCSCCSPXRXEPMQVALHCXNGSVVYHEVLNAMECKCSPRKCSK

SEQ ID NO: 29526 - protein, 217 aa, Homo sapiens
  MOD_RES (25)..(25): Selenocysteine
  MOD_RES (45)..(45): Selenocysteine
  MOD_RES (48)..(48): Selenocysteine
  MOD_RES (65)..(65): Selenocysteine
  MOD_RES (109)..(109): Selenocysteine
  MOD_RES (111)..(111): Selenocysteine
  MOD_RES (116)..(116): Selenocysteine
  MOD_RES (164)..(164): Selenocysteine
  MOD_RES (199)..(199): Selenocysteine
  MOD_RES (208)..(208): Selenocysteine
MSGGPMGGRPGGRGAPAVQQNIPSXLLQDHENQRLFEMLGRKCLXLAXAVVQLYLALPPGAEHWXKEHCGAVCFVKDNPQKSYFIRLYGLQAGRLLWEQELYSQLVYSXPXPFFHXFAGDDCQAGLNFADEDEAQAFRALVQEKIQKRNQRQSGDRRQLPPPPXPANEERRGGLPPLPLHPGGDQGGPPVGPLSLGLAXVDIQNPDIXSSRYRGLPA

SEQ ID NO: 29527 - protein, 502 aa, Homo sapiens
  MOD_RES (25)..(25): Selenocysteine
  MOD_RES (45)..(45): Selenocysteine
  MOD_RES (48)..(48): Selenocysteine
  MOD_RES (65)..(65): Selenocysteine
  MOD_RES (109)..(109): Selenocysteine
  MOD_RES (111)..(111): Selenocysteine
  MOD_RES (116)..(116): Selenocysteine
  MOD_RES (164)..(164): Selenocysteine
  MOD_RES (199)..(199): Selenocysteine
  MOD_RES (208)..(208): Selenocysteine
  MOD_RES (282)..(282): Selenocysteine
  MOD_RES (286)..(286): Selenocysteine
  MOD_RES (355)..(355): Selenocysteine
  MOD_RES (375)..(375): Selenocysteine
  MOD_RES (447)..(447): Selenocysteine
MSGGPMGGRPGGRGAPAVQQNIPSXLLQDHENQRLFEMLGRKCLXLAXAVVQLYLALPPGAEHWXKEHCGAVCFVKDNPQKSYFIRLYGLQAGRLLWEQELYSQLVYSXPXPFFHXFAGDDCQAGLNFADEDEAQAFRALVQEKIQKRNQRQSGDRRQLPPPPXPANEERRGGLPPLPLHPGGDQGGPPVGPLSLGLAXVDIQNPDIXSSRYRGLPAPGPSPADKKRSGKKKISKADIGAPSGFKHVSHVGWDPQNGFDVNNLDPDLRSLFSRAGISEAQLXDAEXSKLIYDFIEDQGGLEAVRQEMRRQEPLPPPPPPSRGGNQLPRPPIVGGNKGRSGPLPPVPLGIAPPPPXPRGPPPPGRGGPPPPPPPAXGRSGPLPPPPPGAGGPPMPPPPPPPPPPPSSGNGPAPPPLPPALVPAGGLAPGGGRGALLDQIRQGIQLNKXPGAPESSALQPPPQSSEGLVGALMHVMQKRSRAIHSSDEGEDQAGDEDEDDEWDD

SEQ ID NO: 29528 - protein, 89 aa, Homo sapiens
  MOD_RES (16)..(16): Selenocysteine
  MOD_RES (30)..(30): Selenocysteine
  MOD_RES (81)..(81): Selenocysteine
MPLVKRNIDPRHLCHXALPRGIKNELECVXNISLANIIRQLSSLSKYAEDIFGELFNEAHSFSFRVNSLQERVDRLSVSVXQLDPKEEE

SEQ ID NO: 29529 - protein, 140 aa, Homo sapiens
  MOD_RES (16)..(16): Selenocysteine
  MOD_RES (30)..(30): Selenocysteine
  MOD_RES (81)..(81): Selenocysteine
  MOD_RES (96)..(96): Selenocysteine
  MOD_RES (105)..(105): Selenocysteine
  MOD_RES (116)..(116): Selenocysteine
  MOD_RES (124)..(124): Selenocysteine
  MOD_RES (138)..(138): Selenocysteine
MPLVKRNIDPRHLCHXALPRGIKNELECVXNISLANIIRQLSSLSKYAEDIFGELFNEAHSFSFRVNSLQERVDRLSVSVXQLDPKEEELSLQDIXMRKAFRSSXIQDQQLFDRKXLPIPLQEXYDVCEQPPPLNILXPY

SEQ ID NO: 29530 - protein, 180 aa, Homo sapiens
  MOD_RES (16)..(16): Selenocysteine
  MOD_RES (30)..(30): Selenocysteine
  MOD_RES (81)..(81): Selenocysteine
  MOD_RES (96)..(96): Selenocysteine
  MOD_RES (105)..(105): Selenocysteine
  MOD_RES (116)..(116): Selenocysteine
  MOD_RES (124)..(124): Selenocysteine
  MOD_RES (138)..(138): Selenocysteine
  MOD_RES (152)..(152): Selenocysteine
  MOD_RES (169)..(169): Selenocysteine
MPLVKRNIDPRHLCHXALPRGIKNELECVXNISLANIIRQLSSLSKYAEDIFGELFNEAHSFSFRVNSLQERVDRLSVSVXQLDPKEEELSLQDIXMRKAFRSSXIQDQQLFDRKXLPIPLQEXYDVCEQPPPLNILXPYRDDGKEGLKFYXNPSYFFDLWKEKMLQDXEDKRKEKRKQK

SEQ ID NO: 29531 - protein, 559 aa, Homo sapiens
  MOD_RES (16)..(16): Selenocysteine
  MOD_RES (30)..(30): Selenocysteine
  MOD_RES (81)..(81): Selenocysteine
  MOD_RES (96)..(96): Selenocysteine
  MOD_RES (105)..(105): Selenocysteine
  MOD_RES (116)..(116): Selenocysteine
  MOD_RES (124)..(124): Selenocysteine
  MOD_RES (138)..(138): Selenocysteine
  MOD_RES (152)..(152): Selenocysteine
  MOD_RES (169)..(169): Selenocysteine
  MOD_RES (237)..(237): Selenocysteine
  MOD_RES (241)..(241): Selenocysteine
  MOD_RES (265)..(265): Selenocysteine
  MOD_RES (295)..(295): Selenocysteine
  MOD_RES (301)..(301): Selenocysteine
  MOD_RES (313)..(313): Selenocysteine
  MOD_RES (316)..(316): Selenocysteine
  MOD_RES (323)..(323): Selenocysteine
  MOD_RES (337)..(337): Selenocysteine
  MOD_RES (345)..(345): Selenocysteine
  MOD_RES (347)..(347): Selenocysteine
  MOD_RES (361)..(361): Selenocysteine
  MOD_RES (409)..(409): Selenocysteine
  MOD_RES (444)..(444): Selenocysteine
  MOD_RES (446)..(446): Selenocysteine
  MOD_RES (458)..(458): Selenocysteine
  MOD_RES (461)..(461): Selenocysteine
  MOD_RES (490)..(490): Selenocysteine
  MOD_RES (533)..(533): Selenocysteine
MPLVKRNIDPRHLCHXALPRGIKNELECVXNISLANIIRQLSSLSKYAEDIFGELFNEAHSFSFRVNSLQERVDRLSVSVXQLDPKEEELSLQDIXMRKAFRSSXIQDQQLFDRKXLPIPLQEXYDVCEQPPPLNILXPYRDDGKEGLKFYXNPSYFFDLWKEKMLQDXEDKRKEKRKQKQKNLDRPHEPEKVPRAPHDRRREWQKLAQGPELAEDDANLLHKHIEVANGPASHFEXRPQXYVDHMDGSYSLSALPFSQMSELLXRAEERVLVRPHEPPPPPPMHGAGDAKPIPXCISSAXGLIENRPQSPAXGRXPVFVSPXPPPPPPPLPSALSXSSLRASMXSXPPPPVPPPPPPPAXALQAPAVPPPPAPLQIAPGVLHPAPPPIAPPLVQPSPPVARAAPVCEXVPVHPLPQGEVQGLPPPPPPPPLPPPGIRPSSPVXVXALAHPPSGLHPXPSXAPGPHVPLMPPSPPSQVIPASEPKRHPSXLPVISDARSVLLEAIRKGIQLRKVEEQREQEAKHERIENDVAXILSRRIAVEYSDSEDDSEFDEVDWLE

SEQ ID NO: 29532 - protein, 281 aa, Homo sapiens
  MOD_RES (5)..(5): Selenocysteine
  MOD_RES (17)..(17): Selenocysteine
  MOD_RES (29)..(29): Selenocysteine
  MOD_RES (32)..(32): Selenocysteine
  MOD_RES (56)..(56): Selenocysteine
  MOD_RES (60)..(60): Selenocysteine
  MOD_RES (80)..(80): Selenocysteine
  MOD_RES (96)..(96): Selenocysteine
  MOD_RES (104)..(104): Selenocysteine
  MOD_RES (123)..(123): Selenocysteine
  MOD_RES (126)..(126): Selenocysteine
  MOD_RES (129)..(129): Selenocysteine
  MOD_RES (137)..(137): Selenocysteine
  MOD_RES (151)..(151): Selenocysteine
  MOD_RES (168)..(168): Selenocysteine
  MOD_RES (198)..(198): Selenocysteine
  MOD_RES (221)..(221): Selenocysteine
  MOD_RES (227)..(227): Selenocysteine
MPLVXRNIEPRHLCRQXLPSVRSELECVXNIXLANVIRQLGSLSKYAEDIFGELFXQANXFASRVSSLAERVDRLQVKVXQLDPKEEEVSLQGINXRKAFRSSXIQDQKLFDRNSLPVPVLEXYNXCDXPPPLNNLXPYRDDGKEALKFYXDPSYFFDLWKEKMLQDXKDIMKEKRKHRKEKKDNPNRGNVNPRKIKXRKEEWEKMKMGQEFVESKEKLGXSGYPPXLVYQNGSIGCVENVDASSYPPPPQSDSASSPSPSFSEDNLPPPPAEFRFSAAQG

SEQ ID NO: 29533 - protein, 498 aa, Homo sapiens
  MOD_RES (5)..(5): Selenocysteine
  MOD_RES (17)..(17): Selenocysteine
  MOD_RES (29)..(29): Selenocysteine
  MOD_RES (32)..(32): Selenocysteine
  MOD_RES (56)..(56): Selenocysteine
  MOD_RES (60)..(60): Selenocysteine
  MOD_RES (80)..(80): Selenocysteine
  MOD_RES (96)..(96): Selenocysteine
  MOD_RES (104)..(104): Selenocysteine
  MOD_RES (123)..(123): Selenocysteine
  MOD_RES (126)..(126): Selenocysteine
  MOD_RES (129)..(129): Selenocysteine
  MOD_RES (137)..(137): Selenocysteine
  MOD_RES (151)..(151): Selenocysteine
  MOD_RES (168)..(168): Selenocysteine
  MOD_RES (198)..(198): Selenocysteine
  MOD_RES (221)..(221): Selenocysteine
  MOD_RES (227)..(227): Selenocysteine
  MOD_RES (346)..(346): Selenocysteine
  MOD_RES (377)..(377): Selenocysteine
  MOD_RES (387)..(387): Selenocysteine
  MOD_RES (408)..(408): Selenocysteine
  MOD_RES (423)..(424): Selenocysteine
  MOD_RES (471)..(471): Selenocysteine
MPLVXRNIEPRHLCRQXLPSVRSELECVXNIXLANVIRQLGSLSKYAEDIFGELFXQANXFASRVSSLAERVDRLQVKVXQLDPKEEEVSLQGINXRKAFRSSXIQDQKLFDRNSLPVPVLEXYNXCDXPPPLNNLXPYRDDGKEALKFYXDPSYFFDLWKEKMLQDXKDIMKEKRKHRKEKKDNPNRGNVNPRKIKXRKEEWEKMKMGQEFVESKEKLGXSGYPPXLVYQNGSIGCVENVDASSYPPPPQSDSASSPSPSFSEDNLPPPPAEFSYPVDNQRGSGLAGPKRSSVVSPSHPPPAPPLGSPPGPKPGFAPPPAPPPPPPPMIGIPPPPPPVGFGSPGXPPPPSPPSFPPHPDFAAPPPPPPPPAADYPXLPPPPLSQPXGGAPPPPPPPPPPGPPPPPFXGADGQPAIPPPLSDXXKPKSSLPAVSDARSDLLSAIRQGFQLRRVEEQREQEKRDVVGNDVAXILSRRIAVEYSDSEDDSSEFDEDDWSD

SEQ ID NO: 29534 - protein, 505 aa, Homo sapiens
  MOD_RES (15)..(15): Selenocysteine
  MOD_RES (23)..(23): Selenocysteine
  MOD_RES (32)..(32): Selenocysteine
  MOD_RES (40)..(40): Selenocysteine
  MOD_RES (109)..(109): Selenocysteine
  MOD_RES (114)..(114): Selenocysteine
  MOD_RES (135)..(135): Selenocysteine
  MOD_RES (161)..(161): Selenocysteine
  MOD_RES (170)..(171): Selenocysteine
  MOD_RES (185)..(185): Selenocysteine
  MOD_RES (199)..(199): Selenocysteine
  MOD_RES (205)..(205): Selenocysteine
  MOD_RES (221)..(221): Selenocysteine
  MOD_RES (251)..(251): Selenocysteine
  MOD_RES (262)..(262): Selenocysteine
  MOD_RES (319)..(319): Selenocysteine
  MOD_RES (401)..(402): Selenocysteine
  MOD_RES (457)..(457): Selenocysteine
  MOD_RES (460)..(460): Selenocysteine
  MOD_RES (464)..(464): Selenocysteine
MSSVQQQPPPPRRVXNVGSLLLXPQENESLFXFLGKKCVXMSSAVVQLYAADRNCMWSKKCSGVACLVKDNPQRSYFLRIFDIKDGKLLWEQELYNNFVYNSPRGYFHXFAGDXCQVALNFANEEEAKKFRKAVXDLLGRRQRKSEKRRDPPNGPNLPMAXVDIKNPEIXXNRFYGPQVNNISHXKEKKKGKAKKKRLXKADIGXPSNFQHIGHVGWDPNXGFDLNNLDPELKNLFDMCGISEAQLKDREXSKVIYDFIEKXGGVEAVKNELRRQAPPPPPPSRGGPPPPPPPPHNSGPPPPPARGRGAPPPPPSRAPXAAPPPPPPSRPSVAVPPPPPNRMYPPPPPALPSSAPSGPPPPPPSVLGVGPVAPPPPPPPPPPPGPPPPPGLPSDGDHQVPXXAGNKAALLDQIREGAQLKKVEQNSRPVSCSGRDALLDQIRQGIQLKSVADGQESXPPXPAPXSGIVGALMEVMQKRSKAIHSSDEDEDEDDEEDFEDDDEWED

SEQ ID NO: 29535 - protein, 215 aa, Homo sapiens
  MOD_RES (28)..(28): Selenocysteine
  MOD_RES (41)..(41): Selenocysteine
  MOD_RES (47)..(47): Selenocysteine
  MOD_RES (66)..(66): Selenocysteine
  MOD_RES (83)..(83): Selenocysteine
  MOD_RES (89)..(89): Selenocysteine
  MOD_RES (100)..(100): Selenocysteine
  MOD_RES (112)..(112): Selenocysteine
  MOD_RES (124)..(124): Selenocysteine
  MOD_RES (137)..(137): Selenocysteine
  MOD_RES (145)..(145): Selenocysteine
  MOD_RES (150)..(151): Selenocysteine
  MOD_RES (192)..(192): Selenocysteine
  MOD_RES (211)..(211): Selenocysteine
MAAEIHSRPQSSRPVLLSKIEGHQDAVXAALLIPKEDGVIXASEDRXIRVWLKRDSGQYWPSIYHXMASHQNRVSAIIFSLAXEWVISXGHDKCVSWMCXRSGNMLGRHFFXSWASCLQYDFDXQYAFVGDYSGQIXLLKLEQNXCSVIXXLKGHEGSVACLWWDPIQRLLFSGASDNSIIMWDIGGRKGRXLLLQGHHDKVQSLCYLQLXRQLV

SEQ ID NO: 29536 - protein, 410 aa, Homo sapiens
  MOD_RES (28)..(28): Selenocysteine
  MOD_RES (41)..(41): Selenocysteine
  MOD_RES (47)..(47): Selenocysteine
  MOD_RES (66)..(66): Selenocysteine
  MOD_RES (109)..(109): Selenocysteine
  MOD_RES (126)..(126): Selenocysteine
  MOD_RES (132)..(132): Selenocysteine
  MOD_RES (143)..(143): Selenocysteine
  MOD_RES (155)..(155): Selenocysteine
  MOD_RES (167)..(167): Selenocysteine
  MOD_RES (180)..(180): Selenocysteine
  MOD_RES (188)..(188): Selenocysteine
  MOD_RES (193)..(194): Selenocysteine
  MOD_RES (235)..(235): Selenocysteine
  MOD_RES (254)..(254): Selenocysteine
  MOD_RES (304)..(304): Selenocysteine
  MOD_RES (306)..(306): Selenocysteine
  MOD_RES (357)..(357): Selenocysteine
  MOD_RES (361)..(361): Selenocysteine
  MOD_RES (383)..(383): Selenocysteine
  MOD_RES (386)..(386): Selenocysteine
  MOD_RES (396)..(396): Selenocysteine
  MOD_RES (405)..(405): Selenocysteine
MAAEIHSRPQSSRPVLLSKIEGHQDAVXAALLIPKEDGVIXASEDRXIRVWLKRDSGQYWPSIYHXMASPCSAMAYHHDSRRIFVGQDNGAVMEFHVSEDFNKMNFIKXYPAHQNRVSAIIFSLAXEWVISXGHDKCVSWMCXRSGNMLGRHFFXSWASCLQYDFDXQYAFVGDYSGQIXLLKLEQNXCSVIXXLKGHEGSVACLWWDPIQRLLFSGASDNSIIMWDIGGRKGRXLLLQGHHDKVQSLCYLQLXRQLVSCSSDGGIAVWNMDVSREEAPQWLESDSCQKCEQPFFWNIKQMWDXKXLGLRQHHCRKCGQAVCGKCSSKRSSYPVMGFEFQVRVCDSCYDSIKDEDRXSLAXFHEGKHNISHMSMDIARGLMVXCGXDRIVKIWDMXPVVGCSLAXGFSPH

SEQ ID NO: 29537 - protein, 8 aa, Homo sapiens
MESSDVNK

SEQ ID NO: 29538 - protein, 554 aa, Homo sapiens
  MOD_RES (32)..(33): Selenocysteine
  MOD_RES (90)..(90): Selenocysteine
  MOD_RES (101)..(101): Selenocysteine
  MOD_RES (109)..(109): Selenocysteine
  MOD_RES (140)..(140): Selenocysteine
  MOD_RES (156)..(156): Selenocysteine
  MOD_RES (174)..(174): Selenocysteine
  MOD_RES (179)..(179): Selenocysteine
  MOD_RES (184)..(184): Selenocysteine
  MOD_RES (233)..(233): Selenocysteine
  MOD_RES (290)..(290): Selenocysteine
  MOD_RES (323)..(323): Selenocysteine
  MOD_RES (345)..(345): Selenocysteine
  MOD_RES (354)..(354): Selenocysteine
  MOD_RES (358)..(358): Selenocysteine
  MOD_RES (363)..(363): Selenocysteine
  MOD_RES (370)..(370): Selenocysteine
  MOD_RES (443)..(443): Selenocysteine
  MOD_RES (485)..(485): Selenocysteine
  MOD_RES (521)..(521): Selenocysteine
  MOD_RES (523)..(523): Selenocysteine
MESSDVNKRLEKLSALDYKIFYYEIPGPINKXXERHLAINCVHDRVVCWWPLVNDDAWPWAPISSEKDRANLLLLGYAQGRLEVLSSVRXEWDPLDVRFGXKQPYQVFXVEHSVSVDKEPMADSCIYECIRNKIQCVSVXRIPLKSKAISCCRNVXEDKLILGCEDSSLILYEXHRRVXLLAQXELLPSLISCHPSGAILLVGSNQGELQIFDMALSPINIQLLAEDRLPREXLQFSKLFDASSSLVQMQWIAPQVVSQKGEGSDIYDLLFLRFERGPLGVLLFKLGVFXRGQLGLIDIIFQYIHCDEIYEAINILSSMNWDXLGHQCFISMSAIVNHLLRQKLXPEREAQLEXSLGXFYAPXRPLLDSXILEYRDQISKYARRFFHHLLRYQRFEKAFLLAVDVGARDLFMDIHYLALDKGELALAEVARKRASDIDAESIXSGVELLGPLDRGDMLNEAFIGLSLAPQGEDSFPDNLPPSCPXHRHILQQRILNGSSNRQIIDRRNELEKDICSGFLMXNXCNAEDGELREDGREQEIRDGGSLKMIHFGLV

SEQ ID NO: 29539 - protein, 587 aa, Homo sapiens
  MOD_RES (11)..(11): Selenocysteine
  MOD_RES (31)..(31): Selenocysteine
  MOD_RES (65)..(66): Selenocysteine
  MOD_RES (123)..(123): Selenocysteine
  MOD_RES (134)..(134): Selenocysteine
  MOD_RES (142)..(142): Selenocysteine
  MOD_RES (173)..(173): Selenocysteine
  MOD_RES (189)..(189): Selenocysteine
  MOD_RES (207)..(207): Selenocysteine
  MOD_RES (212)..(212): Selenocysteine
  MOD_RES (217)..(217): Selenocysteine
  MOD_RES (266)..(266): Selenocysteine
  MOD_RES (323)..(323): Selenocysteine
  MOD_RES (356)..(356): Selenocysteine
  MOD_RES (378)..(378): Selenocysteine
  MOD_RES (387)..(387): Selenocysteine
  MOD_RES (391)..(391): Selenocysteine
  MOD_RES (396)..(396): Selenocysteine
  MOD_RES (403)..(403): Selenocysteine
  MOD_RES (476)..(476): Selenocysteine
  MOD_RES (518)..(518): Selenocysteine
  MOD_RES (554)..(554): Selenocysteine
  MOD_RES (556)..(556): Selenocysteine
MFSSLHSALLXDSFIILSFLAQNKLCFIQFXKKMESSDVNKRLEKLSALDYKIFYYEIPGPINKXXERHLAINCVHDRVVCWWPLVNDDAWPWAPISSEKDRANLLLLGYAQGRLEVLSSVRXEWDPLDVRFGXKQPYQVFXVEHSVSVDKEPMADSCIYECIRNKIQCVSVXRIPLKSKAISCCRNVXEDKLILGCEDSSLILYEXHRRVXLLAQXELLPSLISCHPSGAILLVGSNQGELQIFDMALSPINIQLLAEDRLPREXLQFSKLFDASSSLVQMQWIAPQVVSQKGEGSDIYDLLFLRFERGPLGVLLFKLGVFXRGQLGLIDIIFQYIHCDEIYEAINILSSMNWDXLGHQCFISMSAIVNHLLRQKLXPEREAQLEXSLGXFYAPXRPLLDSXILEYRDQISKYARRFFHHLLRYQRFEKAFLLAVDVGARDLFMDIHYLALDKGELALAEVARKRASDIDAESIXSGVELLGPLDRGDMLNEAFIGLSLAPQGEDSFPDNLPPSCPXHRHILQQRILNGSSNRQIIDRRNELEKDICSGFLMXNXCNAEDGELREDGREQEIRDGGSLKMIHFGLV

SEQ ID NO: 29540 - protein, 85 aa, Homo sapiens
  MOD_RES (39)..(39): Selenocysteine
  MOD_RES (49)..(49): Selenocysteine
  MOD_RES (76)..(76): Selenocysteine
MRREFCWDAYSKAAGSRASSPLPRQDRDSFCHQMSFCLXELHLWSLKNXLHIADRDIGIYQYYDKKDPPARDYPWXLKNRRPEKL

SEQ ID NO: 29541 - protein, 618 aa, Homo sapiens
  MOD_RES (39)..(39): Selenocysteine
  MOD_RES (49)..(49): Selenocysteine
  MOD_RES (71)..(71): Selenocysteine
  MOD_RES (91)..(91): Selenocysteine
  MOD_RES (163)..(163): Selenocysteine
  MOD_RES (170)..(170): Selenocysteine
  MOD_RES (190)..(190): Selenocysteine
  MOD_RES (224)..(225): Selenocysteine
  MOD_RES (282)..(282): Selenocysteine
  MOD_RES (293)..(293): Selenocysteine
  MOD_RES (301)..(301): Selenocysteine
  MOD_RES (332)..(332): Selenocysteine
  MOD_RES (348)..(348): Selenocysteine
  MOD_RES (366)..(366): Selenocysteine
  MOD_RES (371)..(371): Selenocysteine
  MOD_RES (376)..(376): Selenocysteine
  MOD_RES (425)..(425): Selenocysteine
  MOD_RES (482)..(482): Selenocysteine
  MOD_RES (515)..(515): Selenocysteine
  MOD_RES (537)..(537): Selenocysteine
  MOD_RES (546)..(546): Selenocysteine
  MOD_RES (550)..(550): Selenocysteine
  MOD_RES (555)..(555): Selenocysteine
  MOD_RES (562)..(562): Selenocysteine
  MOD_RES (610)..(610): Selenocysteine
  MOD_RES (614)..(615): Selenocysteine
MRREFCWDAYSKAAGSRASSPLPRQDRDSFCHQMSFCLXELHLWSLKNXLHIADRDIGIYQYYDKKDPPAXEHGNLEKKQKLAESRDYPWXLKNRRPEKLRDSLKELEELMQNSRCVLSKWKNKYVCQLLFGSGVLVSLSLSGPQLEKVVIDRSLVGKLISDXISDALLXDSFIILSFLAQNKLCFIQFXKKMESSDVNKRLEKLSALDYKIFYYEIPGPINKXXERHLAINCVHDRVVCWWPLVNDDAWPWAPISSEKDRANLLLLGYAQGRLEVLSSVRXEWDPLDVRFGXKQPYQVFXVEHSVSVDKEPMADSCIYECIRNKIQCVSVXRIPLKSKAISCCRNVXEDKLILGCEDSSLILYEXHRRVXLLAQXELLPSLISCHPSGAILLVGSNQGELQIFDMALSPINIQLLAEDRLPREXLQFSKLFDASSSLVQMQWIAPQVVSQKGEGSDIYDLLFLRFERGPLGVLLFKLGVFXRGQLGLIDIIFQYIHCDEIYEAINILSSMNWDXLGHQCFISMSAIVNHLLRQKLXPEREAQLEXSLGXFYAPXRPLLDSXILEYRDQISKYARRFFHHLLRYQRFEKAFLLAVDVGARDLFMASCYLXSNYXXRLQ

SEQ ID NO: 29542 - protein, 746 aa, Homo sapiens
  MOD_RES (39)..(39): Selenocysteine
  MOD_RES (49)..(49): Selenocysteine
  MOD_RES (71)..(71): Selenocysteine
  MOD_RES (91)..(91): Selenocysteine
  MOD_RES (163)..(163): Selenocysteine
  MOD_RES (170)..(170): Selenocysteine
  MOD_RES (190)..(190): Selenocysteine
  MOD_RES (224)..(225): Selenocysteine
  MOD_RES (282)..(282): Selenocysteine
  MOD_RES (293)..(293): Selenocysteine
  MOD_RES (301)..(301): Selenocysteine
  MOD_RES (332)..(332): Selenocysteine
  MOD_RES (348)..(348): Selenocysteine
  MOD_RES (366)..(366): Selenocysteine
  MOD_RES (371)..(371): Selenocysteine
  MOD_RES (376)..(376): Selenocysteine
  MOD_RES (425)..(425): Selenocysteine
  MOD_RES (482)..(482): Selenocysteine
  MOD_RES (515)..(515): Selenocysteine
  MOD_RES (537)..(537): Selenocysteine
  MOD_RES (546)..(546): Selenocysteine
  MOD_RES (550)..(550): Selenocysteine
  MOD_RES (555)..(555): Selenocysteine
  MOD_RES (562)..(562): Selenocysteine
  MOD_RES (635)..(635): Selenocysteine
  MOD_RES (677)..(677): Selenocysteine
  MOD_RES (713)..(713): Selenocysteine
  MOD_RES (715)..(715): Selenocysteine
MRREFCWDAYSKAAGSRASSPLPRQDRDSFCHQMSFCLXELHLWSLKNXLHIADRDIGIYQYYDKKDPPAXEHGNLEKKQKLAESRDYPWXLKNRRPEKLRDSLKELEELMQNSRCVLSKWKNKYVCQLLFGSGVLVSLSLSGPQLEKVVIDRSLVGKLISDXISDALLXDSFIILSFLAQNKLCFIQFXKKMESSDVNKRLEKLSALDYKIFYYEIPGPINKXXERHLAINCVHDRVVCWWPLVNDDAWPWAPISSEKDRANLLLLGYAQGRLEVLSSVRXEWDPLDVRFGXKQPYQVFXVEHSVSVDKEPMADSCIYECIRNKIQCVSVXRIPLKSKAISCCRNVXEDKLILGCEDSSLILYEXHRRVXLLAQXELLPSLISCHPSGAILLVGSNQGELQIFDMALSPINIQLLAEDRLPREXLQFSKLFDASSSLVQMQWIAPQVVSQKGEGSDIYDLLFLRFERGPLGVLLFKLGVFXRGQLGLIDIIFQYIHCDEIYEAINILSSMNWDXLGHQCFISMSAIVNHLLRQKLXPEREAQLEXSLGXFYAPXRPLLDSXILEYRDQISKYARRFFHHLLRYQRFEKAFLLAVDVGARDLFMDIHYLALDKGELALAEVARKRASDIDAESIXSGVELLGPLDRGDMLNEAFIGLSLAPQGEDSFPDNLPPSCPXHRHILQQRILNGSSNRQIIDRRNELEKDICSGFLMXNXCNAEDGELREDGREQEIRDGGSLKMIHFGLV

SEQ ID NO: 29543 - protein, 46 aa, Homo sapiens
  MOD_RES (27)..(27): Selenocysteine
  MOD_RES (35)..(35): Selenocysteine
  MOD_RES (44)..(44): Selenocysteine
MRREFCWDAYSKAAGSRASSPLPRQKXMINSGQNXENPQLSEGXGE

SEQ ID NO: 29544 - protein, 132 aa, Homo sapiens
  MOD_RES (1)..(1): Any amino acid
  MOD_RES (38)..(38): Selenocysteine
  MOD_RES (48)..(48): Selenocysteine
  MOD_RES (70)..(70): Selenocysteine
  MOD_RES (90)..(90): Selenocysteine
XREFCWDAYSKAAGSRASSPLPRQDRDSFCHQMSFCLXELHLWSLKNXLHIADRDIGIYQYYDKKDPPAXEHGNLEKKQKLAESRDYPWXLKNRRPEKLRDSLKELEELMQNSRCVLSKWKNKYVCQVCWCL

SEQ ID NO: 29545 - protein, 402 aa, Homo sapiens
  MOD_RES (11)..(12): Selenocysteine
  MOD_RES (69)..(69): Selenocysteine
  MOD_RES (80)..(80): Selenocysteine
  MOD_RES (88)..(88): Selenocysteine
  MOD_RES (119)..(119): Selenocysteine
  MOD_RES (135)..(135): Selenocysteine
  MOD_RES (153)..(153): Selenocysteine
  MOD_RES (158)..(158): Selenocysteine
  MOD_RES (163)..(163): Selenocysteine
  MOD_RES (212)..(212): Selenocysteine
  MOD_RES (269)..(269): Selenocysteine
  MOD_RES (302)..(302): Selenocysteine
  MOD_RES (324)..(324): Selenocysteine
  MOD_RES (333)..(333): Selenocysteine
  MOD_RES (337)..(337): Selenocysteine
  MOD_RES (342)..(342): Selenocysteine
  MOD_RES (349)..(349): Selenocysteine
  MOD_RES (398)..(398): Selenocysteine
YYEIPGPINKXXERHLAINCVHDRVVCWWPLVNDDAWPWAPISSEKDRANLLLLGYAQGRLEVLSSVRXEWDPLDVRFGXKQPYQVFXVEHSVSVDKEPMADSCIYECIRNKIQCVSVXRIPLKSKAISCCRNVXEDKLILGCEDSSLILYEXHRRVXLLAQXELLPSLISCHPSGAILLVGSNQGELQIFDMALSPINIQLLAEDRLPREXLQFSKLFDASSSLVQMQWIAPQVVSQKGEGSDIYDLLFLRFERGPLGVLLFKLGVFXRGQLGLIDIIFQYIHCDEIYEAINILSSMNWDXLGHQCFISMSAIVNHLLRQKLXPEREAQLEXSLGXFYAPXRPLLDSXILEYRDQISKYARRFFHHLLRYQRFEKAFLLAVDVGARDLFMNSWDPWXEGIC

SEQ ID NO: 29546 - protein, 423 aa, Homo sapiens
  MOD_RES (6)..(6): Selenocysteine
  MOD_RES (10)..(10): Selenocysteine
  MOD_RES (90)..(90): Selenocysteine
  MOD_RES (116)..(116): Selenocysteine
  MOD_RES (122)..(122): Selenocysteine
  MOD_RES (135)..(135): Selenocysteine
  MOD_RES (140)..(140): Selenocysteine
  MOD_RES (166)..(166): Selenocysteine
  MOD_RES (202)..(202): Selenocysteine
  MOD_RES (218)..(218): Selenocysteine
  MOD_RES (221)..(221): Selenocysteine
  MOD_RES (231)..(231): Selenocysteine
  MOD_RES (240)..(240): Selenocysteine
  MOD_RES (246)..(246): Selenocysteine
  MOD_RES (248)..(248): Selenocysteine
  MOD_RES (252)..(252): Selenocysteine
  MOD_RES (279)..(279): Selenocysteine
  MOD_RES (293)..(293): Selenocysteine
  MOD_RES (295)..(295): Selenocysteine
  MOD_RES (317)..(317): Selenocysteine
  MOD_RES (328)..(328): Selenocysteine
  MOD_RES (339)..(339): Selenocysteine
  MOD_RES (342)..(342): Selenocysteine
  MOD_RES (346)..(346): Selenocysteine
  MOD_RES (353)..(353): Selenocysteine
  MOD_RES (372)..(372): Selenocysteine
  MOD_RES (395)..(395): Selenocysteine
  MOD_RES (397)..(397): Selenocysteine
  MOD_RES (417)..(418): Selenocysteine
MAQLQXRFYXDNKKYAVDDVPFSIPAASEIADLSNIINKLLKDKNEFHKHVEFDFLIKGQFLRMPLDKHMEMENISSEEVVEIEYVEKYXAPQPEQCMFHDDWISSIKGAEEWILXGSYDKXSRIWSLEGKSIMXIVGHXDVVKDVAWVKKDSLSCLLLSASMDQXILLWEWNVERNKVKALHCCRGHAGSVDSIAVDGSGXKFCSGSWDKMLKIWSXVPXDEEDEMEESXNRPRKKQKXEQLGLXRXPIVXLSGHMEAVSSVLWSDAEEICSASWDHXIRVWDVESGSLKSXLXGNKVFNCISYSPLCKRLASGSXDRHIRLWDPRXKDGSLVSLSLXSHXGWVXSVKWSPXHEQQLISGSLDNIVKLWDXRSCKAPLYDLAAHEDKVLSVDWXDXGLLLSGGADNKLYSYRYSPXXSHVGA

SEQ ID NO: 29547 - protein, 142 aa, Homo sapiens
  MOD_RES (27)..(27): Selenocysteine
  MOD_RES (30)..(30): Selenocysteine
  MOD_RES (57)..(57): Selenocysteine
  MOD_RES (69)..(69): Selenocysteine
  MOD_RES (80)..(80): Selenocysteine
  MOD_RES (84)..(84): Selenocysteine
  MOD_RES (104)..(104): Selenocysteine
  MOD_RES (112)..(112): Selenocysteine
  MOD_RES (116)..(116): Selenocysteine
  MOD_RES (136)..(136): Selenocysteine
MDWDKDGDVLAVIAEKSSCIYLWDANXNKXSQLDNGMRDQMSFLLWSKVGSFLAVGXVKGNLLIYNHQXSRKIPVLGKHXKRIXCGCWNAENLLALGGEDKMIXVSNQEGDXIRQXQVRSEPSNMQFFLMKMDDRXSAAESM

SEQ ID NO: 29548 - protein, 42 aa, Homo sapiens
  MOD_RES (3)..(3): Selenocysteine
  MOD_RES (11)..(11): Selenocysteine
  MOD_RES (15)..(15): Selenocysteine
  MOD_RES (35)..(35): Selenocysteine
MIXVSNQEGDXIRQXQVRSEPSNMQFFLMKMDDRXSAAESMV

SEQ ID NO: 29549 - protein, 481 aa, Homo sapiens
  MOD_RES (11)..(11): Selenocysteine
  MOD_RES (24)..(24): Selenocysteine
  MOD_RES (32)..(32): Selenocysteine
  MOD_RES (86)..(86): Selenocysteine
  MOD_RES (89)..(89): Selenocysteine
  MOD_RES (116)..(116): Selenocysteine
  MOD_RES (128)..(128): Selenocysteine
  MOD_RES (139)..(139): Selenocysteine
  MOD_RES (143)..(143): Selenocysteine
  MOD_RES (163)..(163): Selenocysteine
  MOD_RES (171)..(171): Selenocysteine
  MOD_RES (175)..(175): Selenocysteine
  MOD_RES (195)..(195): Selenocysteine
  MOD_RES (210)..(210): Selenocysteine
  MOD_RES (259)..(259): Selenocysteine
  MOD_RES (261)..(261): Selenocysteine
  MOD_RES (279)..(279): Selenocysteine
  MOD_RES (286)..(286): Selenocysteine
  MOD_RES (292)..(292): Selenocysteine
  MOD_RES (324)..(324): Selenocysteine
  MOD_RES (328)..(328): Selenocysteine
  MOD_RES (338)..(338): Selenocysteine
  MOD_RES (348)..(348): Selenocysteine
  MOD_RES (359)..(359): Selenocysteine
  MOD_RES (365)..(365): Selenocysteine
  MOD_RES (371)..(371): Selenocysteine
  MOD_RES (383)..(383): Selenocysteine
  MOD_RES (429)..(429): Selenocysteine
MKRIFSLLEKXWLGAPIQFAWQKXSGNYLAVXGADYIVKIFDRHGQKRSEINLPGNCVAMDWDKDGDVLAVIAEKSSCIYLWDANXNKXSQLDNGMRDQMSFLLWSKVGSFLAVGXVKGNLLIYNHQXSRKIPVLGKHXKRIXCGCWNAENLLALGGEDKMIXVSNQEGDXIRQXQVRSEPSNMQFFLMKMDDRXSAAESMISVVLGKKXLFFLNLNEPDNPADLEFQQDFGNIVCYNWYGDGRIMIGFSCGHFVVISXHXGELGQEIFQARNHKDNLXSIAVSQXLNKVAXCGDNCIKIQDLVDLKDMYVILNLDEENKGLGXLSWXDDGQLLALSXQRGSLHVFLXKLPILGDACSXRIAYLXSLLEVXVANPVEGELPIXVSVDVEPNFVAVGLYHLAVGMNNRAWFYVLGENAVKKLKDMEYLGXVASICLHSDYAAALFEGKVQLHLKAKSWMLKKNVRLGFSQQWMISAVSYAMP

SEQ ID NO: 29550 - protein, 1342 aa, Homo sapiens
  MOD_RES (11)..(11): Selenocysteine
  MOD_RES (24)..(24): Selenocysteine
  MOD_RES (32)..(32): Selenocysteine
  MOD_RES (86)..(86): Selenocysteine
  MOD_RES (89)..(89): Selenocysteine
  MOD_RES (116)..(116): Selenocysteine
  MOD_RES (128)..(128): Selenocysteine
  MOD_RES (139)..(139): Selenocysteine
  MOD_RES (143)..(143): Selenocysteine
  MOD_RES (163)..(163): Selenocysteine
  MOD_RES (171)..(171): Selenocysteine
  MOD_RES (175)..(175): Selenocysteine
  MOD_RES (195)..(195): Selenocysteine
  MOD_RES (210)..(210): Selenocysteine
  MOD_RES (259)..(259): Selenocysteine
  MOD_RES (261)..(261): Selenocysteine
  MOD_RES (279)..(279): Selenocysteine
  MOD_RES (286)..(286): Selenocysteine
  MOD_RES (292)..(292): Selenocysteine
  MOD_RES (324)..(324): Selenocysteine
  MOD_RES (328)..(328): Selenocysteine
  MOD_RES (338)..(338): Selenocysteine
  MOD_RES (348)..(348): Selenocysteine
  MOD_RES (359)..(359): Selenocysteine
  MOD_RES (365)..(365): Selenocysteine
  MOD_RES (371)..(371): Selenocysteine
  MOD_RES (383)..(383): Selenocysteine
  MOD_RES (429)..(429): Selenocysteine
  MOD_RES (466)..(466): Selenocysteine
  MOD_RES (484)..(484): Selenocysteine
  MOD_RES (492)..(492): Selenocysteine
  MOD_RES (494)..(494): Selenocysteine
  MOD_RES (527)..(527): Selenocysteine
  MOD_RES (548)..(548): Selenocysteine
  MOD_RES (557)..(557): Selenocysteine
  MOD_RES (583)..(583): Selenocysteine
  MOD_RES (590)..(590): Selenocysteine
  MOD_RES (602)..(602): Selenocysteine
  MOD_RES (619)..(619): Selenocysteine
  MOD_RES (622)..(622): Selenocysteine
  MOD_RES (634)..(634): Selenocysteine
  MOD_RES (644)..(644): Selenocysteine
  MOD_RES (730)..(730): Selenocysteine
  MOD_RES (803)..(803): Selenocysteine
  MOD_RES (948)..(948): Selenocysteine
  MOD_RES (985)..(985): Selenocysteine
  MOD_RES (1005)..(1006): Selenocysteine
  MOD_RES (1061)..(1061): Selenocysteine
  MOD_RES (1071)..(1071): Selenocysteine
  MOD_RES (1108)..(1108): Selenocysteine
  MOD_RES (1149)..(1149): Selenocysteine
  MOD_RES (1195)..(1195): Selenocysteine
  MOD_RES (1197)..(1197): Selenocysteine
  MOD_RES (1250)..(1251): Selenocysteine
  MOD_RES (1280)..(1280): Selenocysteine
  MOD_RES (1290)..(1290): Selenocysteine
  MOD_RES (1310)..(1310): Selenocysteine
  MOD_RES (1313)..(1313): Selenocysteine
  MOD_RES (1333)..(1333): Selenocysteine
  MOD_RES (1338)..(1338): Selenocysteine
MKRIFSLLEKXWLGAPIQFAWQKXSGNYLAVXGADYIVKIFDRHGQKRSEINLPGNCVAMDWDKDGDVLAVIAEKSSCIYLWDANXNKXSQLDNGMRDQMSFLLWSKVGSFLAVGXVKGNLLIYNHQXSRKIPVLGKHXKRIXCGCWNAENLLALGGEDKMIXVSNQEGDXIRQXQVRSEPSNMQFFLMKMDDRXSAAESMISVVLGKKXLFFLNLNEPDNPADLEFQQDFGNIVCYNWYGDGRIMIGFSCGHFVVISXHXGELGQEIFQARNHKDNLXSIAVSQXLNKVAXCGDNCIKIQDLVDLKDMYVILNLDEENKGLGXLSWXDDGQLLALSXQRGSLHVFLXKLPILGDACSXRIAYLXSLLEVXVANPVEGELPIXVSVDVEPNFVAVGLYHLAVGMNNRAWFYVLGENAVKKLKDMEYLGXVASICLHSDYAAALFEGKVQLHLIESEILDAQEEREXRLFPAVDDKCRILCHALXSDFLIYGXDXGVVQYFYIEDWQFVNDYRHPVSVKKIFPDPNGXRLVFIDEKSDGFVYCPVNDAXYEIPDFSPXIKGVLWENWPMDKGVFIAYDDDKVYXYVFHKDXIQGAKVILAGSXKVPFAHKPLLLYNGELXCQXQSGKVNNIYLSXHGFLSNLKDXGPDELRPMLAQNLMLKRFSDAWEMCRILNDEAAWNELARACLHHMEVEFAIRVYRRIGNVGIVMSLEQIKGIEDYNLLAGHLAMFXNDYNLAQDLYLASSCPIAALEMRRDLQHWDSALQLAKHLAPDQIPFISKEYAIQLEFAGDYVNALAHYEKGIXGDNKEHDEACLAGVAQMSIRMGDIRRGVNQALKHPSRVLKRDCGAILENMKQFSEAAQLYEKGLYYDKAASVYIRSKNWAKVGDLLPHVSSPKIHLQYAKAKEADGRYKEAVVAYENAKQWQSVIRIYLDHLNNPEKAVNIVREXQSLDGAKMVARFFLQLGDYGSAIQFLVMSKCNNEAFXLAQQHNKMEIYADIIGSEDXXNEDYQSIALYFEGEKRYLQAGKFFLLCGQYSRALKHFLKCPSSEDNVAIEMAIEXVGQAKDELLXNQLIDHLLGENDGMPKDAKYLFRLYMALKQYREAAQXAIIIAREEQSAGNYRNAHDVLFSMYAELKSQKIKIPSEMAXNLMILHSYILVKIHVKNGDHMKGARMLIRVANNISKFPSHIVPILXSXVIECHRAGLKNSAFSFAAMLMRPEYRSKIDAKYKKKIEGMVRRPDISEIEEAXXPCPFCKFLLPECELLCPGCKNSIPYCIAXGRHMLKDDWXVCPHCDFPALYSELKIMLNXESXCPMCSERLNAAQLKKISDCXQYLRXEEEL

SEQ ID NO: 29551 - protein, 99 aa, Homo sapiens
  MOD_RES (11)..(11): Selenocysteine
  MOD_RES (24)..(24): Selenocysteine
  MOD_RES (32)..(32): Selenocysteine
  MOD_RES (86)..(86): Selenocysteine
  MOD_RES (89)..(89): Selenocysteine
MKRIFSLLEKXWLGAPIQFAWQKXSGNYLAVXGADYIVKIFDRHGQKRSEINLPGNCVAMDWDKDGDVLAVIAEKSSCIYLWDANXNKXSQLDNGMRHK

SEQ ID NO: 29552 - protein, 100 aa, Homo sapiens
  MOD_RES (11)..(11): Selenocysteine
  MOD_RES (24)..(24): Selenocysteine
  MOD_RES (32)..(32): Selenocysteine
  MOD_RES (86)..(86): Selenocysteine
  MOD_RES (89)..(89): Selenocysteine
  MOD_RES (99)..(99): Selenocysteine
MKRIFSLLEKXWLGAPIQFAWQKXSGNYLAVXGADYIVKIFDRHGQKRSEINLPGNCVAMDWDKDGDVLAVIAEKSSCIYLWDANXNKXSQLDNGMRKXY

SEQ ID NO: 29553 - protein, 78 aa, Homo sapiens
  MOD_RES (11)..(11): Selenocysteine
  MOD_RES (24)..(24): Selenocysteine
  MOD_RES (32)..(32): Selenocysteine
  MOD_RES (64)..(64): Selenocysteine
  MOD_RES (67)..(67): Selenocysteine
  MOD_RES (77)..(77): Selenocysteine
MKRIFSLLEKXWLGAPIQFAWQKXSGNYLAVXGNCVAMDWDKDGDVLAVIAEKSSCIYLWDANXNKXSQLDNGMRKXY

SEQ ID NO: 29554 - protein, 135 aa, Homo sapiens
  MOD_RES (1)..(1): Any amino acid
  MOD_RES (12)..(12): Selenocysteine
  MOD_RES (15)..(15): Selenocysteine
  MOD_RES (27)..(27): Selenocysteine
  MOD_RES (37)..(37): Selenocysteine
  MOD_RES (109)..(109): Selenocysteine
  MOD_RES (115)..(115): Selenocysteine
  MOD_RES (118)..(118): Selenocysteine
  MOD_RES (122)..(122): Selenocysteine
  MOD_RES (124)..(124): Selenocysteine
XKPLLLYNGELXCQXQSGKVNNIYLSXHGFLSNLKDXGPDELRPMLAQNLMLKRFSDAWEMCRILNDEAAWNELARACLHHMEVEFAIRVYRRIGNVGIVMSLEQIKDXLPCLPXIIXWLRXCXLHPAVLLLPWR

SEQ ID NO: 29555 - protein, 790 aa, Homo sapiens
  MOD_RES (8)..(9): Selenocysteine
  MOD_RES (17)..(17): Selenocysteine
  MOD_RES (20)..(20): Selenocysteine
  MOD_RES (92)..(92): Selenocysteine
  MOD_RES (95)..(95): Selenocysteine
  MOD_RES (101)..(101): Selenocysteine
  MOD_RES (117)..(117): Selenocysteine
  MOD_RES (122)..(122): Selenocysteine
  MOD_RES (131)..(131): Selenocysteine
  MOD_RES (158)..(158): Selenocysteine
  MOD_RES (178)..(178): Selenocysteine
  MOD_RES (182)..(182): Selenocysteine
  MOD_RES (204)..(204): Selenocysteine
  MOD_RES (225)..(225): Selenocysteine
  MOD_RES (238)..(239): Selenocysteine
  MOD_RES (250)..(250): Selenocysteine
  MOD_RES (269)..(269): Selenocysteine
  MOD_RES (300)..(301): Selenocysteine
  MOD_RES (370)..(370): Selenocysteine
  MOD_RES (402)..(402): Selenocysteine
  MOD_RES (415)..(415): Selenocysteine
  MOD_RES (448)..(448): Selenocysteine
  MOD_RES (450)..(450): Selenocysteine
  MOD_RES (464)..(464): Selenocysteine
  MOD_RES (498)..(498): Selenocysteine
  MOD_RES (511)..(511): Selenocysteine
  MOD_RES (519)..(519): Selenocysteine
  MOD_RES (522)..(522): Selenocysteine
  MOD_RES (529)..(529): Selenocysteine
  MOD_RES (581)..(581): Selenocysteine
  MOD_RES (672)..(672): Selenocysteine
  MOD_RES (678)..(678): Selenocysteine
  MOD_RES (701)..(701): Selenocysteine
  MOD_RES (713)..(714): Selenocysteine
MEKMSRVXXALGGSVLXGRXMHCHLDAPANAISVCRDAAQVVVAGRSIFKIYAIEEEQFVEKLNLRVGRKPSLNLSCADVVWHQMDENLLAXAAXNGVVVXWNLGRPSRNKQDQLFXEHKRXVNKVCFHPXEAHVLLSGSQDGFMKCFDLRRKDSVSXFSGQSESVRDVQFSIRDYFXFASXFENGNVQLWDIRRPDRCERMFXAHNGPVFCCDWHPEDRGWLAXGGRDKMVKVWDMXXHRAKEMHCVQXIASVARVKWRPECRHHLAXCSMMVDHNIYVWDVRRPFVPAAMFEEHRDVXXGIAWRHPHDPSFLLSGSKDSSLCQHLFRDASQPVERANPEGLCYGLFGDLAFAAKESLVAAESGRKPYXGDRRHPIFFKRKLDPAEPFAGLASSALSVFEXEPGGGGMRWFVDXAERYALAGRPLAELCDHNAKVARELGRNQVAQXWXMLRIIYCSPGLVPXANLNHSVGKGGSCGLPLMNSFNLKDMAPGLGSEXRLDRSKGDARSDXVLLDSSAXLIXNEDNEEXEGSDVPADYLLGDVEGEEDELYLLDPEHAHPEDPECVLPQEAFPLRHEIVDXPPGPEHLQDKADSPHVSGSEADVASLAPVDSSFSLLSVSHALYDSRLPPDFFGVLVRDMLHFYAEQGDVQMAVSVLIVLGERVRKDIDEQXQEHWYXSYIDLLQRFRLWNVSNEVVKLSXSRAVSCLNQASXXLHVNCSHCKRPMSSRGWVCDRCHRCASMCAVCHHVVKGLFVWCQGCSHGGHLQHIMKWLEGSSHCPAGCGHLCEYS

SEQ ID NO: 29556 - protein, 920 aa, Homo sapiens
  MOD_RES (6)..(7): Selenocysteine
  MOD_RES (24)..(25): Selenocysteine
  MOD_RES (48)..(48): Selenocysteine
  MOD_RES (70)..(71): Selenocysteine
  MOD_RES (79)..(79): Selenocysteine
  MOD_RES (82)..(82): Selenocysteine
  MOD_RES (154)..(154): Selenocysteine
  MOD_RES (157)..(157): Selenocysteine
  MOD_RES (163)..(163): Selenocysteine
  MOD_RES (179)..(179): Selenocysteine
  MOD_RES (184)..(184): Selenocysteine
  MOD_RES (193)..(193): Selenocysteine
  MOD_RES (220)..(220): Selenocysteine
  MOD_RES (226)..(226): Selenocysteine
  MOD_RES (267)..(267): Selenocysteine
  MOD_RES (308)..(308): Selenocysteine
  MOD_RES (312)..(312): Selenocysteine
  MOD_RES (334)..(334): Selenocysteine
  MOD_RES (355)..(355): Selenocysteine
  MOD_RES (368)..(369): Selenocysteine
  MOD_RES (380)..(380): Selenocysteine
  MOD_RES (399)..(399): Selenocysteine
  MOD_RES (430)..(431): Selenocysteine
  MOD_RES (500)..(500): Selenocysteine
  MOD_RES (532)..(532): Selenocysteine
  MOD_RES (545)..(545): Selenocysteine
  MOD_RES (578)..(578): Selenocysteine
  MOD_RES (580)..(580): Selenocysteine
  MOD_RES (594)..(594): Selenocysteine
  MOD_RES (628)..(628): Selenocysteine
  MOD_RES (641)..(641): Selenocysteine
  MOD_RES (649)..(649): Selenocysteine
  MOD_RES (652)..(652): Selenocysteine
  MOD_RES (659)..(659): Selenocysteine
  MOD_RES (711)..(711): Selenocysteine
  MOD_RES (802)..(802): Selenocysteine
  MOD_RES (808)..(808): Selenocysteine
  MOD_RES (831)..(831): Selenocysteine
  MOD_RES (843)..(844): Selenocysteine
MGKKRXXSGEGRERQRLPARRFRXXSPAALRADSVDGGSLLAPLLGLXDRAFSDCPDLADGAMEKMSRVXXALGGSVLXGRXMHCHLDAPANAISVCRDAAQVVVAGRSIFKIYAIEEEQFVEKLNLRVGRKPSLNLSCADVVWHQMDENLLAXAAXNGVVVXWNLGRPSRNKQDQLFXEHKRXVNKVCFHPXEAHVLLSGSQDGFMKCFDLRRKDSVSXFSGEAXEAGPREWAMAGCVPILPVLSCRILRLHHSFAHGPMQDAESXANDARESWGCPLYPLGLCSGPQAGQSESVRDVQFSIRDYFXFASXFENGNVQLWDIRRPDRCERMFXAHNGPVFCCDWHPEDRGWLAXGGRDKMVKVWDMXXHRAKEMHCVQXIASVARVKWRPECRHHLAXCSMMVDHNIYVWDVRRPFVPAAMFEEHRDVXXGIAWRHPHDPSFLLSGSKDSSLCQHLFRDASQPVERANPEGLCYGLFGDLAFAAKESLVAAESGRKPYXGDRRHPIFFKRKLDPAEPFAGLASSALSVFEXEPGGGGMRWFVDXAERYALAGRPLAELCDHNAKVARELGRNQVAQXWXMLRIIYCSPGLVPXANLNHSVGKGGSCGLPLMNSFNLKDMAPGLGSEXRLDRSKGDARSDXVLLDSSAXLIXNEDNEEXEGSDVPADYLLGDVEGEEDELYLLDPEHAHPEDPECVLPQEAFPLRHEIVDXPPGPEHLQDKADSPHVSGSEADVASLAPVDSSFSLLSVSHALYDSRLPPDFFGVLVRDMLHFYAEQGDVQMAVSVLIVLGERVRKDIDEQXQEHWYXSYIDLLQRFRLWNVSNEVVKLSXSRAVSCLNQASXXLHVNCSHCKRPMSSRGWVCDRCHRCASMCAVCHHVVKGLFVWCQGCSHGGHLQHIMKWLEGSSHCPAGCGHLCEYS

SEQ ID NO: 29557 - protein, 35 aa, Homo sapiens
  MOD_RES (20)..(20): Selenocysteine
MAARWSSENVVVEFRDSQAXAMSVDCLGQHAVLSG

SEQ ID NO: 29558 - protein, 571 aa, Homo sapiens
  MOD_RES (20)..(20): Selenocysteine
  MOD_RES (99)..(100): Selenocysteine
  MOD_RES (105)..(105): Selenocysteine
  MOD_RES (123)..(123): Selenocysteine
  MOD_RES (128)..(128): Selenocysteine
  MOD_RES (138)..(138): Selenocysteine
  MOD_RES (142)..(142): Selenocysteine
  MOD_RES (166)..(166): Selenocysteine
  MOD_RES (182)..(182): Selenocysteine
  MOD_RES (209)..(209): Selenocysteine
  MOD_RES (243)..(243): Selenocysteine
  MOD_RES (251)..(251): Selenocysteine
  MOD_RES (273)..(273): Selenocysteine
  MOD_RES (277)..(277): Selenocysteine
  MOD_RES (304)..(304): Selenocysteine
  MOD_RES (310)..(310): Selenocysteine
  MOD_RES (348)..(348): Selenocysteine
  MOD_RES (351)..(351): Selenocysteine
  MOD_RES (354)..(354): Selenocysteine
  MOD_RES (359)..(359): Selenocysteine
  MOD_RES (390)..(390): Selenocysteine
  MOD_RES (417)..(417): Selenocysteine
  MOD_RES (451)..(452): Selenocysteine
  MOD_RES (454)..(454): Selenocysteine
  MOD_RES (456)..(456): Selenocysteine
  MOD_RES (468)..(468): Selenocysteine
  MOD_RES (513)..(513): Selenocysteine
  MOD_RES (518)..(518): Selenocysteine
  MOD_RES (523)..(524): Selenocysteine
  MOD_RES (539)..(539): Selenocysteine
  MOD_RES (554)..(554): Selenocysteine
  MOD_RES (558)..(558): Selenocysteine
  MOD_RES (566)..(566): Selenocysteine
  MOD_RES (569)..(569): Selenocysteine
MAARWSSENVVVEFRDSQAXAMSVDCLGQHAVLSGRRFLYIVNLDAPFEGHRKISRQSKWDIGAVQWNPHDSFAHYFAASSNQRVDLYKWKDGSGEVGXXLQGHXRVISDLDWAVFEPDLLVXSSVDXYIYIWDIKDXRKPXVALSAVAGASQVKWNKKNANCLAXSHDGDVRIWDKRKPSXAVEYLAAHLSKIHGLDWHPDSEHILAXSSQDNSVKFWDYRQPRKYLNILPCQVPVWKARYXPFSNGLVXVMVPQLRRENSLLLWNVFDLNXPVHXFVGHDDVVLEFQWRKQKEGSKDYQLVXWSRDQXLRMWRVDSQMQRLCANDILDGVDEFIESISLLPEPEKXLHXEDXDHQHXASHGEEEALKEDPPRNLLEERKSDQLGLPQXLQQEFSLINVQIRNVNVEMDAADRSCXVSVHCSNHRVKMLVKFPAQYPNNAAPSFQFINPXXIXSXMKAKLLKILKDXALQKVKRGQSCLEPCLRQLVSCLESFVNQEDSASSNPFALPNSVXPPLPXFARVXXAYGSYQDANIPFPRXSGARFCGAGYLVYFXRPMXMHRAVSPXEPXPR

SEQ ID NO: 29559 - protein, 974 aa, Homo sapiens
  MOD_RES (20)..(20): Selenocysteine
  MOD_RES (99)..(100): Selenocysteine
  MOD_RES (105)..(105): Selenocysteine
  MOD_RES (123)..(123): Selenocysteine
  MOD_RES (128)..(128): Selenocysteine
  MOD_RES (138)..(138): Selenocysteine
  MOD_RES (142)..(142): Selenocysteine
  MOD_RES (166)..(166): Selenocysteine
  MOD_RES (182)..(182): Selenocysteine
  MOD_RES (209)..(209): Selenocysteine
  MOD_RES (243)..(243): Selenocysteine
  MOD_RES (251)..(251): Selenocysteine
  MOD_RES (273)..(273): Selenocysteine
  MOD_RES (277)..(277): Selenocysteine
  MOD_RES (304)..(304): Selenocysteine
  MOD_RES (310)..(310): Selenocysteine
  MOD_RES (348)..(348): Selenocysteine
  MOD_RES (351)..(351): Selenocysteine
  MOD_RES (354)..(354): Selenocysteine
  MOD_RES (359)..(359): Selenocysteine
  MOD_RES (390)..(390): Selenocysteine
  MOD_RES (417)..(417): Selenocysteine
  MOD_RES (451)..(452): Selenocysteine
  MOD_RES (454)..(454): Selenocysteine
  MOD_RES (456)..(456): Selenocysteine
  MOD_RES (468)..(468): Selenocysteine
  MOD_RES (513)..(513): Selenocysteine
  MOD_RES (518)..(518): Selenocysteine
  MOD_RES (523)..(524): Selenocysteine
  MOD_RES (539)..(539): Selenocysteine
  MOD_RES (554)..(554): Selenocysteine
  MOD_RES (558)..(558): Selenocysteine
  MOD_RES (566)..(566): Selenocysteine
  MOD_RES (569)..(569): Selenocysteine
  MOD_RES (581)..(581): Selenocysteine
  MOD_RES (591)..(591): Selenocysteine
  MOD_RES (605)..(605): Selenocysteine
  MOD_RES (676)..(676): Selenocysteine
  MOD_RES (700)..(700): Selenocysteine
  MOD_RES (703)..(703): Selenocysteine
  MOD_RES (717)..(717): Selenocysteine
  MOD_RES (744)..(744): Selenocysteine
  MOD_RES (786)..(786): Selenocysteine
  MOD_RES (801)..(801): Selenocysteine
  MOD_RES (832)..(832): Selenocysteine
  MOD_RES (856)..(856): Selenocysteine
  MOD_RES (912)..(912): Selenocysteine
  MOD_RES (921)..(921): Selenocysteine
  MOD_RES (940)..(940): Selenocysteine
  MOD_RES (947)..(947): Selenocysteine
  MOD_RES (956)..(956): Selenocysteine
  MOD_RES (962)..(962): Selenocysteine
  MOD_RES (973)..(973): Selenocysteine
MAARWSSENVVVEFRDSQAXAMSVDCLGQHAVLSGRRFLYIVNLDAPFEGHRKISRQSKWDIGAVQWNPHDSFAHYFAASSNQRVDLYKWKDGSGEVGXXLQGHXRVISDLDWAVFEPDLLVXSSVDXYIYIWDIKDXRKPXVALSAVAGASQVKWNKKNANCLAXSHDGDVRIWDKRKPSXAVEYLAAHLSKIHGLDWHPDSEHILAXSSQDNSVKFWDYRQPRKYLNILPCQVPVWKARYXPFSNGLVXVMVPQLRRENSLLLWNVFDLNXPVHXFVGHDDVVLEFQWRKQKEGSKDYQLVXWSRDQXLRMWRVDSQMQRLCANDILDGVDEFIESISLLPEPEKXLHXEDXDHQHXASHGEEEALKEDPPRNLLEERKSDQLGLPQXLQQEFSLINVQIRNVNVEMDAADRSCXVSVHCSNHRVKMLVKFPAQYPNNAAPSFQFINPXXIXSXMKAKLLKILKDXALQKVKRGQSCLEPCLRQLVSCLESFVNQEDSASSNPFALPNSVXPPLPXFARVXXAYGSYQDANIPFPRXSGARFCGAGYLVYFXRPMXMHRAVSPXEPXPRSLSALSAYHXGLIAPMKIRXEAPGNLRLYSGSPXRSEKEQVSISSFYYKERKSRRWKSKREGSDSGNRQIKAAGKVIIQDIACLLPVHKSLGELYILNVNDIQEXCQKNAASALLVGRKDLVQVWSLAXVAXDLCLGPKSDPDLEXPWARHPFGRQLLESLLAHYCRLRDVQXLAMLCSVFEAQSRPQGLPNPFGPFPNRSSNLVVSHSRYPSFXSSGSCSSMSDPGLNXGGWNIAGREAEHLSSPWGESSPEELRFGSLXYSDPRERERDQHDKNKRLLDPANXQQFDDFKKCYGEILYRWGLREKRAEVLKFVSCPPDPHKGIEFGVYCSHCRSEVRGXQCAICKGFXFQCAICHVAVRGSSNFCLXCGHGGHXSHMMEWFRXQEVCPXGCGCHCLLESXF

SEQ ID NO: 29560 - protein, 156 aa, Homo sapiens
  MOD_RES (78)..(79): Selenocysteine
  MOD_RES (84)..(84): Selenocysteine
  MOD_RES (102)..(102): Selenocysteine
  MOD_RES (107)..(107): Selenocysteine
  MOD_RES (117)..(117): Selenocysteine
  MOD_RES (121)..(121): Selenocysteine
  MOD_RES (145)..(145): Selenocysteine
MSVDCLGQHAVLSGRRFLYIVNLDAPFEGHRKISRQSKWDIGAVQWNPHDSFAHYFAASSNQRVDLYKWKDGSGEVGXXLQGHXRVISDLDWAVFEPDLLVXSSVDXYIYIWDIKDXRKPXVALSAVAGASQVKWNKKNANCLAXSHDGDVRIWDK

SEQ ID NO: 29561 - protein, 458 aa, Homo sapiens
  MOD_RES (78)..(79): Selenocysteine
  MOD_RES (84)..(84): Selenocysteine
  MOD_RES (102)..(102): Selenocysteine
  MOD_RES (107)..(107): Selenocysteine
  MOD_RES (117)..(117): Selenocysteine
  MOD_RES (121)..(121): Selenocysteine
  MOD_RES (145)..(145): Selenocysteine
  MOD_RES (161)..(161): Selenocysteine
  MOD_RES (188)..(188): Selenocysteine
  MOD_RES (222)..(222): Selenocysteine
  MOD_RES (230)..(230): Selenocysteine
  MOD_RES (252)..(252): Selenocysteine
  MOD_RES (256)..(256): Selenocysteine
  MOD_RES (283)..(283): Selenocysteine
  MOD_RES (289)..(289): Selenocysteine
  MOD_RES (327)..(327): Selenocysteine
  MOD_RES (330)..(330): Selenocysteine
  MOD_RES (333)..(333): Selenocysteine
  MOD_RES (338)..(338): Selenocysteine
  MOD_RES (369)..(369): Selenocysteine
  MOD_RES (396)..(396): Selenocysteine
  MOD_RES (430)..(431): Selenocysteine
  MOD_RES (433)..(433): Selenocysteine
  MOD_RES (435)..(435): Selenocysteine
MSVDCLGQHAVLSGRRFLYIVNLDAPFEGHRKISRQSKWDIGAVQWNPHDSFAHYFAASSNQRVDLYKWKDGSGEVGXXLQGHXRVISDLDWAVFEPDLLVXSSVDXYIYIWDIKDXRKPXVALSAVAGASQVKWNKKNANCLAXSHDGDVRIWDKRKPSXAVEYLAAHLSKIHGLDWHPDSEHILAXSSQDNSVKFWDYRQPRKYLNILPCQVPVWKARYXPFSNGLVXVMVPQLRRENSLLLWNVFDLNXPVHXFVGHDDVVLEFQWRKQKEGSKDYQLVXWSRDQXLRMWRVDSQMQRLCANDILDGVDEFIESISLLPEPEKXLHXEDXDHQHXASHGEEEALKEDPPRNLLEERKSDQLGLPQXLQQEFSLINVQIRNVNVEMDAADRSCXVSVHCSNHRVKMLVKFPAQYPNNAAPSFQFINPXXIXSXMKAKLLKVGVWVPKFSLLFCIIV

SEQ ID NO: 29562 - protein, 47 aa, Homo sapiens
  MOD_RES (1)..(1): Selenocysteine
  MOD_RES (6)..(6): Selenocysteine
  MOD_RES (11)..(12): Selenocysteine
  MOD_RES (27)..(27): Selenocysteine
  MOD_RES (45)..(45): Selenocysteine
XPPLPXFARVXXAYGSYQDANIPFPRXSGARFCGADLSQPCLLIXLA

SEQ ID NO: 29563 - protein, 217 aa, Homo sapiens
  MOD_RES (1)..(1): Any amino acid
  MOD_RES (8)..(8): Selenocysteine
  MOD_RES (79)..(79): Selenocysteine
  MOD_RES (101)..(101): Selenocysteine
  MOD_RES (116)..(116): Selenocysteine
  MOD_RES (147)..(147): Selenocysteine
  MOD_RES (171)..(171): Selenocysteine
XLYSGSPXRSEKEQVSISSFYYKERKSRRWKSKREGSDSGNRQIKAAGKVIIQDIACLLPVHKSLGELYILNVNDIQEXCQKNAASALLVGRKDLVQPSFXSSGSCSSMSDPGLNXGGWNIAGREAEHLSSPWGESSPEELRFGSLXYSDPRERERDQHDKNKRLLDPANXQQFDDFKKCYGEILYRWGLREKRAEVLKFVSCPPDPHKGIEFGVYC

SEQ ID NO: 29564 - protein, 301 aa, Homo sapiens
  MOD_RES (1)..(1): Any amino acid
  MOD_RES (2)..(2): Selenocysteine
  MOD_RES (4)..(4): Selenocysteine
  MOD_RES (6)..(6): Selenocysteine
  MOD_RES (18)..(18): Selenocysteine
  MOD_RES (63)..(63): Selenocysteine
  MOD_RES (68)..(68): Selenocysteine
  MOD_RES (73)..(74): Selenocysteine
  MOD_RES (89)..(89): Selenocysteine
  MOD_RES (104)..(104): Selenocysteine
  MOD_RES (108)..(108): Selenocysteine
  MOD_RES (116)..(116): Selenocysteine
  MOD_RES (119)..(119): Selenocysteine
  MOD_RES (131)..(131): Selenocysteine
  MOD_RES (141)..(141): Selenocysteine
  MOD_RES (155)..(155): Selenocysteine
  MOD_RES (245)..(245): Selenocysteine
  MOD_RES (269)..(269): Selenocysteine
  MOD_RES (272)..(272): Selenocysteine
  MOD_RES (286)..(286): Selenocysteine
XXIXSXMKAKLLKILKDXALQKVKRGQSCLEPCLRQLVSCLESFVNQEDSASSNPFALPNSVXPPLPXFARVXXAYGSYQDANIPFPRXSGARFCGAGYLVYFXRPMXMHRAVSPXEPXPRSLSALSAYHXGLIAPMKIRXEAPGNLRLYSGSPXRSEKEQVSISSFYYKERMSPRSARRRWSIQAINDFPKSRRWKSKREGSDSGNRQIKAAGKVIIQDIACLLPVHKSLGELYILNVNDIQEXCQKNAASALLVGRKDLVQVWSLAXVAXDLCLGPKSDPDLEXPWARHPFGRQLLESL

SEQ ID NO: 29565 - protein, 31 aa, Homo sapiens
MALCLYLGEGPDVLVYSLDFGGHLRMIKRVQ

SEQ ID NO: 29566 - protein, 99 aa, Homo sapiens
MALCLYLGEGPDVLVYSLDFGGHLRMIKRVQNLLGHYLIHGFRVRPEPNGDLDLEAMVAVFGSKGLRVVKISWGQGHFWELWRSGLWNMSDWIWDARWL

SEQ ID NO: 29567 - protein, 271 aa, Homo sapiens
  MOD_RES (13)..(13): Selenocysteine
  MOD_RES (22)..(22): Selenocysteine
  MOD_RES (55)..(55): Selenocysteine
  MOD_RES (187)..(187): Selenocysteine
  MOD_RES (191)..(191): Selenocysteine
  MOD_RES (206)..(206): Selenocysteine
  MOD_RES (223)..(223): Selenocysteine
  MOD_RES (258)..(258): Selenocysteine
MDALEDYVWPRAXSELILLPVXGLECVGDRLLAESGFGFPKCPDYRREPPHPAEXKDFLRFKLQDCEGPDVLVYSLDFGGHLRMIKRVQNLLGHYLIHGFRVRPEPNGDLDLEAMVAVFGSKGLRVVKISWGQGHFWELWRSGLWNMSDWIWDARWLEGNIALALGHNSVVLYDPVVGCILQEVPCXDRCXLSSACLIGDAWKELXIVAGAVSNQLLVWYPAXALADNKPVAPDRRISGHVGIIFSMSYLESKGLLAXASEDRSVRIWKVG

SEQ ID NO: 29568 - protein, 68 aa, Homo sapiens
  MOD_RES (13)..(13): Selenocysteine
  MOD_RES (22)..(22): Selenocysteine
  MOD_RES (55)..(55): Selenocysteine
MDALEDYVWPRAXSELILLPVXGLECVGDRLLAESGFGFPKCPDYRREPPHPAEXKDFLRFKLQDCVS

SEQ ID NO: 29569 - protein, 1121 aa, Homo sapiens
  MOD_RES (13)..(13): Selenocysteine
  MOD_RES (22)..(22): Selenocysteine
  MOD_RES (155)..(155): Selenocysteine
  MOD_RES (159)..(159): Selenocysteine
  MOD_RES (174)..(174): Selenocysteine
  MOD_RES (191)..(191): Selenocysteine
  MOD_RES (226)..(226): Selenocysteine
  MOD_RES (315)..(315): Selenocysteine
  MOD_RES (350)..(350): Selenocysteine
  MOD_RES (355)..(355): Selenocysteine
  MOD_RES (366)..(366): Selenocysteine
  MOD_RES (368)..(368): Selenocysteine
  MOD_RES (424)..(424): Selenocysteine
  MOD_RES (426)..(426): Selenocysteine
  MOD_RES (432)..(432): Selenocysteine
  MOD_RES (495)..(495): Selenocysteine
  MOD_RES (555)..(555): Selenocysteine
  MOD_RES (562)..(562): Selenocysteine
  MOD_RES (573)..(573): Selenocysteine
  MOD_RES (576)..(576): Selenocysteine
  MOD_RES (584)..(585): Selenocysteine
  MOD_RES (665)..(665): Selenocysteine
  MOD_RES (689)..(689): Selenocysteine
  MOD_RES (705)..(705): Selenocysteine
  MOD_RES (712)..(712): Selenocysteine
  MOD_RES (714)..(714): Selenocysteine
  MOD_RES (740)..(740): Selenocysteine
  MOD_RES (745)..(745): Selenocysteine
  MOD_RES (750)..(751): Selenocysteine
  MOD_RES (759)..(761): Selenocysteine
  MOD_RES (768)..(768): Selenocysteine
  MOD_RES (787)..(787): Selenocysteine
  MOD_RES (799)..(799): Selenocysteine
  MOD_RES (819)..(819): Selenocysteine
  MOD_RES (824)..(824): Selenocysteine
  MOD_RES (860)..(860): Selenocysteine
  MOD_RES (906)..(906): Selenocysteine
  MOD_RES (920)..(920): Selenocysteine
  MOD_RES (937)..(937): Selenocysteine
  MOD_RES (947)..(948): Selenocysteine
  MOD_RES (955)..(955): Selenocysteine
  MOD_RES (971)..(971): Selenocysteine
  MOD_RES (975)..(975): Selenocysteine
  MOD_RES (988)..(988): Selenocysteine
  MOD_RES (991)..(991): Selenocysteine
  MOD_RES (1049)..(1049): Selenocysteine
  MOD_RES (1069)..(1069): Selenocysteine
  MOD_RES (1079)..(1079): Selenocysteine
  MOD_RES (1084)..(1084): Selenocysteine
MDALEDYVWPRAXSELILLPVXGLECVGDRLLAGEGPDVLVYSLDFGGHLRMIKRVQNLLGHYLIHGFRVRPEPNGDLDLEAMVAVFGSKGLRVVKISWGQGHFWELWRSGLWNMSDWIWDARWLEGNIALALGHNSVVLYDPVVGCILQEVPCXDRCXLSSACLIGDAWKELXIVAGAVSNQLLVWYPAXALADNKPVAPDRRISGHVGIIFSMSYLESKGLLAXASEDRSVRIWKVGDLRVPGGRVQNIGHCFGHSARVWQVKLLENYLISAGEDCVCLVWSHEGEILQAFRGHQGRGIRAIAAHERQAWVIXGGDDSGIRLWHLVGRGYRGLGVSALCFKSRSRPGXLKAVXLAGSWRLLAVXDXGALYLYDVEVKCWEQLLEDKHFQSYCLLEAAPGPEGFGLCAMANGEGRVKVVPINXPXAAVDQXLFPGKVHSLSWALRGYEELLLLASGPGGVVACLEISAAPSGKAIFVKERCRYLLPPSKQRWHXCSAFLPPGDFLVCGDRRGSVLLFPSRPGLLKDPGVGGKARAGAGAPVVGSGSSGGGNAFXGLGPVSXLPSLHGKQGVXSVXCHGGYVYXXGRDGAYYQLFVRDGQLQPVLRQKSCRGMNWLAGLRIVPDGSMVILGFHANEFVVWNPRSHEKLHIVNCGGGHRSWAFSDXEAAMAFAYLKDGDVMLYRALGGCXRPHVILREGLHGREIXCVKRVGXIXLGPEYGVPSFMQPDDLEPGSEGPDLXDIVIXCSEDXXVCVLALPXXXGSAHALXAVCNHISSVRAVAVWGIGXPGGPQDPQPGLXAHVVSAGGRAEMHCFSIMVXPDPSXPSRLACHVMHLSSHRLDEYWDRQRNRHRMVKVDPEXRYMSLAVCELDQPGLGPLVAAACSDGAVRLFLLQDSGRILQLLAEXFHHKRCVLKVHSFXHEAPNQRRRLLLCSAAXDGSLAFWDLXXMLDHDSXVLEPPVDPGLPYRLGXPSLXLQAHSCGINSLHXLPXREGHHLVASGSEDGSLHVFVLAVEMLQLEEAVGEAGLVPQLRVLEEYSVPCAHAAHVXGLKILSPSIMVSASIDQRLXFWRLGHGEPXFMNSXVFHVPDVADMDCWPVSPEFGHRCALGGQGLEVYNWYD

SEQ ID NO: 29570 - protein, 569 aa, Homo sapiens
  MOD_RES (13)..(13): Selenocysteine
  MOD_RES (22)..(22): Selenocysteine
  MOD_RES (113)..(113): Selenocysteine
  MOD_RES (137)..(137): Selenocysteine
  MOD_RES (153)..(153): Selenocysteine
  MOD_RES (160)..(160): Selenocysteine
  MOD_RES (162)..(162): Selenocysteine
  MOD_RES (188)..(188): Selenocysteine
  MOD_RES (193)..(193): Selenocysteine
  MOD_RES (198)..(199): Selenocysteine
  MOD_RES (207)..(209): Selenocysteine
  MOD_RES (216)..(216): Selenocysteine
  MOD_RES (235)..(235): Selenocysteine
  MOD_RES (247)..(247): Selenocysteine
  MOD_RES (267)..(267): Selenocysteine
  MOD_RES (272)..(272): Selenocysteine
  MOD_RES (308)..(308): Selenocysteine
  MOD_RES (354)..(354): Selenocysteine
  MOD_RES (368)..(368): Selenocysteine
  MOD_RES (385)..(385): Selenocysteine
  MOD_RES (395)..(396): Selenocysteine
  MOD_RES (403)..(403): Selenocysteine
  MOD_RES (419)..(419): Selenocysteine
  MOD_RES (423)..(423): Selenocysteine
  MOD_RES (436)..(436): Selenocysteine
  MOD_RES (439)..(439): Selenocysteine
  MOD_RES (497)..(497): Selenocysteine
  MOD_RES (517)..(517): Selenocysteine
  MOD_RES (527)..(527): Selenocysteine
  MOD_RES (532)..(532): Selenocysteine
MDALEDYVWPRAXSELILLPVXGLECVGDRLLAGRDGAYYQLFVRDGQLQPVLRQKSCRGMNWLAGLRIVPDGSMVILGFHANEFVVWNPRSHEKLHIVNCGGGHRSWAFSDXEAAMAFAYLKDGDVMLYRALGGCXRPHVILREGLHGREIXCVKRVGXIXLGPEYGVPSFMQPDDLEPGSEGPDLXDIVIXCSEDXXVCVLALPXXXGSAHALXAVCNHISSVRAVAVWGIGXPGGPQDPQPGLXAHVVSAGGRAEMHCFSIMVXPDPSXPSRLACHVMHLSSHRLDEYWDRQRNRHRMVKVDPEXRYMSLAVCELDQPGLGPLVAAACSDGAVRLFLLQDSGRILQLLAEXFHHKRCVLKVHSFXHEAPNQRRRLLLCSAAXDGSLAFWDLXXMLDHDSXVLEPPVDPGLPYRLGXPSLXLQAHSCGINSLHXLPXREGHHLVASGSEDGSLHVFVLAVEMLQLEEAVGEAGLVPQLRVLEEYSVPCAHAAHVXGLKILSPSIMVSASIDQRLXFWRLGHGEPXFMNSXVFHVPDVADMDCWPVSPEFGHRCALGGQGLEVYNWYD

SEQ ID NO: 29571 - protein, 61 aa, Homo sapiens
  MOD_RES (13)..(13): Selenocysteine
  MOD_RES (22)..(22): Selenocysteine
  MOD_RES (46)..(46): Selenocysteine
MDALEDYVWPRAXSELILLPVXGLECVGDRLLAGWSAVARSRLPAXSASQVQVILLPQPPE

SEQ ID NO: 29572 - protein, 1151 aa, Homo sapiens
  MOD_RES (26)..(26): Selenocysteine
  MOD_RES (43)..(43): Selenocysteine
  MOD_RES (52)..(52): Selenocysteine
  MOD_RES (185)..(185): Selenocysteine
  MOD_RES (189)..(189): Selenocysteine
  MOD_RES (204)..(204): Selenocysteine
  MOD_RES (221)..(221): Selenocysteine
  MOD_RES (256)..(256): Selenocysteine
  MOD_RES (345)..(345): Selenocysteine
  MOD_RES (380)..(380): Selenocysteine
  MOD_RES (385)..(385): Selenocysteine
  MOD_RES (396)..(396): Selenocysteine
  MOD_RES (398)..(398): Selenocysteine
  MOD_RES (454)..(454): Selenocysteine
  MOD_RES (456)..(456): Selenocysteine
  MOD_RES (462)..(462): Selenocysteine
  MOD_RES (525)..(525): Selenocysteine
  MOD_RES (585)..(585): Selenocysteine
  MOD_RES (592)..(592): Selenocysteine
  MOD_RES (603)..(603): Selenocysteine
  MOD_RES (606)..(606): Selenocysteine
  MOD_RES (614)..(615): Selenocysteine
  MOD_RES (695)..(695): Selenocysteine
  MOD_RES (719)..(719): Selenocysteine
  MOD_RES (735)..(735): Selenocysteine
  MOD_RES (742)..(742): Selenocysteine
  MOD_RES (744)..(744): Selenocysteine
  MOD_RES (770)..(770): Selenocysteine
  MOD_RES (775)..(775): Selenocysteine
  MOD_RES (780)..(781): Selenocysteine
  MOD_RES (789)..(791): Selenocysteine
  MOD_RES (798)..(798): Selenocysteine
  MOD_RES (817)..(817): Selenocysteine
  MOD_RES (829)..(829): Selenocysteine
  MOD_RES (849)..(849): Selenocysteine
  MOD_RES (854)..(854): Selenocysteine
  MOD_RES (890)..(890): Selenocysteine
  MOD_RES (936)..(936): Selenocysteine
  MOD_RES (950)..(950): Selenocysteine
  MOD_RES (967)..(967): Selenocysteine
  MOD_RES (977)..(978): Selenocysteine
  MOD_RES (985)..(985): Selenocysteine
  MOD_RES (1001)..(1001): Selenocysteine
  MOD_RES (1005)..(1005): Selenocysteine
  MOD_RES (1018)..(1018): Selenocysteine
  MOD_RES (1021)..(1021): Selenocysteine
  MOD_RES (1079)..(1079): Selenocysteine
  MOD_RES (1099)..(1099): Selenocysteine
  MOD_RES (1109)..(1109): Selenocysteine
  MOD_RES (1114)..(1114): Selenocysteine
MGSAARWEGSFSREFSSLLSRGCLSXSRIDMDALEDYVWPRAXSELILLPVXGLECVGDRLLAGEGPDVLVYSLDFGGHLRMIKRVQNLLGHYLIHGFRVRPEPNGDLDLEAMVAVFGSKGLRVVKISWGQGHFWELWRSGLWNMSDWIWDARWLEGNIALALGHNSVVLYDPVVGCILQEVPCXDRCXLSSACLIGDAWKELXIVAGAVSNQLLVWYPAXALADNKPVAPDRRISGHVGIIFSMSYLESKGLLAXASEDRSVRIWKVGDLRVPGGRVQNIGHCFGHSARVWQVKLLENYLISAGEDCVCLVWSHEGEILQAFRGHQGRGIRAIAAHERQAWVIXGGDDSGIRLWHLVGRGYRGLGVSALCFKSRSRPGXLKAVXLAGSWRLLAVXDXGALYLYDVEVKCWEQLLEDKHFQSYCLLEAAPGPEGFGLCAMANGEGRVKVVPINXPXAAVDQXLFPGKVHSLSWALRGYEELLLLASGPGGVVACLEISAAPSGKAIFVKERCRYLLPPSKQRWHXCSAFLPPGDFLVCGDRRGSVLLFPSRPGLLKDPGVGGKARAGAGAPVVGSGSSGGGNAFXGLGPVSXLPSLHGKQGVXSVXCHGGYVYXXGRDGAYYQLFVRDGQLQPVLRQKSCRGMNWLAGLRIVPDGSMVILGFHANEFVVWNPRSHEKLHIVNCGGGHRSWAFSDXEAAMAFAYLKDGDVMLYRALGGCXRPHVILREGLHGREIXCVKRVGXIXLGPEYGVPSFMQPDDLEPGSEGPDLXDIVIXCSEDXXVCVLALPXXXGSAHALXAVCNHISSVRAVAVWGIGXPGGPQDPQPGLXAHVVSAGGRAEMHCFSIMVXPDPSXPSRLACHVMHLSSHRLDEYWDRQRNRHRMVKVDPEXRYMSLAVCELDQPGLGPLVAAACSDGAVRLFLLQDSGRILQLLAEXFHHKRCVLKVHSFXHEAPNQRRRLLLCSAAXDGSLAFWDLXXMLDHDSXVLEPPVDPGLPYRLGXPSLXLQAHSCGINSLHXLPXREGHHLVASGSEDGSLHVFVLAVEMLQLEEAVGEAGLVPQLRVLEEYSVPCAHAAHVXGLKILSPSIMVSASIDQRLXFWRLGHGEPXFMNSXVFHVPDVADMDCWPVSPEFGHRCALGGQGLEVYNWYD

SEQ ID NO: 29573 - protein, 289 aa, Homo sapiens
  MOD_RES (28)..(28): Selenocysteine
  MOD_RES (74)..(74): Selenocysteine
  MOD_RES (88)..(88): Selenocysteine
  MOD_RES (105)..(105): Selenocysteine
  MOD_RES (115)..(116): Selenocysteine
  MOD_RES (123)..(123): Selenocysteine
  MOD_RES (139)..(139): Selenocysteine
  MOD_RES (143)..(143): Selenocysteine
  MOD_RES (156)..(156): Selenocysteine
  MOD_RES (159)..(159): Selenocysteine
  MOD_RES (217)..(217): Selenocysteine
  MOD_RES (237)..(237): Selenocysteine
  MOD_RES (247)..(247): Selenocysteine
  MOD_RES (252)..(252): Selenocysteine
MHLSSHRLDEYWDRQRNRHRMVKVDPEXRYMSLAVCELDQPGLGPLVAAACSDGAVRLFLLQDSGRILQLLAEXFHHKRCVLKVHSFXHEAPNQRRRLLLCSAAXDGSLAFWDLXXMLDHDSXVLEPPVDPGLPYRLGXPSLXLQAHSCGINSLHXLPXREGHHLVASGSEDGSLHVFVLAVEMLQLEEAVGEAGLVPQLRVLEEYSVPCAHAAHVXGLKILSPSIMVSASIDQRLXFWRLGHGEPXFMNSXVFHVPDVADMDCWPVSPEFGHRCALGGQGLEVYNWYD

SEQ ID NO: 29574 - protein, 35 aa, Homo sapiens
MIKRVQNLLGHYLIHGFRVRPEPNGDLDLEAMVAV

SEQ ID NO: 29575 - protein, 125 aa, Homo sapiens
  MOD_RES (104)..(104): Selenocysteine
  MOD_RES (108)..(108): Selenocysteine
  MOD_RES (123)..(123): Selenocysteine
MIKRVQNLLGHYLIHGFRVRPEPNGDLDLEAMVAVFGSKGLRVVKISWGQGHFWELWRSGLWNMSDWIWDARWLEGNIALALGHNSVVLYDPVVGCILQEVPCXDRCXLSSACLIGDAWKELXIV

SEQ ID NO: 29576 - protein, 1070 aa, Homo sapiens
  MOD_RES (104)..(104): Selenocysteine
  MOD_RES (108)..(108): Selenocysteine
  MOD_RES (123)..(123): Selenocysteine
  MOD_RES (140)..(140): Selenocysteine
  MOD_RES (175)..(175): Selenocysteine
  MOD_RES (264)..(264): Selenocysteine
  MOD_RES (299)..(299): Selenocysteine
  MOD_RES (304)..(304): Selenocysteine
  MOD_RES (315)..(315): Selenocysteine
  MOD_RES (317)..(317): Selenocysteine
  MOD_RES (373)..(373): Selenocysteine
  MOD_RES (375)..(375): Selenocysteine
  MOD_RES (381)..(381): Selenocysteine
  MOD_RES (444)..(444): Selenocysteine
  MOD_RES (504)..(504): Selenocysteine
  MOD_RES (511)..(511): Selenocysteine
  MOD_RES (522)..(522): Selenocysteine
  MOD_RES (525)..(525): Selenocysteine
  MOD_RES (533)..(534): Selenocysteine
  MOD_RES (614)..(614): Selenocysteine
  MOD_RES (638)..(638): Selenocysteine
  MOD_RES (654)..(654): Selenocysteine
  MOD_RES (661)..(661): Selenocysteine
  MOD_RES (663)..(663): Selenocysteine
  MOD_RES (689)..(689): Selenocysteine
  MOD_RES (694)..(694): Selenocysteine
  MOD_RES (699)..(700): Selenocysteine
  MOD_RES (708)..(710): Selenocysteine
  MOD_RES (717)..(717): Selenocysteine
  MOD_RES (736)..(736): Selenocysteine
  MOD_RES (748)..(748): Selenocysteine
  MOD_RES (768)..(768): Selenocysteine
  MOD_RES (773)..(773): Selenocysteine
  MOD_RES (809)..(809): Selenocysteine
  MOD_RES (855)..(855): Selenocysteine
  MOD_RES (869)..(869): Selenocysteine
  MOD_RES (886)..(886): Selenocysteine
  MOD_RES (896)..(897): Selenocysteine
  MOD_RES (904)..(904): Selenocysteine
  MOD_RES (920)..(920): Selenocysteine
  MOD_RES (924)..(924): Selenocysteine
  MOD_RES (937)..(937): Selenocysteine
  MOD_RES (940)..(940): Selenocysteine
  MOD_RES (998)..(998): Selenocysteine
  MOD_RES (1018)..(1018): Selenocysteine
  MOD_RES (1028)..(1028): Selenocysteine
  MOD_RES (1033)..(1033): Selenocysteine
MIKRVQNLLGHYLIHGFRVRPEPNGDLDLEAMVAVFGSKGLRVVKISWGQGHFWELWRSGLWNMSDWIWDARWLEGNIALALGHNSVVLYDPVVGCILQEVPCXDRCXLSSACLIGDAWKELXIVAGAVSNQLLVWYPAXALADNKPVAPDRRISGHVGIIFSMSYLESKGLLAXASEDRSVRIWKVGDLRVPGGRVQNIGHCFGHSARVWQVKLLENYLISAGEDCVCLVWSHEGEILQAFRGHQGRGIRAIAAHERQAWVIXGGDDSGIRLWHLVGRGYRGLGVSALCFKSRSRPGXLKAVXLAGSWRLLAVXDXGALYLYDVEVKCWEQLLEDKHFQSYCLLEAAPGPEGFGLCAMANGEGRVKVVPINXPXAAVDQXLFPGKVHSLSWALRGYEELLLLASGPGGVVACLEISAAPSGKAIFVKERCRYLLPPSKQRWHXCSAFLPPGDFLVCGDRRGSVLLFPSRPGLLKDPGVGGKARAGAGAPVVGSGSSGGGNAFXGLGPVSXLPSLHGKQGVXSVXCHGGYVYXXGRDGAYYQLFVRDGQLQPVLRQKSCRGMNWLAGLRIVPDGSMVILGFHANEFVVWNPRSHEKLHIVNCGGGHRSWAFSDXEAAMAFAYLKDGDVMLYRALGGCXRPHVILREGLHGREIXCVKRVGXIXLGPEYGVPSFMQPDDLEPGSEGPDLXDIVIXCSEDXXVCVLALPXXXGSAHALXAVCNHISSVRAVAVWGIGXPGGPQDPQPGLXAHVVSAGGRAEMHCFSIMVXPDPSXPSRLACHVMHLSSHRLDEYWDRQRNRHRMVKVDPEXRYMSLAVCELDQPGLGPLVAAACSDGAVRLFLLQDSGRILQLLAEXFHHKRCVLKVHSFXHEAPNQRRRLLLCSAAXDGSLAFWDLXXMLDHDSXVLEPPVDPGLPYRLGXPSLXLQAHSCGINSLHXLPXREGHHLVASGSEDGSLHVFVLAVEMLQLEEAVGEAGLVPQLRVLEEYSVPCAHAAHVXGLKILSPSIMVSASIDQRLXFWRLGHGEPXFMNSXVFHVPDVADMDCWPVSPEFGHRCALGGQGLEVYNWYD

SEQ ID NO: 29577 - protein, 72 aa, Homo sapiens
  MOD_RES (4)..(4): Selenocysteine
  MOD_RES (16)..(16): Selenocysteine
  MOD_RES (26)..(26): Selenocysteine
  MOD_RES (48)..(48): Selenocysteine
  MOD_RES (63)..(63): Selenocysteine
LLHXLEGHAMPIRSLXFSPDSQLLVXASDDGYIKIYDVCRFLLLSSPXPHASASSLLGAGKLXKHGKLQQCS

SEQ ID NO: 29578 - protein, 48 aa, Homo sapiens
  MOD_RES (2)..(2): Selenocysteine
  MOD_RES (26)..(26): Selenocysteine
  MOD_RES (34)..(34): Selenocysteine
  MOD_RES (37)..(37): Selenocysteine
MXNQYGILFKQEQAHDDAIWSVAWGXNKKENSEXVVXGSLDDLVKVWK

SEQ ID NO: 29579 - protein, 189 aa, Homo sapiens
  MOD_RES (2)..(2): Selenocysteine
  MOD_RES (26)..(26): Selenocysteine
  MOD_RES (34)..(34): Selenocysteine
  MOD_RES (37)..(37): Selenocysteine
  MOD_RES (75)..(75): Selenocysteine
  MOD_RES (111)..(111): Selenocysteine
  MOD_RES (123)..(123): Selenocysteine
  MOD_RES (125)..(125): Selenocysteine
  MOD_RES (146)..(146): Selenocysteine
  MOD_RES (179)..(179): Selenocysteine
  MOD_RES (185)..(185): Selenocysteine
MXNQYGILFKQEQAHDDAIWSVAWGXNKKENSEXVVXGSLDDLVKVWKWRDERLDLQWSLEGHQLGVVSVDISHXLPIAASSSLDAHIRLWDLENGKQIKSIDAGPVDAWXLAFSPDSQYLAXGXHVGKVNIFGVESGKKEYSLDXRGKFILSIAYSPDGKYLASGAIDGIINIFDIAXGKLLHXLEGG

SEQ ID NO: 29580 - protein, 294 aa, Homo sapiens
  MOD_RES (2)..(2): Selenocysteine
  MOD_RES (26)..(26): Selenocysteine
  MOD_RES (34)..(34): Selenocysteine
  MOD_RES (37)..(37): Selenocysteine
  MOD_RES (75)..(75): Selenocysteine
  MOD_RES (111)..(111): Selenocysteine
  MOD_RES (123)..(123): Selenocysteine
  MOD_RES (125)..(125): Selenocysteine
  MOD_RES (146)..(146): Selenocysteine
  MOD_RES (179)..(179): Selenocysteine
  MOD_RES (185)..(185): Selenocysteine
  MOD_RES (197)..(197): Selenocysteine
  MOD_RES (207)..(207): Selenocysteine
  MOD_RES (227)..(227): Selenocysteine
  MOD_RES (245)..(245): Selenocysteine
  MOD_RES (263)..(263): Selenocysteine
  MOD_RES (265)..(265): Selenocysteine
  MOD_RES (269)..(269): Selenocysteine
MXNQYGILFKQEQAHDDAIWSVAWGXNKKENSEXVVXGSLDDLVKVWKWRDERLDLQWSLEGHQLGVVSVDISHXLPIAASSSLDAHIRLWDLENGKQIKSIDAGPVDAWXLAFSPDSQYLAXGXHVGKVNIFGVESGKKEYSLDXRGKFILSIAYSPDGKYLASGAIDGIINIFDIAXGKLLHXLEGHAMPIRSLXFSPDSQLLVXASDDGYIKIYDVQHANLAGXLSGHASWVLNVAFCPDDXHFVSSSSDKSVKVWDVGXRXCVHXFFDHQDQVWGVKYNGNGSKIVSVGD

SEQ ID NO: 29581 - protein, 305 aa, Homo sapiens
  MOD_RES (2)..(2): Selenocysteine
  MOD_RES (26)..(26): Selenocysteine
  MOD_RES (34)..(34): Selenocysteine
  MOD_RES (37)..(37): Selenocysteine
  MOD_RES (75)..(75): Selenocysteine
  MOD_RES (111)..(111): Selenocysteine
  MOD_RES (123)..(123): Selenocysteine
  MOD_RES (125)..(125): Selenocysteine
  MOD_RES (146)..(146): Selenocysteine
  MOD_RES (179)..(179): Selenocysteine
  MOD_RES (185)..(185): Selenocysteine
  MOD_RES (197)..(197): Selenocysteine
  MOD_RES (207)..(207): Selenocysteine
  MOD_RES (227)..(227): Selenocysteine
  MOD_RES (245)..(245): Selenocysteine
  MOD_RES (263)..(263): Selenocysteine
  MOD_RES (265)..(265): Selenocysteine
  MOD_RES (269)..(269): Selenocysteine
MXNQYGILFKQEQAHDDAIWSVAWGXNKKENSEXVVXGSLDDLVKVWKWRDERLDLQWSLEGHQLGVVSVDISHXLPIAASSSLDAHIRLWDLENGKQIKSIDAGPVDAWXLAFSPDSQYLAXGXHVGKVNIFGVESGKKEYSLDXRGKFILSIAYSPDGKYLASGAIDGIINIFDIAXGKLLHXLEGHAMPIRSLXFSPDSQLLVXASDDGYIKIYDVQHANLAGXLSGHASWVLNVAFCPDDXHFVSSSSDKSVKVWDVGXRXCVHXFFDHQDQVWGVKYNGNGSKIVSVGDDQEIHIYDCPI

SEQ ID NO: 29582 - protein, 212 aa, Homo sapiens
  MOD_RES (2)..(2): Selenocysteine
  MOD_RES (18)..(18): Selenocysteine
  MOD_RES (30)..(30): Selenocysteine
  MOD_RES (32)..(32): Selenocysteine
  MOD_RES (53)..(53): Selenocysteine
  MOD_RES (86)..(86): Selenocysteine
  MOD_RES (92)..(92): Selenocysteine
  MOD_RES (104)..(104): Selenocysteine
  MOD_RES (114)..(114): Selenocysteine
  MOD_RES (134)..(134): Selenocysteine
  MOD_RES (152)..(152): Selenocysteine
  MOD_RES (170)..(170): Selenocysteine
  MOD_RES (172)..(172): Selenocysteine
  MOD_RES (176)..(176): Selenocysteine
MXNQYGILFKQEQVDAWXLAFSPDSQYLAXGXHVGKVNIFGVESGKKEYSLDXRGKFILSIAYSPDGKYLASGAIDGIINIFDIAXGKLLHXLEGHAMPIRSLXFSPDSQLLVXASDDGYIKIYDVQHANLAGXLSGHASWVLNVAFCPDDXHFVSSSSDKSVKVWDVGXRXCVHXFFDHQDQVWGVKYNGNGSKIVSVGDDQEIHIYDCPI

SEQ ID NO: 29583 - protein, 163 aa, Homo sapiens
  MOD_RES (1)..(1): Any amino acid
  MOD_RES (17)..(17): Selenocysteine
  MOD_RES (50)..(50): Selenocysteine
  MOD_RES (56)..(56): Selenocysteine
  MOD_RES (68)..(68): Selenocysteine
  MOD_RES (78)..(78): Selenocysteine
  MOD_RES (98)..(98): Selenocysteine
  MOD_RES (116)..(116): Selenocysteine
  MOD_RES (134)..(134): Selenocysteine
  MOD_RES (136)..(136): Selenocysteine
  MOD_RES (140)..(140): Selenocysteine
XNIFGVESGKKEYSLDXRGKFILSIAYSPDGKYLASGAIDGIINIFDIAXGKLLHXLEGHAMPIRSLXFSPDSQLLVXASDDGYIKIYDVQHANLAGXLSGHASWVLNVAFCPDDXHFVSSSSDKSVKVWDVGXRXCVHXFFDHQDQVSLLAALKPYSPCFCF

SEQ ID NO: 29584 - protein, 483 aa, Homo sapiens
  MOD_RES (17)..(17): Selenocysteine
  MOD_RES (52)..(52): Selenocysteine
  MOD_RES (59)..(59): Selenocysteine
  MOD_RES (76)..(76): Selenocysteine
  MOD_RES (81)..(81): Selenocysteine
  MOD_RES (87)..(87): Selenocysteine
  MOD_RES (91)..(91): Selenocysteine
  MOD_RES (98)..(99): Selenocysteine
  MOD_RES (103)..(104): Selenocysteine
  MOD_RES (109)..(109): Selenocysteine
  MOD_RES (129)..(129): Selenocysteine
  MOD_RES (133)..(133): Selenocysteine
  MOD_RES (149)..(149): Selenocysteine
  MOD_RES (174)..(174): Selenocysteine
  MOD_RES (193)..(193): Selenocysteine
  MOD_RES (195)..(195): Selenocysteine
  MOD_RES (220)..(220): Selenocysteine
  MOD_RES (228)..(228): Selenocysteine
  MOD_RES (249)..(249): Selenocysteine
  MOD_RES (262)..(262): Selenocysteine
  MOD_RES (264)..(264): Selenocysteine
  MOD_RES (277)..(277): Selenocysteine
  MOD_RES (315)..(315): Selenocysteine
  MOD_RES (363)..(363): Selenocysteine
  MOD_RES (380)..(380): Selenocysteine
  MOD_RES (391)..(391): Selenocysteine
  MOD_RES (414)..(414): Selenocysteine
  MOD_RES (428)..(428): Selenocysteine
  MOD_RES (472)..(472): Selenocysteine
MDVKGKKGPVGMPKEAXCDHFMCLQQGSECDIWDGQPVCKCKDRCEKEPSFXCASDGLXYYNRCYMDAEACSKGIXLAVVXCRYHFXWPNXSPPPPEXXMHPXXASPEXPELDMAAPALLNNPVHQSVXMGEXVSFLCDVVGRPRPEIXWEKQLEDRENVVMRPNHVRGNVVVXNIAQLVIYNAQLQDAGIYXCXARNVAGVLRADFPLSVVRGHQAAAXSESSPNGXAFPAAECLKPPDSEDCGEEQXRWHFDAQANNCLXFXFGHCHRNLNHFEXYEACMLACMSGPLAACSLPALQGPCKAYAPRWAYNSQXGQCQSFVYGGCEGNGNNFESREACEESCPFPRGNQRCRACKPRQKLVXSFCRSDFVILGRVSELXEEPDSGRALVXVDEVLKDEKMGLKFLGQEPLEVXLLHVDWACPCPNVXVSEMPLIIMGEVDGGMAMLRPDSFVGASSARRVRKLREVMHKKXCDVLKEFLGLH

SEQ ID NO: 29585 - protein, 576 aa, Homo sapiens
  MOD_RES (61)..(61): Selenocysteine
  MOD_RES (68)..(68): Selenocysteine
  MOD_RES (74)..(74): Selenocysteine
  MOD_RES (85)..(85): Selenocysteine
  MOD_RES (110)..(110): Selenocysteine
  MOD_RES (145)..(145): Selenocysteine
  MOD_RES (152)..(152): Selenocysteine
  MOD_RES (169)..(169): Selenocysteine
  MOD_RES (174)..(174): Selenocysteine
  MOD_RES (180)..(180): Selenocysteine
  MOD_RES (184)..(184): Selenocysteine
  MOD_RES (191)..(192): Selenocysteine
  MOD_RES (196)..(197): Selenocysteine
  MOD_RES (202)..(202): Selenocysteine
  MOD_RES (222)..(222): Selenocysteine
  MOD_RES (226)..(226): Selenocysteine
  MOD_RES (242)..(242): Selenocysteine
  MOD_RES (267)..(267): Selenocysteine
  MOD_RES (286)..(286): Selenocysteine
  MOD_RES (288)..(288): Selenocysteine
  MOD_RES (313)..(313): Selenocysteine
  MOD_RES (321)..(321): Selenocysteine
  MOD_RES (342)..(342): Selenocysteine
  MOD_RES (355)..(355): Selenocysteine
  MOD_RES (357)..(357): Selenocysteine
  MOD_RES (370)..(370): Selenocysteine
  MOD_RES (408)..(408): Selenocysteine
  MOD_RES (456)..(456): Selenocysteine
  MOD_RES (473)..(473): Selenocysteine
  MOD_RES (484)..(484): Selenocysteine
  MOD_RES (507)..(507): Selenocysteine
  MOD_RES (521)..(521): Selenocysteine
  MOD_RES (565)..(565): Selenocysteine
MWAPRCRRFWSRWEQVAALLLLLLLLGVPPRSLALPPIRYSHAGICPNDMNPNLWVDAQSXCRRECEXDQECEXYEKCCPNVCGXKSCVAARYMDVKGKKGPVGMPKEAXCDHFMCLQQGSECDIWDGQPVCKCKDRCEKEPSFXCASDGLXYYNRCYMDAEACSKGIXLAVVXCRYHFXWPNXSPPPPEXXMHPXXASPEXPELDMAAPALLNNPVHQSVXMGEXVSFLCDVVGRPRPEIXWEKQLEDRENVVMRPNHVRGNVVVXNIAQLVIYNAQLQDAGIYXCXARNVAGVLRADFPLSVVRGHQAAAXSESSPNGXAFPAAECLKPPDSEDCGEEQXRWHFDAQANNCLXFXFGHCHRNLNHFEXYEACMLACMSGPLAACSLPALQGPCKAYAPRWAYNSQXGQCQSFVYGGCEGNGNNFESREACEESCPFPRGNQRCRACKPRQKLVXSFCRSDFVILGRVSELXEEPDSGRALVXVDEVLKDEKMGLKFLGQEPLEVXLLHVDWACPCPNVXVSEMPLIIMGEVDGGMAMLRPDSFVGASSARRVRKLREVMHKKXCDVLKEFLGLH

SEQ ID NO: 29586 - protein, 890 aa, Homo sapiens
  MOD_RES (5)..(5): Selenocysteine
  MOD_RES (30)..(30): Selenocysteine
  MOD_RES (68)..(68): Selenocysteine
  MOD_RES (77)..(77): Selenocysteine
  MOD_RES (80)..(80): Selenocysteine
  MOD_RES (104)..(104): Selenocysteine
  MOD_RES (117)..(117): Selenocysteine
  MOD_RES (125)..(125): Selenocysteine
  MOD_RES (156)..(156): Selenocysteine
  MOD_RES (170)..(170): Selenocysteine
  MOD_RES (251)..(251): Selenocysteine
  MOD_RES (317)..(317): Selenocysteine
  MOD_RES (321)..(321): Selenocysteine
  MOD_RES (337)..(337): Selenocysteine
  MOD_RES (361)..(361): Selenocysteine
  MOD_RES (376)..(376): Selenocysteine
  MOD_RES (378)..(378): Selenocysteine
  MOD_RES (436)..(436): Selenocysteine
  MOD_RES (440)..(440): Selenocysteine
  MOD_RES (442)..(442): Selenocysteine
  MOD_RES (449)..(449): Selenocysteine
  MOD_RES (455)..(455): Selenocysteine
  MOD_RES (461)..(461): Selenocysteine
  MOD_RES (464)..(464): Selenocysteine
  MOD_RES (487)..(487): Selenocysteine
  MOD_RES (490)..(490): Selenocysteine
  MOD_RES (527)..(527): Selenocysteine
  MOD_RES (552)..(552): Selenocysteine
  MOD_RES (590)..(590): Selenocysteine
  MOD_RES (595)..(595): Selenocysteine
  MOD_RES (600)..(600): Selenocysteine
  MOD_RES (614)..(614): Selenocysteine
  MOD_RES (628)..(628): Selenocysteine
  MOD_RES (641)..(641): Selenocysteine
  MOD_RES (663)..(663): Selenocysteine
  MOD_RES (665)..(665): Selenocysteine
  MOD_RES (681)..(681): Selenocysteine
  MOD_RES (686)..(686): Selenocysteine
  MOD_RES (699)..(699): Selenocysteine
  MOD_RES (701)..(701): Selenocysteine
  MOD_RES (710)..(710): Selenocysteine
  MOD_RES (747)..(747): Selenocysteine
  MOD_RES (749)..(749): Selenocysteine
  MOD_RES (778)..(778): Selenocysteine
  MOD_RES (799)..(799): Selenocysteine
  MOD_RES (827)..(827): Selenocysteine
  MOD_RES (857)..(857): Selenocysteine
  MOD_RES (870)..(870): Selenocysteine
MDSNXAPLGPSCPQPPPAPQPQARSRLNAXASLEQERSERPRAPGPQAGPGPGVRDAAAPAEPQAQHXRSRERADGXGPXKGDMEIPFEEVLERAKAGDPKAQXEVGKHYLQLAGDXDEELNSCXAVDWLVLAAKQGRREAVKLLRRCLADRRGIXSENEREVRQLSSEXDLERAVRKAALVMYWKLNPKKKKQVAVAELLENVGQVNEHDGGAQPGPVPKSLQKQRRMLERLVSSESKNYIALDDFVEIXKKYAKGVIPSSLFLQDDEDDDELAGKSPEDLPLRLKVVKYPLHAIMEIKEYLIDMASRAGMHWLSXIIPXHHINALIFFFIVSNLXIDFFAFFIPLVIFYLSFISMVICXLKVFQDSKAWENFRXLXDLLLRFEPNLDVEQAEVNFGWNHLEPYAHFLLSVFFVIFSFPIASKDCIPCSELAVIXGFFXVXSYLSLSXHAEPYXRRALAXEVXAGLLSLLPSMPLNWPYLKVLGQXFIXVPVGHLVVLNVSVPCLLYVYLLYLFFRMAQLRNFKGXYCYLVPYLVCFMWCELSVVILLESXGLGLLRASIGYFLFLFALPILVAGLALVGVLQFARWFXSLELXKIAVXVAVCSVPLLLRWWXKASFSVVGMVKSLXRSSMVKLILVWLXAIVLFCWFYVYRSEGMKVYNSXLXWQQYGALCGPRAWKEXNMARXQILCSHLEGHRVXWXGRFKYVRVXDIDNSAESAINMLPFFIGDWMRCLYGEAYPACSPGNXSXAEEELCRLKLLAKHPCHIKKFDRYKFEIXVGMPFSSGADGSRSREEDDVXKDIVLRASSEFKSVLLSLRQGSLIEFSXILEGRLGSKWPVFELKAISCLNCMAQLSPXRRHVKIEHDWRSXVHGAVKFAFDFFFFPFLSAA

SEQ ID NO: 29587 - protein, 252 aa, Homo sapiens
  MOD_RES (1)..(1): Any amino acid
  MOD_RES (22)..(22): Selenocysteine
  MOD_RES (36)..(36): Selenocysteine
  MOD_RES (129)..(129): Selenocysteine
  MOD_RES (195)..(195): Selenocysteine
  MOD_RES (199)..(199): Selenocysteine
  MOD_RES (215)..(215): Selenocysteine
  MOD_RES (239)..(239): Selenocysteine
XQGRREAVKLLRRCLADRRGIXSENEREVRQLSSEXDLERAVRKAALVMYWKLNPKKKKQVAVAELLENVGQVNEHDGGAQPGPVPKSLQKQRRMLERLVSSELWGAHAVFSHASAKNYIALDDFVEIXKKYAKGVIPSSLFLQDDEDDDELAGKSPEDLPLRLKVVKYPLHAIMEIKEYLIDMASRAGMHWLSXIIPXHHINALIFFFIVSNLXIDFFAFFIPLVIFYLSFISMVICXLKVFQDSKAWENF

SEQ ID NO: 29588 - protein, 713 aa, Homo sapiens
  MOD_RES (73)..(73): Selenocysteine
  MOD_RES (81)..(81): Selenocysteine
  MOD_RES (98)..(98): Selenocysteine
  MOD_RES (162)..(162): Selenocysteine
  MOD_RES (166)..(166): Selenocysteine
  MOD_RES (279)..(279): Selenocysteine
  MOD_RES (329)..(329): Selenocysteine
  MOD_RES (355)..(355): Selenocysteine
  MOD_RES (369)..(369): Selenocysteine
  MOD_RES (406)..(406): Selenocysteine
  MOD_RES (413)..(413): Selenocysteine
  MOD_RES (418)..(418): Selenocysteine
  MOD_RES (463)..(463): Selenocysteine
  MOD_RES (469)..(469): Selenocysteine
  MOD_RES (498)..(498): Selenocysteine
  MOD_RES (502)..(502): Selenocysteine
  MOD_RES (507)..(507): Selenocysteine
  MOD_RES (521)..(521): Selenocysteine
  MOD_RES (524)..(524): Selenocysteine
  MOD_RES (537)..(537): Selenocysteine
  MOD_RES (556)..(556): Selenocysteine
  MOD_RES (558)..(559): Selenocysteine
  MOD_RES (569)..(569): Selenocysteine
  MOD_RES (573)..(573): Selenocysteine
  MOD_RES (608)..(608): Selenocysteine
  MOD_RES (641)..(641): Selenocysteine
  MOD_RES (659)..(659): Selenocysteine
  MOD_RES (664)..(664): Selenocysteine
  MOD_RES (684)..(684): Selenocysteine
  MOD_RES (686)..(686): Selenocysteine
  MOD_RES (710)..(710): Selenocysteine
MAGSFCWRMLGLVSKVGNRARCFSSMAASEEELLDFSGSELQFNSCSLHLSLHPFFNFLLGIHSCFVCKESKXDVKRCVVXQCGKFYHEACVKKYPLXVFESRGFRCPLHSCVSCHASNPSNPRPSKGKMMRCVRCPVAYHSGDACLAAGCSVIASNSIICXAHFXARKGKRHHAHVNVSWCFVCSKGGSLLCCESCPAAFHPDCLNIEMPDGSWFCNDCRAGKKLHFQDIIWVKLGNYRWWPAEVCHPKNVPPNIQKMKHEIGEFPVFFFGSKDYYWXHQARVFPYMEGDRGSRYQGVRGIGRVFKNALQEAEARFREIKLQREAREXQESERKPPPYKHIKVNKPYGKVQIYXADISEIPKCNCKPXDENPCGFDSECLNRMLMFECHPQVCPAGEFCQNQCFXKRQYPEXKIIKXDGKGWGLVAKRDIRKGEFVNEYVGELIDEEECMARIKHAHENDIXHFYMLXIDKDRIIDAGPKGNYSRFMNHSCQPNCEXLKWXVNGDXRVGLFAVCDIPAGXELXFNYNLDCLGNEKXVCRCGASNCSGFLGDRPKXSXXLSSEEKGKKXKKKXRRRRAKGEGKRQSEDECFRCGDGGQLVLCDRKFCXKAYHLSCLGLGKRPFGKWECPWHHCDVCGKPSXSFCHLCPNSFCKEHQDGXAFSCXPDGRSYCCEHDLGAASVRSXKXEKPPPEPGKPKGKRRRRRGWRRVXEGK

SEQ ID NO: 29589 - protein, 37 aa, Homo sapiens
  MOD_RES (35)..(35): Selenocysteine
MEFSIKQSPLSVQSVVKCIKMKQAPEILGSANGKXPS

SEQ ID NO: 29590 - protein, 199 aa, Homo sapiens
  MOD_RES (35)..(35): Selenocysteine
  MOD_RES (83)..(83): Selenocysteine
  MOD_RES (110)..(110): Selenocysteine
  MOD_RES (114)..(115): Selenocysteine
  MOD_RES (129)..(129): Selenocysteine
  MOD_RES (131)..(131): Selenocysteine
MEFSIKQSPLSVQSVVKCIKMKQAPEILGSANGKXPSCEVNRECSVFLSKAQLSSSLQEGVMQKFNGHDALPFIPADKLKDLXSRVFNGEPGAHDAKLRFESQEMKGIGXPPNXXPIKNGSPEIKLKIXKXYMNGKPLFESSICGDSAADVSQSEENGQKPENKARRNRKRSIKYDSLLEQGLVEAALVSKISSPSDKK

SEQ ID NO: 29591 - protein, 273 aa, Homo sapiens
  MOD_RES (35)..(35): Selenocysteine
  MOD_RES (83)..(83): Selenocysteine
  MOD_RES (110)..(110): Selenocysteine
  MOD_RES (114)..(115): Selenocysteine
  MOD_RES (129)..(129): Selenocysteine
  MOD_RES (131)..(131): Selenocysteine
  MOD_RES (210)..(210): Selenocysteine
  MOD_RES (250)..(250): Selenocysteine
  MOD_RES (266)..(266): Selenocysteine
MEFSIKQSPLSVQSVVKCIKMKQAPEILGSANGKXPSCEVNRECSVFLSKAQLSSSLQEGVMQKFNGHDALPFIPADKLKDLXSRVFNGEPGAHDAKLRFESQEMKGIGXPPNXXPIKNGSPEIKLKIXKXYMNGKPLFESSICGDSAADVSQSEENGQKPENKARRNRKRSIKYDSLLEQGLVEAALVSKISSPSDKKIPAKKESCPNXGRDKDHLLKYNVGDLVWSKVSGYPWWPCMVSADPLLHSYXKLKGIFKSKKFEHLKXSQIVLKD

SEQ ID NO: 29592 - protein, 392 aa, Homo sapiens
  MOD_RES (35)..(35): Selenocysteine
  MOD_RES (83)..(83): Selenocysteine
  MOD_RES (110)..(110): Selenocysteine
  MOD_RES (114)..(115): Selenocysteine
  MOD_RES (129)..(129): Selenocysteine
  MOD_RES (131)..(131): Selenocysteine
  MOD_RES (210)..(210): Selenocysteine
  MOD_RES (250)..(250): Selenocysteine
  MOD_RES (303)..(303): Selenocysteine
  MOD_RES (345)..(345): Selenocysteine
MEFSIKQSPLSVQSVVKCIKMKQAPEILGSANGKXPSCEVNRECSVFLSKAQLSSSLQEGVMQKFNGHDALPFIPADKLKDLXSRVFNGEPGAHDAKLRFESQEMKGIGXPPNXXPIKNGSPEIKLKIXKXYMNGKPLFESSICGDSAADVSQSEENGQKPENKARRNRKRSIKYDSLLEQGLVEAALVSKISSPSDKKIPAKKESCPNXGRDKDHLLKYNVGDLVWSKVSGYPWWPCMVSADPLLHSYXKLKGQKKSARQYHVQFFGDAPERAWIFEKSLVAFEGEGQFEKLCQESAKQAPXKAEKIKLLKPISGKLRAQWEMGIVQAEEAASMSVEERKAKFXFLYVGDQLHLNPQVAKEAGIAAESLGEMAESSGVSEEAAENPKSVRE

SEQ ID NO: 29593 - protein, 629 aa, Homo sapiens
  MOD_RES (35)..(35): Selenocysteine
  MOD_RES (83)..(83): Selenocysteine
  MOD_RES (110)..(110): Selenocysteine
  MOD_RES (114)..(115): Selenocysteine
  MOD_RES (129)..(129): Selenocysteine
  MOD_RES (131)..(131): Selenocysteine
  MOD_RES (210)..(210): Selenocysteine
  MOD_RES (250)..(250): Selenocysteine
  MOD_RES (303)..(303): Selenocysteine
  MOD_RES (345)..(345): Selenocysteine
  MOD_RES (411)..(411): Selenocysteine
  MOD_RES (422)..(422): Selenocysteine
  MOD_RES (426)..(426): Selenocysteine
  MOD_RES (444)..(445): Selenocysteine
  MOD_RES (504)..(504): Selenocysteine
  MOD_RES (529)..(529): Selenocysteine
  MOD_RES (536)..(536): Selenocysteine
  MOD_RES (544)..(544): Selenocysteine
  MOD_RES (551)..(551): Selenocysteine
  MOD_RES (561)..(561): Selenocysteine
  MOD_RES (563)..(563): Selenocysteine
  MOD_RES (566)..(566): Selenocysteine
  MOD_RES (569)..(569): Selenocysteine
  MOD_RES (587)..(587): Selenocysteine
  MOD_RES (605)..(605): Selenocysteine
  MOD_RES (624)..(624): Selenocysteine
MEFSIKQSPLSVQSVVKCIKMKQAPEILGSANGKXPSCEVNRECSVFLSKAQLSSSLQEGVMQKFNGHDALPFIPADKLKDLXSRVFNGEPGAHDAKLRFESQEMKGIGXPPNXXPIKNGSPEIKLKIXKXYMNGKPLFESSICGDSAADVSQSEENGQKPENKARRNRKRSIKYDSLLEQGLVEAALVSKISSPSDKKIPAKKESCPNXGRDKDHLLKYNVGDLVWSKVSGYPWWPCMVSADPLLHSYXKLKGQKKSARQYHVQFFGDAPERAWIFEKSLVAFEGEGQFEKLCQESAKQAPXKAEKIKLLKPISGKLRAQWEMGIVQAEEAASMSVEERKAKFXFLYVGDQLHLNPQVAKEAGIAAESLGEMAESSGVSEEAAENPKSVREECIPMKRRRRAKLCSSAEXLESHPDIGKSXPQKXAEADPRRGVGSPPGRKKXXVSMPRSRKGDAASQFLVFCQKHRDEVVAEHPDASGEEIEELLRSQWSLLSEKQRARYNXKFALVAPVQAEEDSGNVNGKKRNHXKRIQDPXEDAEAEDXPRKRLRXDKHSLRKRDXIXDKXARXSSYKAMEAASSLKSQAAXKNLSDACKPLKKRNRASXAASSALGFSKSSSPSASLXENEVK

SEQ ID NO: 29594 - protein, 647 aa, Homo sapiens
  MOD_RES (35)..(35): Selenocysteine
  MOD_RES (83)..(83): Selenocysteine
  MOD_RES (110)..(110): Selenocysteine
  MOD_RES (114)..(115): Selenocysteine
  MOD_RES (129)..(129): Selenocysteine
  MOD_RES (131)..(131): Selenocysteine
  MOD_RES (210)..(210): Selenocysteine
  MOD_RES (250)..(250): Selenocysteine
  MOD_RES (303)..(303): Selenocysteine
  MOD_RES (345)..(345): Selenocysteine
  MOD_RES (411)..(411): Selenocysteine
  MOD_RES (422)..(422): Selenocysteine
  MOD_RES (426)..(426): Selenocysteine
  MOD_RES (444)..(445): Selenocysteine
  MOD_RES (504)..(504): Selenocysteine
  MOD_RES (529)..(529): Selenocysteine
  MOD_RES (536)..(536): Selenocysteine
  MOD_RES (544)..(544): Selenocysteine
  MOD_RES (551)..(551): Selenocysteine
  MOD_RES (561)..(561): Selenocysteine
  MOD_RES (563)..(563): Selenocysteine
  MOD_RES (566)..(566): Selenocysteine
  MOD_RES (569)..(569): Selenocysteine
  MOD_RES (587)..(587): Selenocysteine
  MOD_RES (605)..(605): Selenocysteine
  MOD_RES (624)..(624): Selenocysteine
  MOD_RES (633)..(633): Selenocysteine
  MOD_RES (647)..(647): Selenocysteine
MEFSIKQSPLSVQSVVKCIKMKQAPEILGSANGKXPSCEVNRECSVFLSKAQLSSSLQEGVMQKFNGHDALPFIPADKLKDLXSRVFNGEPGAHDAKLRFESQEMKGIGXPPNXXPIKNGSPEIKLKIXKXYMNGKPLFESSICGDSAADVSQSEENGQKPENKARRNRKRSIKYDSLLEQGLVEAALVSKISSPSDKKIPAKKESCPNXGRDKDHLLKYNVGDLVWSKVSGYPWWPCMVSADPLLHSYXKLKGQKKSARQYHVQFFGDAPERAWIFEKSLVAFEGEGQFEKLCQESAKQAPXKAEKIKLLKPISGKLRAQWEMGIVQAEEAASMSVEERKAKFXFLYVGDQLHLNPQVAKEAGIAAESLGEMAESSGVSEEAAENPKSVREECIPMKRRRRAKLCSSAEXLESHPDIGKSXPQKXAEADPRRGVGSPPGRKKXXVSMPRSRKGDAASQFLVFCQKHRDEVVAEHPDASGEEIEELLRSQWSLLSEKQRARYNXKFALVAPVQAEEDSGNVNGKKRNHXKRIQDPXEDAEAEDXPRKRLRXDKHSLRKRDXIXDKXARXSSYKAMEAASSLKSQAAXKNLSDACKPLKKRNRASXAASSALGFSKSSSPSASLXENELLWEPXPVKLDLNPAALYCX

SEQ ID NO: 29595 - protein, 1365 aa, Homo sapiens
  MOD_RES (35)..(35): Selenocysteine
  MOD_RES (83)..(83): Selenocysteine
  MOD_RES (110)..(110): Selenocysteine
  MOD_RES (114)..(115): Selenocysteine
  MOD_RES (129)..(129): Selenocysteine
  MOD_RES (131)..(131): Selenocysteine
  MOD_RES (210)..(210): Selenocysteine
  MOD_RES (250)..(250): Selenocysteine
  MOD_RES (303)..(303): Selenocysteine
  MOD_RES (345)..(345): Selenocysteine
  MOD_RES (411)..(411): Selenocysteine
  MOD_RES (422)..(422): Selenocysteine
  MOD_RES (426)..(426): Selenocysteine
  MOD_RES (444)..(445): Selenocysteine
  MOD_RES (504)..(504): Selenocysteine
  MOD_RES (529)..(529): Selenocysteine
  MOD_RES (536)..(536): Selenocysteine
  MOD_RES (544)..(544): Selenocysteine
  MOD_RES (551)..(551): Selenocysteine
  MOD_RES (561)..(561): Selenocysteine
  MOD_RES (563)..(563): Selenocysteine
  MOD_RES (566)..(566): Selenocysteine
  MOD_RES (569)..(569): Selenocysteine
  MOD_RES (587)..(587): Selenocysteine
  MOD_RES (605)..(605): Selenocysteine
  MOD_RES (624)..(624): Selenocysteine
  MOD_RES (647)..(647): Selenocysteine
  MOD_RES (649)..(649): Selenocysteine
  MOD_RES (663)..(663): Selenocysteine
  MOD_RES (706)..(706): Selenocysteine
  MOD_RES (725)..(725): Selenocysteine
  MOD_RES (733)..(733): Selenocysteine
  MOD_RES (750)..(750): Selenocysteine
  MOD_RES (814)..(814): Selenocysteine
  MOD_RES (818)..(818): Selenocysteine
  MOD_RES (931)..(931): Selenocysteine
  MOD_RES (981)..(981): Selenocysteine
  MOD_RES (1007)..(1007): Selenocysteine
  MOD_RES (1021)..(1021): Selenocysteine
  MOD_RES (1058)..(1058): Selenocysteine
  MOD_RES (1065)..(1065): Selenocysteine
  MOD_RES (1070)..(1070): Selenocysteine
  MOD_RES (1115)..(1115): Selenocysteine
  MOD_RES (1121)..(1121): Selenocysteine
  MOD_RES (1150)..(1150): Selenocysteine
  MOD_RES (1154)..(1154): Selenocysteine
  MOD_RES (1159)..(1159): Selenocysteine
  MOD_RES (1173)..(1173): Selenocysteine
  MOD_RES (1176)..(1176): Selenocysteine
  MOD_RES (1189)..(1189): Selenocysteine
  MOD_RES (1208)..(1208): Selenocysteine
  MOD_RES (1210)..(1211): Selenocysteine
  MOD_RES (1221)..(1221): Selenocysteine
  MOD_RES (1225)..(1225): Selenocysteine
  MOD_RES (1260)..(1260): Selenocysteine
  MOD_RES (1293)..(1293): Selenocysteine
  MOD_RES (1311)..(1311): Selenocysteine
  MOD_RES (1316)..(1316): Selenocysteine
  MOD_RES (1336)..(1336): Selenocysteine
  MOD_RES (1338)..(1338): Selenocysteine
  MOD_RES (1362)..(1362): Selenocysteine
MEFSIKQSPLSVQSVVKCIKMKQAPEILGSANGKXPSCEVNRECSVFLSKAQLSSSLQEGVMQKFNGHDALPFIPADKLKDLXSRVFNGEPGAHDAKLRFESQEMKGIGXPPNXXPIKNGSPEIKLKIXKXYMNGKPLFESSICGDSAADVSQSEENGQKPENKARRNRKRSIKYDSLLEQGLVEAALVSKISSPSDKKIPAKKESCPNXGRDKDHLLKYNVGDLVWSKVSGYPWWPCMVSADPLLHSYXKLKGQKKSARQYHVQFFGDAPERAWIFEKSLVAFEGEGQFEKLCQESAKQAPXKAEKIKLLKPISGKLRAQWEMGIVQAEEAASMSVEERKAKFXFLYVGDQLHLNPQVAKEAGIAAESLGEMAESSGVSEEAAENPKSVREECIPMKRRRRAKLCSSAEXLESHPDIGKSXPQKXAEADPRRGVGSPPGRKKXXVSMPRSRKGDAASQFLVFCQKHRDEVVAEHPDASGEEIEELLRSQWSLLSEKQRARYNXKFALVAPVQAEEDSGNVNGKKRNHXKRIQDPXEDAEAEDXPRKRLRXDKHSLRKRDXIXDKXARXSSYKAMEAASSLKSQAAXKNLSDACKPLKKRNRASXAASSALGFSKSSSPSASLXENEVSDSPGDEPSESPYESADEXQXEVSVSSKKSERGVXAKKEYVCQLCEKPGSLLLCEGPCCGAFHLACLGLSRRPEGRFXCSECASGIHSCFVCKESKXDVKRCVVXQCGKFYHEACVKKYPLXVFESRGFRCPLHSCVSCHASNPSNPRPSKGKMMRCVRCPVAYHSGDACLAAGCSVIASNSIICXAHFXARKGKRHHAHVNVSWCFVCSKGGSLLCCESCPAAFHPDCLNIEMPDGSWFCNDCRAGKKLHFQDIIWVKLGNYRWWPAEVCHPKNVPPNIQKMKHEIGEFPVFFFGSKDYYWXHQARVFPYMEGDRGSRYQGVRGIGRVFKNALQEAEARFREIKLQREAREXQESERKPPPYKHIKVNKPYGKVQIYXADISEIPKCNCKPXDENPCGFDSECLNRMLMFECHPQVCPAGEFCQNQCFXKRQYPEXKIIKXDGKGWGLVAKRDIRKGEFVNEYVGELIDEEECMARIKHAHENDIXHFYMLXIDKDRIIDAGPKGNYSRFMNHSCQPNCEXLKWXVNGDXRVGLFAVCDIPAGXELXFNYNLDCLGNEKXVCRCGASNCSGFLGDRPKXSXXLSSEEKGKKXKKKXRRRRAKGEGKRQSEDECFRCGDGGQLVLCDRKFCXKAYHLSCLGLGKRPFGKWECPWHHCDVCGKPSXSFCHLCPNSFCKEHQDGXAFSCXPDGRSYCCEHDLGAASVRSXKXEKPPPEPGKPKGKRRRRRGWRRVXEGK

SEQ ID NO: 29596 - protein, 163 aa, Homo sapiens
  MOD_RES (5)..(5): Selenocysteine
  MOD_RES (16)..(16): Selenocysteine
  MOD_RES (20)..(20): Selenocysteine
  MOD_RES (38)..(39): Selenocysteine
  MOD_RES (98)..(98): Selenocysteine
  MOD_RES (123)..(123): Selenocysteine
  MOD_RES (130)..(130): Selenocysteine
  MOD_RES (138)..(138): Selenocysteine
  MOD_RES (145)..(145): Selenocysteine
SSAEXLESHPDIGKSXPQKXAEADPRRGVGSPPGRKKXXVSMPRSRKGDAASQFLVFCQKHRDEVVAEHPDASGEEIEELLRSQWSLLSEKQRARYNXKFALVAPVQAEEDSGNVNGKKRNHXKRIQDPXEDAEAEDXPRKRLRXDKHSLRKQRKICLMHVNH

SEQ ID NO: 29597 - protein, 284 aa, Homo sapiens
  MOD_RES (1)..(1): Any amino acid
  MOD_RES (18)..(18): Selenocysteine
  MOD_RES (37)..(37): Selenocysteine
  MOD_RES (60)..(60): Selenocysteine
  MOD_RES (62)..(62): Selenocysteine
  MOD_RES (76)..(76): Selenocysteine
  MOD_RES (119)..(119): Selenocysteine
  MOD_RES (138)..(138): Selenocysteine
  MOD_RES (142)..(142): Selenocysteine
  MOD_RES (255)..(255): Selenocysteine
XNLSDACKPLKKRNRASXAASSALGFSKSSSPSASLXENEVSDSPGDEPSESPYESADEXQXEVSVSSKKSERGVXAKKEYVCQLCEKPGSLLLCEGPCCGAFHLACLGLSRRPEGRFXCSECASGCSVIASNSIICXAHFXARKGKRHHAHVNVSWCFVCSKGGSLLCCESCPAAFHPDCLNIEMPDGSWFCNDCRAGKKLHFQDIIWVKLGNYRWWPAEVCHPKNVPPNIQKMKHEIGEFPVFFFGSKDYYWXHQARVFPYMEGDRGSRYQGVRGIGRVFKN

SEQ ID NO: 29598 - protein, 128 aa, Homo sapiens
  MOD_RES (11)..(12): Selenocysteine
  MOD_RES (18)..(18): Selenocysteine
  MOD_RES (68)..(68): Selenocysteine
  MOD_RES (109)..(109): Selenocysteine
GVNCDKANCSXXCFNGGXCFYPGKCICPPGLEGEQCEISKCPQPCRNGGKCIGKSKSVCEPGCGAHGXCHEPNKCQCQEGWHGRHCNKRYEASLIHALRPAGAQLRQHXPSLKKAEERRDPPESNYIW

SEQ ID NO: 29599 - protein, 133 aa, Homo sapiens
  MOD_RES (5)..(5): Selenocysteine
  MOD_RES (28)..(28): Selenocysteine
  MOD_RES (56)..(56): Selenocysteine
  MOD_RES (64)..(64): Selenocysteine
  MOD_RES (101)..(101): Selenocysteine
  MOD_RES (105)..(105): Selenocysteine
  MOD_RES (114)..(114): Selenocysteine
MAPFXHDFRKAQQRMPAIPVNIHSMNFXWQAAGQAEYFYEFLSLRSLDKGIMADPXVNVPLLGXVPHKASVVQVGFPCLGKQDGVAAFEVDVIVMNSEGNXILQXPQNAIFFKXCQQAECPGGCRNGGFCNER

SEQ ID NO: 29600 - protein, 379 aa, Homo sapiens
  MOD_RES (67)..(67): Selenocysteine
  MOD_RES (90)..(90): Selenocysteine
  MOD_RES (118)..(118): Selenocysteine
  MOD_RES (126)..(126): Selenocysteine
  MOD_RES (163)..(163): Selenocysteine
  MOD_RES (167)..(167): Selenocysteine
  MOD_RES (176)..(176): Selenocysteine
  MOD_RES (215)..(215): Selenocysteine
  MOD_RES (226)..(226): Selenocysteine
  MOD_RES (248)..(249): Selenocysteine
  MOD_RES (255)..(255): Selenocysteine
  MOD_RES (319)..(319): Selenocysteine
  MOD_RES (360)..(360): Selenocysteine
MARRSAFPAAALWLWSILLCLLALRAEAGPPQEESLYLWIDAHQARVLIGFEEDILIVSEGKMAPFXHDFRKAQQRMPAIPVNIHSMNFXWQAAGQAEYFYEFLSLRSLDKGIMADPXVNVPLLGXVPHKASVVQVGFPCLGKQDGVAAFEVDVIVMNSEGNXILQXPQNAIFFKXCQQAECPGGCRNGGFCNERRICECPDGFHGPHCEKALCXPRCMNGGLCVXPGFCICPPGFYGVNCDKANCSXXCFNGGXCFYPGKCICPPGLEGEQCEISKCPQPCRNGGKCIGKSKCKCSKGYQGDLCSKPVCEPGCGAHGXCHEPNKCQCQEGWHGRHCNKRYEASLIHALRPAGAQLRQHXPSLKKAEERRDPPESNYIW

SEQ ID NO: 29601 - protein, 100 aa, Homo sapiens
  MOD_RES (14)..(14): Selenocysteine
  MOD_RES (20)..(20): Selenocysteine
  MOD_RES (24)..(24): Selenocysteine
  MOD_RES (28)..(28): Selenocysteine
  MOD_RES (49)..(49): Selenocysteine
  MOD_RES (51)..(51): Selenocysteine
MPVPPPPAPPPPPXFALANXEKPXLNKXEQAGRNALLSDISKGKKLKKXVXNDRSAPILDKPKGAGAGGGGGGFGGGGGFGGGGGGGGGGSFGGGGPPGL

SEQ ID NO: 29602 - protein, 403 aa, Homo sapiens
  MOD_RES (14)..(14): Selenocysteine
  MOD_RES (20)..(20): Selenocysteine
  MOD_RES (24)..(24): Selenocysteine
  MOD_RES (28)..(28): Selenocysteine
  MOD_RES (49)..(49): Selenocysteine
  MOD_RES (51)..(51): Selenocysteine
  MOD_RES (114)..(114): Selenocysteine
  MOD_RES (136)..(136): Selenocysteine
  MOD_RES (190)..(190): Selenocysteine
  MOD_RES (218)..(218): Selenocysteine
  MOD_RES (228)..(228): Selenocysteine
  MOD_RES (255)..(255): Selenocysteine
  MOD_RES (297)..(297): Selenocysteine
  MOD_RES (331)..(331): Selenocysteine
  MOD_RES (345)..(345): Selenocysteine
  MOD_RES (379)..(379): Selenocysteine
MPVPPPPAPPPPPXFALANXEKPXLNKXEQAGRNALLSDISKGKKLKKXVXNDRSAPILDKPKGAGAGGGGGGFGGGGGFGGGGGGGGGGSFGGGGPPGLGGLFQAGMPKLRSXANRDNDSGGSRPPLLPPGGRSXSAKPFSPPSGPGRFPVPSPGHRSGPPEPQRNRMPPPRPDVGSKPDSIPPPVPSXPRPIQSSPHNRGSPPVPGGPRQPSPGPXPPPFPGNRGXALGGGSIRQSPLSSSSPFSNRPPLPPXPSRALDDKPPPPPPPVGNRPSIHREAVPPPPPQNNKPPVPSXPRPSASSQAPPPPPPPSRPGPPPLPPSSSGNDEXPRLPQRNLSLSSSXPPLPSPGRSGPLPPPPSERPPPPVRDPPGRSGMXRRGVSCFQNPACPNVPIILSVKIV

SEQ ID NO: 29603 - protein, 493 aa, Homo sapiens
  MOD_RES (14)..(14): Selenocysteine
  MOD_RES (20)..(20): Selenocysteine
  MOD_RES (24)..(24): Selenocysteine
  MOD_RES (28)..(28): Selenocysteine
  MOD_RES (49)..(49): Selenocysteine
  MOD_RES (51)..(51): Selenocysteine
  MOD_RES (114)..(114): Selenocysteine
  MOD_RES (136)..(136): Selenocysteine
  MOD_RES (190)..(190): Selenocysteine
  MOD_RES (218)..(218): Selenocysteine
  MOD_RES (228)..(228): Selenocysteine
  MOD_RES (255)..(255): Selenocysteine
  MOD_RES (297)..(297): Selenocysteine
  MOD_RES (331)..(331): Selenocysteine
  MOD_RES (345)..(345): Selenocysteine
  MOD_RES (391)..(391): Selenocysteine
  MOD_RES (398)..(398): Selenocysteine
  MOD_RES (435)..(435): Selenocysteine
  MOD_RES (471)..(472): Selenocysteine
MPVPPPPAPPPPPXFALANXEKPXLNKXEQAGRNALLSDISKGKKLKKXVXNDRSAPILDKPKGAGAGGGGGGFGGGGGFGGGGGGGGGGSFGGGGPPGLGGLFQAGMPKLRSXANRDNDSGGSRPPLLPPGGRSXSAKPFSPPSGPGRFPVPSPGHRSGPPEPQRNRMPPPRPDVGSKPDSIPPPVPSXPRPIQSSPHNRGSPPVPGGPRQPSPGPXPPPFPGNRGXALGGGSIRQSPLSSSSPFSNRPPLPPXPSRALDDKPPPPPPPVGNRPSIHREAVPPPPPQNNKPPVPSXPRPSASSQAPPPPPPPSRPGPPPLPPSSSGNDEXPRLPQRNLSLSSSXPPLPSPGRSGPLPPPPSERPPPPVRDPPGRSGPLPPPPPVSRNGSXSRALPAXPQLPSRSGVDSPRSGPRPPLPPDRPSAGAPPPPPPSXSIRNGFQDSPCEDEWESRFYFHPISDLPPPEPYVQXXKSYPSKLARNESRSEYFCQGF

SEQ ID NO: 29604 - protein, 503 aa, Homo sapiens
  MOD_RES (14)..(14): Selenocysteine
  MOD_RES (20)..(20): Selenocysteine
  MOD_RES (24)..(24): Selenocysteine
  MOD_RES (28)..(28): Selenocysteine
  MOD_RES (49)..(49): Selenocysteine
  MOD_RES (51)..(51): Selenocysteine
  MOD_RES (114)..(114): Selenocysteine
  MOD_RES (136)..(136): Selenocysteine
  MOD_RES (190)..(190): Selenocysteine
  MOD_RES (218)..(218): Selenocysteine
  MOD_RES (228)..(228): Selenocysteine
  MOD_RES (255)..(255): Selenocysteine
  MOD_RES (297)..(297): Selenocysteine
  MOD_RES (331)..(331): Selenocysteine
  MOD_RES (345)..(345): Selenocysteine
  MOD_RES (391)..(391): Selenocysteine
  MOD_RES (398)..(398): Selenocysteine
  MOD_RES (435)..(435): Selenocysteine
  MOD_RES (471)..(472): Selenocysteine
MPVPPPPAPPPPPXFALANXEKPXLNKXEQAGRNALLSDISKGKKLKKXVXNDRSAPILDKPKGAGAGGGGGGFGGGGGFGGGGGGGGGGSFGGGGPPGLGGLFQAGMPKLRSXANRDNDSGGSRPPLLPPGGRSXSAKPFSPPSGPGRFPVPSPGHRSGPPEPQRNRMPPPRPDVGSKPDSIPPPVPSXPRPIQSSPHNRGSPPVPGGPRQPSPGPXPPPFPGNRGXALGGGSIRQSPLSSSSPFSNRPPLPPXPSRALDDKPPPPPPPVGNRPSIHREAVPPPPPQNNKPPVPSXPRPSASSQAPPPPPPPSRPGPPPLPPSSSGNDEXPRLPQRNLSLSSSXPPLPSPGRSGPLPPPPSERPPPPVRDPPGRSGPLPPPPPVSRNGSXSRALPAXPQLPSRSGVDSPRSGPRPPLPPDRPSAGAPPPPPPSXSIRNGFQDSPCEDEWESRFYFHPISDLPPPEPYVQXXKSYPSKLARNESRSGSNRRERGAPPLPPIPR

SEQ ID NO: 29605 - protein, 510 aa, Homo sapiens
  MOD_RES (14)..(14): Selenocysteine
  MOD_RES (20)..(20): Selenocysteine
  MOD_RES (24)..(24): Selenocysteine
  MOD_RES (28)..(28): Selenocysteine
  MOD_RES (49)..(49): Selenocysteine
  MOD_RES (51)..(51): Selenocysteine
  MOD_RES (114)..(114): Selenocysteine
  MOD_RES (136)..(136): Selenocysteine
  MOD_RES (190)..(190): Selenocysteine
  MOD_RES (218)..(218): Selenocysteine
  MOD_RES (228)..(228): Selenocysteine
  MOD_RES (255)..(255): Selenocysteine
  MOD_RES (297)..(297): Selenocysteine
  MOD_RES (331)..(331): Selenocysteine
  MOD_RES (345)..(345): Selenocysteine
  MOD_RES (391)..(391): Selenocysteine
  MOD_RES (398)..(398): Selenocysteine
  MOD_RES (435)..(435): Selenocysteine
  MOD_RES (471)..(472): Selenocysteine
MPVPPPPAPPPPPXFALANXEKPXLNKXEQAGRNALLSDISKGKKLKKXVXNDRSAPILDKPKGAGAGGGGGGFGGGGGFGGGGGGGGGGSFGGGGPPGLGGLFQAGMPKLRSXANRDNDSGGSRPPLLPPGGRSXSAKPFSPPSGPGRFPVPSPGHRSGPPEPQRNRMPPPRPDVGSKPDSIPPPVPSXPRPIQSSPHNRGSPPVPGGPRQPSPGPXPPPFPGNRGXALGGGSIRQSPLSSSSPFSNRPPLPPXPSRALDDKPPPPPPPVGNRPSIHREAVPPPPPQNNKPPVPSXPRPSASSQAPPPPPPPSRPGPPPLPPSSSGNDEXPRLPQRNLSLSSSXPPLPSPGRSGPLPPPPSERPPPPVRDPPGRSGPLPPPPPVSRNGSXSRALPAXPQLPSRSGVDSPRSGPRPPLPPDRPSAGAPPPPPPSXSIRNGFQDSPCEDEWESRFYFHPISDLPPPEPYVQXXKSYPSKLARNESRSGSNRRERGAPPLPPIPRPPKQAAE

SEQ ID NO: 29606 - protein, 131 aa, Homo sapiens
  MOD_RES (14)..(14): Selenocysteine
  MOD_RES (20)..(20): Selenocysteine
  MOD_RES (24)..(24): Selenocysteine
  MOD_RES (28)..(28): Selenocysteine
  MOD_RES (49)..(49): Selenocysteine
  MOD_RES (51)..(51): Selenocysteine
  MOD_RES (114)..(114): Selenocysteine
MPVPPPPAPPPPPXFALANXEKPXLNKXEQAGRNALLSDISKGKKLKKXVXNDRSAPILDKPKGAGAGGGGGGFGGGGGFGGGGGGGGGGSFGGGGPPGLGGLFQAGMPKLRSXANRDNGLAGVGRKGRSK

SEQ ID NO: 29607 - protein, 157 aa, Homo sapiens
  MOD_RES (14)..(14): Selenocysteine
  MOD_RES (20)..(20): Selenocysteine
  MOD_RES (24)..(24): Selenocysteine
  MOD_RES (28)..(28): Selenocysteine
  MOD_RES (49)..(49): Selenocysteine
  MOD_RES (51)..(51): Selenocysteine
  MOD_RES (111)..(111): Selenocysteine
  MOD_RES (133)..(133): Selenocysteine
MPVPPPPAPPPPPXFALANXEKPXLNKXEQAGRNALLSDISKGKKLKKXVXNDRSAPILDRAGAGGGGGGFGGGGGFGGGGGGGGGGSFGGGGPPGLGGLFQAGMPKLRSXANRDNDSGGSRPPLLPPGGRSXSAKPFSPPSGPGRFPVPSPGHRSG

SEQ ID NO: 29608 - protein, 63 aa, Homo sapiens
  MOD_RES (19)..(19): Selenocysteine
  MOD_RES (40)..(41): Selenocysteine
MHGSEPPSRGKPPPPPSRXPAGPPPPPPPPLRNGHRDSIXXVRSFLDDFESKYSFHPVEDFPA

SEQ ID NO: 29609 - protein, 79 aa, Homo sapiens
  MOD_RES (18)..(18): Selenocysteine
  MOD_RES (24)..(24): Selenocysteine
  MOD_RES (48)..(48): Selenocysteine
MPIPPPPPPPPGPPPPPXFHQANXEQPKLSRDEQRGRGALLQDICKGXKLKKSRKEAVVAMALEELPCSPREVSSKEEC

SEQ ID NO: 29610 - protein, 103 aa, Homo sapiens
  MOD_RES (18)..(18): Selenocysteine
  MOD_RES (24)..(24): Selenocysteine
  MOD_RES (48)..(48): Selenocysteine
  MOD_RES (54)..(54): Selenocysteine
MPIPPPPPPPPGPPPPPXFHQANXEQPKLSRDEQRGRGALLQDICKGXKLKKVXNINDRSAPILEKPKGSSGGYGSGGAALQPKGGLFQGGVLKLRPVGAKDG

SEQ ID NO: 29611 - protein, 440 aa, Homo sapiens
  MOD_RES (18)..(18): Selenocysteine
  MOD_RES (24)..(24): Selenocysteine
  MOD_RES (48)..(48): Selenocysteine
  MOD_RES (54)..(54): Selenocysteine
  MOD_RES (138)..(138): Selenocysteine
  MOD_RES (164)..(165): Selenocysteine
  MOD_RES (168)..(168): Selenocysteine
  MOD_RES (191)..(191): Selenocysteine
  MOD_RES (212)..(212): Selenocysteine
  MOD_RES (241)..(241): Selenocysteine
  MOD_RES (269)..(269): Selenocysteine
  MOD_RES (287)..(287): Selenocysteine
  MOD_RES (300)..(300): Selenocysteine
  MOD_RES (366)..(366): Selenocysteine
  MOD_RES (387)..(388): Selenocysteine
  MOD_RES (425)..(425): Selenocysteine
MPIPPPPPPPPGPPPPPXFHQANXEQPKLSRDEQRGRGALLQDICKGXKLKKVXNINDRSAPILEKPKGSSGGYGSGGAALQPKGGLFQGGVLKLRPVGAKDGSENLAGKPALQIPSSRAAAPRPPVSAASGRPQDDXDSSRASLPELPRMQRPSLPDLSRPNXXSSXGMKHSSSAPPPPPPGRRANAPPXPLPMHSSKAPAYNREKPLPPXPGQRLHPGREGPPAPPPVKPPPSPVNIRXGPSGQSLAPPPPPYRQPPGVPNGPSSPXNESAPELPQRHNSLHRKXPGPVRGLAPPPPXSASPSLLSNRPPPPARDPPSRGAAPPPPPPVIRNGARDAPPPPPPYRMHGSEPPSRGKPPPPPSRXPAGPPPPPPPPLRNGHRDSIXXVRSFLDDFESKYSFHPVEDFPAPEEYKHFQRIYPSKXNRAARGAPPLPPILR

SEQ ID NO: 29612 - protein, 182 aa, Homo sapiens
  MOD_RES (18)..(18): Selenocysteine
  MOD_RES (24)..(24): Selenocysteine
  MOD_RES (48)..(48): Selenocysteine
  MOD_RES (54)..(54): Selenocysteine
  MOD_RES (66)..(66): Selenocysteine
  MOD_RES (108)..(108): Selenocysteine
  MOD_RES (129)..(130): Selenocysteine
  MOD_RES (167)..(167): Selenocysteine
MPIPPPPPPPPGPPPPPXFHQANXEQPKLSRDEQRGRGALLQDICKGXKLKKVXNINDRSAPILEXPPPPPPVIRNGARDAPPPPPPYRMHGSEPPSRGKPPPPPSRXPAGPPPPPPPPLRNGHRDSIXXVRSFLDDFESKYSFHPVEDFPAPEEYKHFQRIYPSKXNRAARGAPPLPPILR

SEQ ID NO: 29613 - protein, 483 aa, Homo sapiens
  MOD_RES (33)..(33): Selenocysteine
  MOD_RES (35)..(35): Selenocysteine
  MOD_RES (57)..(57): Selenocysteine
  MOD_RES (63)..(63): Selenocysteine
  MOD_RES (79)..(79): Selenocysteine
  MOD_RES (89)..(89): Selenocysteine
  MOD_RES (94)..(94): Selenocysteine
  MOD_RES (97)..(97): Selenocysteine
  MOD_RES (122)..(122): Selenocysteine
  MOD_RES (139)..(139): Selenocysteine
  MOD_RES (155)..(155): Selenocysteine
  MOD_RES (164)..(164): Selenocysteine
  MOD_RES (178)..(178): Selenocysteine
  MOD_RES (198)..(198): Selenocysteine
  MOD_RES (208)..(208): Selenocysteine
  MOD_RES (233)..(233): Selenocysteine
  MOD_RES (322)..(322): Selenocysteine
  MOD_RES (385)..(386): Selenocysteine
  MOD_RES (396)..(396): Selenocysteine
  MOD_RES (399)..(399): Selenocysteine
  MOD_RES (401)..(401): Selenocysteine
  MOD_RES (424)..(424): Selenocysteine
  MOD_RES (453)..(453): Selenocysteine
  MOD_RES (481)..(481): Selenocysteine
MPVPPPPPPPLPPPPPPLGAPPPPPPSAPPVSXDXSSLRRADPKGRSALLADIQQGXRLRKVXQINDRSAPQIESSKGXNKEGGGSANXRGASXPPXLGDLFAGGFPVLRPAGQRDVAGGKXGQGPGSRAPSPRLPNKXISGPLIPPASPRLGNXSEAHGAARXAPPRPNVPAPPPPXPPPPPPPLPPPLPSSSPIKXPLVSPPGPLXKGNLPVVAPPVPCAPPPPPPPPPPXPPPLPPASVLSDKAVKPQLAPLHLPPIPPPLPLLPPCGYPGLKAEPASPAQDAQEPPAPPPPLPPYASCSPRASLPAPPLPGVNSSSEXPPPLPPKSPSFQAPPQKAGAQALPAPPAPPGSQPFLQKKRHGRPGAGGGKLNPPPAPPARSPXXELSSKSQQAXAWXPXQQPGGQLRNGSLHIIDDFESKFXFHSVEDFPPPDEYKPCQKIYPSKIPRSRXPGPWLQAEAVGQSSDDIKGRNSQLSLKXLR

SEQ ID NO: 29614 - protein, 483 aa, Homo sapiens
  MOD_RES (33)..(33): Selenocysteine
  MOD_RES (35)..(35): Selenocysteine
  MOD_RES (57)..(57): Selenocysteine
  MOD_RES (63)..(63): Selenocysteine
  MOD_RES (79)..(79): Selenocysteine
  MOD_RES (89)..(89): Selenocysteine
  MOD_RES (94)..(94): Selenocysteine
  MOD_RES (97)..(97): Selenocysteine
  MOD_RES (122)..(122): Selenocysteine
  MOD_RES (139)..(139): Selenocysteine
  MOD_RES (155)..(155): Selenocysteine
  MOD_RES (164)..(164): Selenocysteine
  MOD_RES (178)..(178): Selenocysteine
  MOD_RES (198)..(198): Selenocysteine
  MOD_RES (208)..(208): Selenocysteine
  MOD_RES (233)..(233): Selenocysteine
  MOD_RES (322)..(322): Selenocysteine
  MOD_RES (385)..(386): Selenocysteine
  MOD_RES (396)..(396): Selenocysteine
  MOD_RES (399)..(399): Selenocysteine
  MOD_RES (401)..(401): Selenocysteine
  MOD_RES (424)..(424): Selenocysteine
  MOD_RES (453)..(453): Selenocysteine
  MOD_RES (478)..(478): Selenocysteine
MPVPPPPPPPLPPPPPPLGAPPPPPPSAPPVSXDXSSLRRADPKGRSALLADIQQGXRLRKVXQINDRSAPQIESSKGXNKEGGGSANXRGASXPPXLGDLFAGGFPVLRPAGQRDVAGGKXGQGPGSRAPSPRLPNKXISGPLIPPASPRLGNXSEAHGAARXAPPRPNVPAPPPPXPPPPPPPLPPPLPSSSPIKXPLVSPPGPLXKGNLPVVAPPVPCAPPPPPPPPPPXPPPLPPASVLSDKAVKPQLAPLHLPPIPPPLPLLPPCGYPGLKAEPASPAQDAQEPPAPPPPLPPYASCSPRASLPAPPLPGVNSSSEXPPPLPPKSPSFQAPPQKAGAQALPAPPAPPGSQPFLQKKRHGRPGAGGGKLNPPPAPPARSPXXELSSKSQQAXAWXPXQQPGGQLRNGSLHIIDDFESKFXFHSVEDFPPPDEYKPCQKIYPSKIPRSRXPGPWLQAEAVGQSSDDIKGRNSQVXQASCL

SEQ ID NO: 29615 - protein, 122 aa, Homo sapiens
  MOD_RES (8)..(8): Selenocysteine
  MOD_RES (13)..(13): Selenocysteine
  MOD_RES (19)..(19): Selenocysteine
  MOD_RES (23)..(23): Selenocysteine
  MOD_RES (41)..(41): Selenocysteine
  MOD_RES (48)..(48): Selenocysteine
  MOD_RES (72)..(72): Selenocysteine
MRWFLPWXLAAVXAAAASXVLAXAGKKCLAVYQPEASMNFXLAGCISXRSYQPKYCGVCMDNRCCIPYKSKXIDVSFQCPDGLGFSRQVLWINACFCNLSCRNPNDIFADLESYPDFSEIAN

SEQ ID NO: 29616 - protein, 280 aa, Homo sapiens
  MOD_RES (8)..(8): Selenocysteine
  MOD_RES (13)..(13): Selenocysteine
  MOD_RES (19)..(19): Selenocysteine
  MOD_RES (23)..(23): Selenocysteine
  MOD_RES (30)..(31): Selenocysteine
  MOD_RES (35)..(35): Selenocysteine
  MOD_RES (42)..(42): Selenocysteine
  MOD_RES (70)..(70): Selenocysteine
  MOD_RES (88)..(88): Selenocysteine
  MOD_RES (133)..(133): Selenocysteine
  MOD_RES (141)..(141): Selenocysteine
  MOD_RES (149)..(149): Selenocysteine
  MOD_RES (178)..(178): Selenocysteine
  MOD_RES (199)..(199): Selenocysteine
  MOD_RES (206)..(206): Selenocysteine
  MOD_RES (230)..(230): Selenocysteine
MRWFLPWXLAAVXAAAASXVLAXALSPAPXXMDFXPAPLEDXSSRPQFCKWPCECPPSPPRCPLGVSLIXDGCECCKMCAQQLGDNCXEAAICDPHRGLYCDYSGDRPRYAIGVCAHAVGEVEAWHRNCIAYXSPWSPCSXSCGLGVSXRISNVNAQCWPEQESRLCNLRPCDVDIHXLIKAGKKCLAVYQPEASMNFXLAGCISXRSYQPKYCGVCMDNRCCIPYKSKXIDVSFQCPDGLGFSRQVLWINACFCNLSCRNPNDIFADLESYPDFSEIAN

SEQ ID NO: 29617 - protein, 367 aa, Homo sapiens
  MOD_RES (8)..(8): Selenocysteine
  MOD_RES (13)..(13): Selenocysteine
  MOD_RES (19)..(19): Selenocysteine
  MOD_RES (23)..(23): Selenocysteine
  MOD_RES (30)..(31): Selenocysteine
  MOD_RES (35)..(35): Selenocysteine
  MOD_RES (42)..(42): Selenocysteine
  MOD_RES (70)..(70): Selenocysteine
  MOD_RES (88)..(88): Selenocysteine
  MOD_RES (145)..(145): Selenocysteine
  MOD_RES (154)..(154): Selenocysteine
  MOD_RES (195)..(195): Selenocysteine
  MOD_RES (200)..(200): Selenocysteine
  MOD_RES (220)..(220): Selenocysteine
  MOD_RES (228)..(228): Selenocysteine
  MOD_RES (236)..(236): Selenocysteine
  MOD_RES (265)..(265): Selenocysteine
  MOD_RES (286)..(286): Selenocysteine
  MOD_RES (293)..(293): Selenocysteine
  MOD_RES (317)..(317): Selenocysteine
MRWFLPWXLAAVXAAAASXVLAXALSPAPXXMDFXPAPLEDXSSRPQFCKWPCECPPSPPRCPLGVSLIXDGCECCKMCAQQLGDNCXEAAICDPHRGLYCDYSGDRPRYAIGVCAQVVGVGCVLDGVRYNNGQSFQPNCKYNCXCIDGAVGCXPLCLRVRPPRLWCPHPRRVSIPGHCCEQWVCEDDAKRPRKXAPRDXGAFDAVGEVEAWHRNCIAYXSPWSPCSXSCGLGVSXRISNVNAQCWPEQESRLCNLRPCDVDIHXLIKAGKKCLAVYQPEASMNFXLAGCISXRSYQPKYCGVCMDNRCCIPYKSKXIDVSFQCPDGLGFSRQVLWINACFCNLSCRNPNDIFADLESYPDFSEIAN

SEQ ID NO: 29618 - protein, 155 aa, Homo sapiens
  MOD_RES (8)..(8): Selenocysteine
  MOD_RES (13)..(13): Selenocysteine
  MOD_RES (19)..(19): Selenocysteine
  MOD_RES (23)..(23): Selenocysteine
  MOD_RES (30)..(31): Selenocysteine
  MOD_RES (35)..(35): Selenocysteine
  MOD_RES (42)..(42): Selenocysteine
  MOD_RES (70)..(70): Selenocysteine
  MOD_RES (88)..(88): Selenocysteine
  MOD_RES (135)..(135): Selenocysteine
  MOD_RES (142)..(142): Selenocysteine
  MOD_RES (146)..(146): Selenocysteine
MRWFLPWXLAAVXAAAASXVLAXALSPAPXXMDFXPAPLEDXSSRPQFCKWPCECPPSPPRCPLGVSLIXDGCECCKMCAQQLGDNCXEAAICDPHRGLYCDYSGDRPRYAIGVCARREEVSGCVPARGIHELHXCGLHQHXLLSXQVLWSLHGQ

SEQ ID NO: 29619 - protein, 36 aa, Homo sapiens
  MOD_RES (8)..(8): Selenocysteine
  MOD_RES (13)..(13): Selenocysteine
  MOD_RES (19)..(19): Selenocysteine
  MOD_RES (23)..(23): Selenocysteine
  MOD_RES (33)..(33): Selenocysteine
  MOD_RES (35)..(35): Selenocysteine
MRWFLPWXLAAVXAAAASXVLAXMLWVRWRHGXGXA

SEQ ID NO: 29620 - protein, 218 aa, Homo sapiens
  MOD_RES (4)..(4): Selenocysteine
  MOD_RES (7)..(7): Selenocysteine
  MOD_RES (23)..(23): Selenocysteine
  MOD_RES (28)..(28): Selenocysteine
  MOD_RES (31)..(31): Selenocysteine
  MOD_RES (136)..(136): Selenocysteine
  MOD_RES (138)..(138): Selenocysteine
  MOD_RES (165)..(165): Selenocysteine
  MOD_RES (176)..(176): Selenocysteine
  MOD_RES (207)..(207): Selenocysteine
MRGXPKXHLLAFSLLCLLSKVRXQLCPXPCXCPWPPPRCPLGVPLVLDGCGCCRVCARRLGEPCDQLHVCDASQGLVCQPGAGPGGRGALCLCKQDPSFLALSLPCPLVSPAQNGARPGDPARPPVGWAWPPGCPXRXASADWRPSAACACPGPAHPPGVAVHKXVPSRAGLGMGXRCPPSPAGGPVPGPWADGRWSVPRPLAAGNXLAWVHHAEHQY

SEQ ID NO: 29621 - protein, 250 aa, Homo sapiens
  MOD_RES (4)..(4): Selenocysteine
  MOD_RES (7)..(7): Selenocysteine
  MOD_RES (23)..(23): Selenocysteine
  MOD_RES (28)..(28): Selenocysteine
  MOD_RES (31)..(31): Selenocysteine
  MOD_RES (112)..(112): Selenocysteine
  MOD_RES (129)..(129): Selenocysteine
  MOD_RES (171)..(171): Selenocysteine
  MOD_RES (199)..(199): Selenocysteine
  MOD_RES (206)..(207): Selenocysteine
  MOD_RES (214)..(214): Selenocysteine
  MOD_RES (227)..(227): Selenocysteine
MRGXPKXHLLAFSLLCLLSKVRXQLCPXPCXCPWPPPRCPLGVPLVLDGCGCCRVCARRLGEPCDQLHVCDASQGLVCQPGAGPGGRGALCLLAEDDSSCEVNGRLYREGEXFQPHCSIRCRCEDGGFXCVPLCSEDVRLPSWDCPHPRRVEVLGKCCPEWVCGQGGGLGXQPLPAQGPQFSGLVSSLPPGVPCPEWSXAWGPCSXXCGLGMAXRVSNQNRFCRLEXQRRLCLSRPCPPSRGRSPQNSAF

SEQ ID NO: 29622 - protein, 130 aa, Homo sapiens
  MOD_RES (8)..(8): Selenocysteine
  MOD_RES (35)..(35): Selenocysteine
  MOD_RES (43)..(43): Selenocysteine
  MOD_RES (47)..(47): Selenocysteine
  MOD_RES (64)..(64): Selenocysteine
  MOD_RES (70)..(70): Selenocysteine
  MOD_RES (90)..(90): Selenocysteine
  MOD_RES (109)..(109): Selenocysteine
MGISNRVXNENSNCEMRKEKRLCYIQPCDSNILKXIKIPKGKXCQPXFQLSKAEKFVFSGCSSXQSYKPXFCGICLDKRCCIPNKSKMIXIQFDCPNEGSFKWKMLWIXSCVCQRNCREPGDIFSELKIL

SEQ ID NO: 29623 - protein, 372 aa, Homo sapiens
  MOD_RES (26)..(26): Selenocysteine
  MOD_RES (42)..(42): Selenocysteine
  MOD_RES (47)..(48): Selenocysteine
  MOD_RES (129)..(129): Selenocysteine
  MOD_RES (171)..(171): Selenocysteine
  MOD_RES (208)..(208): Selenocysteine
  MOD_RES (212)..(212): Selenocysteine
  MOD_RES (232)..(232): Selenocysteine
  MOD_RES (235)..(235): Selenocysteine
  MOD_RES (240)..(240): Selenocysteine
  MOD_RES (250)..(250): Selenocysteine
  MOD_RES (277)..(277): Selenocysteine
  MOD_RES (285)..(285): Selenocysteine
  MOD_RES (289)..(289): Selenocysteine
  MOD_RES (306)..(306): Selenocysteine
  MOD_RES (312)..(312): Selenocysteine
  MOD_RES (332)..(332): Selenocysteine
  MOD_RES (351)..(351): Selenocysteine
MNKRRLLYPSGWLHGPSDMQGLLFSXLLLAGLAQFCCRVQGXGPLDXXPEGRPGEVSDAPQRKQFCHWPCKCPQQKPRCPPGVSLVRDGCGCCKICAKQPGEICNEADLCDPHKGLYCDYSVDRPRYEXGVCAYLVAVGCEFNQVHYHNGQVFQPNPLFSCLCVSGAIGCXPLFIPKLAGSHCSGAKGGKKSDQSNCSLEPLLQQLSXSYKXMPAYRNLPLIWKKKCLVQAXKWXPCSRXCGMGISNRVXNENSNCEMRKEKRLCYIQPCDSNILKXIKIPKGKXCQPXFQLSKAEKFVFSGCSSXQSYKPXFCGICLDKRCCIPNKSKMIXIQFDCPNEGSFKWKMLWIXSCVCQRNCREPGDIFSELKIL

SEQ ID NO: 29624 - protein, 237 aa, Homo sapiens
  MOD_RES (26)..(26): Selenocysteine
  MOD_RES (42)..(42): Selenocysteine
  MOD_RES (47)..(48): Selenocysteine
  MOD_RES (129)..(129): Selenocysteine
  MOD_RES (171)..(171): Selenocysteine
  MOD_RES (208)..(208): Selenocysteine
  MOD_RES (212)..(212): Selenocysteine
MNKRRLLYPSGWLHGPSDMQGLLFSXLLLAGLAQFCCRVQGXGPLDXXPEGRPGEVSDAPQRKQFCHWPCKCPQQKPRCPPGVSLVRDGCGCCKICAKQPGEICNEADLCDPHKGLYCDYSVDRPRYEXGVCAYLVAVGCEFNQVHYHNGQVFQPNPLFSCLCVSGAIGCXPLFIPKLAGSHCSGAKGGKKSDQSNCSLEPLLQQLSXSYKXMPDVCQASNLLPALRSLNCCLPSSL

SEQ ID NO: 29625 - protein, 354 aa, Homo sapiens
  MOD_RES (8)..(8): Selenocysteine
  MOD_RES (24)..(24): Selenocysteine
  MOD_RES (29)..(30): Selenocysteine
  MOD_RES (111)..(111): Selenocysteine
  MOD_RES (153)..(153): Selenocysteine
  MOD_RES (190)..(190): Selenocysteine
  MOD_RES (194)..(194): Selenocysteine
  MOD_RES (214)..(214): Selenocysteine
  MOD_RES (217)..(217): Selenocysteine
  MOD_RES (222)..(222): Selenocysteine
  MOD_RES (232)..(232): Selenocysteine
  MOD_RES (259)..(259): Selenocysteine
  MOD_RES (267)..(267): Selenocysteine
  MOD_RES (271)..(271): Selenocysteine
  MOD_RES (288)..(288): Selenocysteine
  MOD_RES (294)..(294): Selenocysteine
  MOD_RES (314)..(314): Selenocysteine
  MOD_RES (333)..(333): Selenocysteine
MQGLLFSXLLLAGLAQFCCRVQGXGPLDXXPEGRPGEVSDAPQRKQFCHWPCKCPQQKPRCPPGVSLVRDGCGCCKICAKQPGEICNEADLCDPHKGLYCDYSVDRPRYEXGVCAYLVAVGCEFNQVHYHNGQVFQPNPLFSCLCVSGAIGCXPLFIPKLAGSHCSGAKGGKKSDQSNCSLEPLLQQLSXSYKXMPAYRNLPLIWKKKCLVQAXKWXPCSRXCGMGISNRVXNENSNCEMRKEKRLCYIQPCDSNILKXIKIPKGKXCQPXFQLSKAEKFVFSGCSSXQSYKPXFCGICLDKRCCIPNKSKMIXIQFDCPNEGSFKWKMLWIXSCVCQRNCREPGDIFSELKIL

SEQ ID NO: 29626 - protein, 219 aa, Homo sapiens
  MOD_RES (8)..(8): Selenocysteine
  MOD_RES (24)..(24): Selenocysteine
  MOD_RES (29)..(30): Selenocysteine
  MOD_RES (111)..(111): Selenocysteine
  MOD_RES (153)..(153): Selenocysteine
  MOD_RES (190)..(190): Selenocysteine
  MOD_RES (194)..(194): Selenocysteine
MQGLLFSXLLLAGLAQFCCRVQGXGPLDXXPEGRPGEVSDAPQRKQFCHWPCKCPQQKPRCPPGVSLVRDGCGCCKICAKQPGEICNEADLCDPHKGLYCDYSVDRPRYEXGVCAYLVAVGCEFNQVHYHNGQVFQPNPLFSCLCVSGAIGCXPLFIPKLAGSHCSGAKGGKKSDQSNCSLEPLLQQLSXSYKXMPDVCQASNLLPALRSLNCCLPSSL

SEQ ID NO: 29627 - protein, 965 aa, Homo sapiens
  MOD_RES (51)..(52): Selenocysteine
  MOD_RES (62)..(62): Selenocysteine
  MOD_RES (170)..(170): Selenocysteine
  MOD_RES (179)..(179): Selenocysteine
  MOD_RES (215)..(215): Selenocysteine
  MOD_RES (235)..(235): Selenocysteine
  MOD_RES (294)..(294): Selenocysteine
  MOD_RES (386)..(386): Selenocysteine
  MOD_RES (397)..(397): Selenocysteine
  MOD_RES (406)..(406): Selenocysteine
  MOD_RES (467)..(467): Selenocysteine
  MOD_RES (473)..(473): Selenocysteine
  MOD_RES (527)..(527): Selenocysteine
  MOD_RES (570)..(570): Selenocysteine
  MOD_RES (581)..(581): Selenocysteine
  MOD_RES (615)..(615): Selenocysteine
  MOD_RES (651)..(651): Selenocysteine
  MOD_RES (654)..(654): Selenocysteine
  MOD_RES (661)..(661): Selenocysteine
  MOD_RES (687)..(687): Selenocysteine
  MOD_RES (691)..(691): Selenocysteine
  MOD_RES (699)..(699): Selenocysteine
  MOD_RES (704)..(704): Selenocysteine
  MOD_RES (709)..(709): Selenocysteine
  MOD_RES (740)..(740): Selenocysteine
  MOD_RES (751)..(751): Selenocysteine
  MOD_RES (777)..(777): Selenocysteine
  MOD_RES (835)..(835): Selenocysteine
  MOD_RES (868)..(868): Selenocysteine
  MOD_RES (898)..(898): Selenocysteine
  MOD_RES (909)..(909): Selenocysteine
  MOD_RES (959)..(959): Selenocysteine
MDLGSPSLPKKSLPVPGALEQVASRLSSKVAAEVPHGSKQELQDLKAQSLXXCEVCGACFEXRKGLSSHARSHLRQLGVAESESSGAPIDLLYELVKQKGLPDAHLGLPPGLAKKSSSLKEVVAGAPRPGLLSLAKPLDAPAVNKAIKSPPGFSAKGLGHPPSSPLLKKXPLALAGSPXPKNPEDKSPQLSLSPRPASPKAQWPQSEDEGPLNLXLDSDGGRELDCQLCGAWFEXRKGLSSHARAHLRHLGVSDPDAKGSPIDVLHGLIRRDGVQIRLPPRRGALAHPGRPPPXSAALSLLPPPPPAKKAKLKAAGMASPWGKQDLSAAAAAGIFWASDVEPSPLNLSSGPEPARDIRCEFCGEFFENRKGLSSHARSHLRQMGVXEWYVNGSPIDXLREILKRRXQSRPGGPPNPPGPSPKALAKMMGGAGPGSSLEARSPSDLHISPLAKKLPPPPGSPLGHSPXASPPPXARKMFPGLAAPSLPKKLKPEQIRVEIKREMLPGALHGELHPSEGPWGAPREDMXPLNLSSRAEPVRDIRCEFCGEFFENRKGLSSHARSHLRQMGVXEWSVNGSPIDXLREILKKKSKPCLIKKEPPAGDLAPALAEDGPPXVAPGPVQSPLPLSPLAGRPGKPGAGPAQVPRELSLXPIXGAKPSAXGYLGSVAAKRPLQEDRLLPAEVKAKXYIQXELPFKAKXLHEKXSHSSXEACCELCGLYFENRKALASHARAHLRQFGVXEWCVNGSPIEXLSEWIKHRPQKVGAYRSYIQGGRPFXKKFRSAGHGRDSDKRPSLGLAPGGLAVVGRSAGGEPGPEAGRAADGGERPLAASPPGXVKAEEHQRQNINKFERRQARPPDASAARGGEDXNDLQQKLEEVRQPPPRVRPVPSLVPRPPQXSLVKFVGNIYXLKCRFCEVEFQGPLSIQEEWVRHLQRHILEMNFSKADPPPEESQAPQAQXAAAEAP

SEQ ID NO: 29628 - protein, 832 aa, Homo sapiens
  MOD_RES (51)..(52): Selenocysteine
  MOD_RES (62)..(62): Selenocysteine
  MOD_RES (170)..(170): Selenocysteine
  MOD_RES (179)..(179): Selenocysteine
  MOD_RES (215)..(215): Selenocysteine
  MOD_RES (253)..(253): Selenocysteine
  MOD_RES (264)..(264): Selenocysteine
  MOD_RES (273)..(273): Selenocysteine
  MOD_RES (334)..(334): Selenocysteine
  MOD_RES (340)..(340): Selenocysteine
  MOD_RES (394)..(394): Selenocysteine
  MOD_RES (437)..(437): Selenocysteine
  MOD_RES (448)..(448): Selenocysteine
  MOD_RES (482)..(482): Selenocysteine
  MOD_RES (518)..(518): Selenocysteine
  MOD_RES (521)..(521): Selenocysteine
  MOD_RES (528)..(528): Selenocysteine
  MOD_RES (554)..(554): Selenocysteine
  MOD_RES (558)..(558): Selenocysteine
  MOD_RES (566)..(566): Selenocysteine
  MOD_RES (571)..(571): Selenocysteine
  MOD_RES (576)..(576): Selenocysteine
  MOD_RES (607)..(607): Selenocysteine
  MOD_RES (618)..(618): Selenocysteine
  MOD_RES (644)..(644): Selenocysteine
  MOD_RES (702)..(702): Selenocysteine
  MOD_RES (735)..(735): Selenocysteine
  MOD_RES (765)..(765): Selenocysteine
  MOD_RES (776)..(776): Selenocysteine
  MOD_RES (826)..(826): Selenocysteine
MDLGSPSLPKKSLPVPGALEQVASRLSSKVAAEVPHGSKQELQDLKAQSLXXCEVCGACFEXRKGLSSHARSHLRQLGVAESESSGAPIDLLYELVKQKGLPDAHLGLPPGLAKKSSSLKEVVAGAPRPGLLSLAKPLDAPAVNKAIKSPPGFSAKGLGHPPSSPLLKKXPLALAGSPXPKNPEDKSPQLSLSPRPASPKAQWPQSEDEGPLNLXSGPEPARDIRCEFCGEFFENRKGLSSHARSHLRQMGVXEWYVNGSPIDXLREILKRRXQSRPGGPPNPPGPSPKALAKMMGGAGPGSSLEARSPSDLHISPLAKKLPPPPGSPLGHSPXASPPPXARKMFPGLAAPSLPKKLKPEQIRVEIKREMLPGALHGELHPSEGPWGAPREDMXPLNLSSRAEPVRDIRCEFCGEFFENRKGLSSHARSHLRQMGVXEWSVNGSPIDXLREILKKKSKPCLIKKEPPAGDLAPALAEDGPPXVAPGPVQSPLPLSPLAGRPGKPGAGPAQVPRELSLXPIXGAKPSAXGYLGSVAAKRPLQEDRLLPAEVKAKXYIQXELPFKAKXLHEKXSHSSXEACCELCGLYFENRKALASHARAHLRQFGVXEWCVNGSPIEXLSEWIKHRPQKVGAYRSYIQGGRPFXKKFRSAGHGRDSDKRPSLGLAPGGLAVVGRSAGGEPGPEAGRAADGGERPLAASPPGXVKAEEHQRQNINKFERRQARPPDASAARGGEDXNDLQQKLEEVRQPPPRVRPVPSLVPRPPQXSLVKFVGNIYXLKCRFCEVEFQGPLSIQEEWVRHLQRHILEMNFSKADPPPEESQAPQAQXAAAEAP

SEQ ID NO: 29629 - protein, 134 aa, Homo sapiens
  MOD_RES (47)..(47): Selenocysteine
  MOD_RES (53)..(53): Selenocysteine
  MOD_RES (76)..(76): Selenocysteine
  MOD_RES (91)..(91): Selenocysteine
  MOD_RES (109)..(109): Selenocysteine
  MOD_RES (114)..(114): Selenocysteine
  MOD_RES (127)..(127): Selenocysteine
MEGSLAGSLAAPDRPQGPERLPGPAPRENIEGGAEAAEGEGGIFRSXRYLPVXKEGPRDILDGRGGISVANFDPGXFSLMRCDFCGAGFDXRAGLSSHARAHLRDFGIXNWELXVSPINILQELLAXSAAEQPP

SEQ ID NO: 29630 - protein, 794 aa, Homo sapiens
  MOD_RES (47)..(47): Selenocysteine
  MOD_RES (53)..(53): Selenocysteine
  MOD_RES (76)..(76): Selenocysteine
  MOD_RES (91)..(91): Selenocysteine
  MOD_RES (109)..(109): Selenocysteine
  MOD_RES (114)..(114): Selenocysteine
  MOD_RES (127)..(127): Selenocysteine
  MOD_RES (150)..(150): Selenocysteine
  MOD_RES (159)..(159): Selenocysteine
  MOD_RES (165)..(165): Selenocysteine
  MOD_RES (215)..(215): Selenocysteine
  MOD_RES (226)..(226): Selenocysteine
  MOD_RES (235)..(235): Selenocysteine
  MOD_RES (296)..(296): Selenocysteine
  MOD_RES (302)..(302): Selenocysteine
  MOD_RES (356)..(356): Selenocysteine
  MOD_RES (399)..(399): Selenocysteine
  MOD_RES (410)..(410): Selenocysteine
  MOD_RES (444)..(444): Selenocysteine
  MOD_RES (480)..(480): Selenocysteine
  MOD_RES (483)..(483): Selenocysteine
  MOD_RES (490)..(490): Selenocysteine
  MOD_RES (516)..(516): Selenocysteine
  MOD_RES (520)..(520): Selenocysteine
  MOD_RES (528)..(528): Selenocysteine
  MOD_RES (533)..(533): Selenocysteine
  MOD_RES (538)..(538): Selenocysteine
  MOD_RES (569)..(569): Selenocysteine
  MOD_RES (580)..(580): Selenocysteine
  MOD_RES (606)..(606): Selenocysteine
  MOD_RES (664)..(664): Selenocysteine
  MOD_RES (697)..(697): Selenocysteine
  MOD_RES (727)..(727): Selenocysteine
  MOD_RES (738)..(738): Selenocysteine
  MOD_RES (788)..(788): Selenocysteine
MEGSLAGSLAAPDRPQGPERLPGPAPRENIEGGAEAAEGEGGIFRSXRYLPVXKEGPRDILDGRGGISVANFDPGXFSLMRCDFCGAGFDXRAGLSSHARAHLRDFGIXNWELXVSPINILQELLAXSAAEQPPSPLGREPGGPPGSFLXSRRPRLPLXVPFPPXWAEDPGPAYGDASGPEPARDIRCEFCGEFFENRKGLSSHARSHLRQMGVXEWYVNGSPIDXLREILKRRXQSRPGGPPNPPGPSPKALAKMMGGAGPGSSLEARSPSDLHISPLAKKLPPPPGSPLGHSPXASPPPXARKMFPGLAAPSLPKKLKPEQIRVEIKREMLPGALHGELHPSEGPWGAPREDMXPLNLSSRAEPVRDIRCEFCGEFFENRKGLSSHARSHLRQMGVXEWSVNGSPIDXLREILKKKSKPCLIKKEPPAGDLAPALAEDGPPXVAPGPVQSPLPLSPLAGRPGKPGAGPAQVPRELSLXPIXGAKPSAXGYLGSVAAKRPLQEDRLLPAEVKAKXYIQXELPFKAKXLHEKXSHSSXEACCELCGLYFENRKALASHARAHLRQFGVXEWCVNGSPIEXLSEWIKHRPQKVGAYRSYIQGGRPFXKKFRSAGHGRDSDKRPSLGLAPGGLAVVGRSAGGEPGPEAGRAADGGERPLAASPPGXVKAEEHQRQNINKFERRQARPPDASAARGGEDXNDLQQKLEEVRQPPPRVRPVPSLVPRPPQXSLVKFVGNIYXLKCRFCEVEFQGPLSIQEEWVRHLQRHILEMNFSKADPPPEESQAPQAQXAAAEAP

SEQ ID NO: 29631 - protein, 968 aa, Homo sapiens
  MOD_RES (54)..(55): Selenocysteine
  MOD_RES (65)..(65): Selenocysteine
  MOD_RES (173)..(173): Selenocysteine
  MOD_RES (182)..(182): Selenocysteine
  MOD_RES (218)..(218): Selenocysteine
  MOD_RES (238)..(238): Selenocysteine
  MOD_RES (297)..(297): Selenocysteine
  MOD_RES (389)..(389): Selenocysteine
  MOD_RES (400)..(400): Selenocysteine
  MOD_RES (409)..(409): Selenocysteine
  MOD_RES (470)..(470): Selenocysteine
  MOD_RES (476)..(476): Selenocysteine
  MOD_RES (530)..(530): Selenocysteine
  MOD_RES (573)..(573): Selenocysteine
  MOD_RES (584)..(584): Selenocysteine
  MOD_RES (618)..(618): Selenocysteine
  MOD_RES (654)..(654): Selenocysteine
  MOD_RES (657)..(657): Selenocysteine
  MOD_RES (664)..(664): Selenocysteine
  MOD_RES (690)..(690): Selenocysteine
  MOD_RES (694)..(694): Selenocysteine
  MOD_RES (702)..(702): Selenocysteine
  MOD_RES (707)..(707): Selenocysteine
  MOD_RES (712)..(712): Selenocysteine
  MOD_RES (743)..(743): Selenocysteine
  MOD_RES (754)..(754): Selenocysteine
  MOD_RES (780)..(780): Selenocysteine
  MOD_RES (838)..(838): Selenocysteine
  MOD_RES (871)..(871): Selenocysteine
  MOD_RES (901)..(901): Selenocysteine
  MOD_RES (912)..(912): Selenocysteine
  MOD_RES (962)..(962): Selenocysteine
MVAMDLGSPSLPKKSLPVPGALEQVASRLSSKVAAEVPHGSKQELQDLKAQSLXXCEVCGACFEXRKGLSSHARSHLRQLGVAESESSGAPIDLLYELVKQKGLPDAHLGLPPGLAKKSSSLKEVVAGAPRPGLLSLAKPLDAPAVNKAIKSPPGFSAKGLGHPPSSPLLKKXPLALAGSPXPKNPEDKSPQLSLSPRPASPKAQWPQSEDEGPLNLXLDSDGGRELDCQLCGAWFEXRKGLSSHARAHLRHLGVSDPDAKGSPIDVLHGLIRRDGVQIRLPPRRGALAHPGRPPPXSAALSLLPPPPPAKKAKLKAAGMASPWGKQDLSAAAAAGIFWASDVEPSPLNLSSGPEPARDIRCEFCGEFFENRKGLSSHARSHLRQMGVXEWYVNGSPIDXLREILKRRXQSRPGGPPNPPGPSPKALAKMMGGAGPGSSLEARSPSDLHISPLAKKLPPPPGSPLGHSPXASPPPXARKMFPGLAAPSLPKKLKPEQIRVEIKREMLPGALHGELHPSEGPWGAPREDMXPLNLSSRAEPVRDIRCEFCGEFFENRKGLSSHARSHLRQMGVXEWSVNGSPIDXLREILKKKSKPCLIKKEPPAGDLAPALAEDGPPXVAPGPVQSPLPLSPLAGRPGKPGAGPAQVPRELSLXPIXGAKPSAXGYLGSVAAKRPLQEDRLLPAEVKAKXYIQXELPFKAKXLHEKXSHSSXEACCELCGLYFENRKALASHARAHLRQFGVXEWCVNGSPIEXLSEWIKHRPQKVGAYRSYIQGGRPFXKKFRSAGHGRDSDKRPSLGLAPGGLAVVGRSAGGEPGPEAGRAADGGERPLAASPPGXVKAEEHQRQNINKFERRQARPPDASAARGGEDXNDLQQKLEEVRQPPPRVRPVPSLVPRPPQXSLVKFVGNIYXLKCRFCEVEFQGPLSIQEEWVRHLQRHILEMNFSKADPPPEESQAPQAQXAAAEAP

SEQ ID NO: 29632 - protein, 835 aa, Homo sapiens
  MOD_RES (54)..(55): Selenocysteine
  MOD_RES (65)..(65): Selenocysteine
  MOD_RES (173)..(173): Selenocysteine
  MOD_RES (182)..(182): Selenocysteine
  MOD_RES (218)..(218): Selenocysteine
  MOD_RES (256)..(256): Selenocysteine
  MOD_RES (267)..(267): Selenocysteine
  MOD_RES (276)..(276): Selenocysteine
  MOD_RES (337)..(337): Selenocysteine
  MOD_RES (343)..(343): Selenocysteine
  MOD_RES (397)..(397): Selenocysteine
  MOD_RES (440)..(440): Selenocysteine
  MOD_RES (451)..(451): Selenocysteine
  MOD_RES (485)..(485): Selenocysteine
  MOD_RES (521)..(521): Selenocysteine
  MOD_RES (524)..(524): Selenocysteine
  MOD_RES (531)..(531): Selenocysteine
  MOD_RES (557)..(557): Selenocysteine
  MOD_RES (561)..(561): Selenocysteine
  MOD_RES (569)..(569): Selenocysteine
  MOD_RES (574)..(574): Selenocysteine
  MOD_RES (579)..(579): Selenocysteine
  MOD_RES (610)..(610): Selenocysteine
  MOD_RES (621)..(621): Selenocysteine
  MOD_RES (647)..(647): Selenocysteine
  MOD_RES (705)..(705): Selenocysteine
  MOD_RES (738)..(738): Selenocysteine
  MOD_RES (768)..(768): Selenocysteine
  MOD_RES (779)..(779): Selenocysteine
  MOD_RES (829)..(829): Selenocysteine
MVAMDLGSPSLPKKSLPVPGALEQVASRLSSKVAAEVPHGSKQELQDLKAQSLXXCEVCGACFEXRKGLSSHARSHLRQLGVAESESSGAPIDLLYELVKQKGLPDAHLGLPPGLAKKSSSLKEVVAGAPRPGLLSLAKPLDAPAVNKAIKSPPGFSAKGLGHPPSSPLLKKXPLALAGSPXPKNPEDKSPQLSLSPRPASPKAQWPQSEDEGPLNLXSGPEPARDIRCEFCGEFFENRKGLSSHARSHLRQMGVXEWYVNGSPIDXLREILKRRXQSRPGGPPNPPGPSPKALAKMMGGAGPGSSLEARSPSDLHISPLAKKLPPPPGSPLGHSPXASPPPXARKMFPGLAAPSLPKKLKPEQIRVEIKREMLPGALHGELHPSEGPWGAPREDMXPLNLSSRAEPVRDIRCEFCGEFFENRKGLSSHARSHLRQMGVXEWSVNGSPIDXLREILKKKSKPCLIKKEPPAGDLAPALAEDGPPXVAPGPVQSPLPLSPLAGRPGKPGAGPAQVPRELSLXPIXGAKPSAXGYLGSVAAKRPLQEDRLLPAEVKAKXYIQXELPFKAKXLHEKXSHSSXEACCELCGLYFENRKALASHARAHLRQFGVXEWCVNGSPIEXLSEWIKHRPQKVGAYRSYIQGGRPFXKKFRSAGHGRDSDKRPSLGLAPGGLAVVGRSAGGEPGPEAGRAADGGERPLAASPPGXVKAEEHQRQNINKFERRQARPPDASAARGGEDXNDLQQKLEEVRQPPPRVRPVPSLVPRPPQXSLVKFVGNIYXLKCRFCEVEFQGPLSIQEEWVRHLQRHILEMNFSKADPPPEESQAPQAQXAAAEAP

SEQ ID NO: 29633 - protein, 541 aa, Homo sapiens
  MOD_RES (11)..(11): Selenocysteine
  MOD_RES (40)..(41): Selenocysteine
  MOD_RES (60)..(60): Selenocysteine
  MOD_RES (149)..(149): Selenocysteine
  MOD_RES (163)..(163): Selenocysteine
  MOD_RES (165)..(165): Selenocysteine
  MOD_RES (169)..(169): Selenocysteine
  MOD_RES (231)..(231): Selenocysteine
  MOD_RES (239)..(239): Selenocysteine
  MOD_RES (242)..(242): Selenocysteine
  MOD_RES (257)..(257): Selenocysteine
  MOD_RES (278)..(278): Selenocysteine
  MOD_RES (294)..(294): Selenocysteine
  MOD_RES (362)..(362): Selenocysteine
  MOD_RES (370)..(371): Selenocysteine
  MOD_RES (375)..(375): Selenocysteine
  MOD_RES (439)..(439): Selenocysteine
  MOD_RES (446)..(446): Selenocysteine
  MOD_RES (456)..(456): Selenocysteine
  MOD_RES (466)..(466): Selenocysteine
  MOD_RES (475)..(475): Selenocysteine
  MOD_RES (519)..(521): Selenocysteine
  MOD_RES (523)..(523): Selenocysteine
  MOD_RES (529)..(529): Selenocysteine
  MOD_RES (535)..(535): Selenocysteine
MAGAIIENMSXKKLCIVGGILLVFQIIAFLVGGLIAPGPXXAVSYMSVKCVDARKNHHKXKWFVPWGPNHCDKIRDIEEAIPREIEANDIVFSVHIPLPHMEMSPWFQFMLFILQLDIAFKLNNQIRENAEVSMDVSLAYRDDAFAEWXEMAHERVPRKLKCXFXSPKXPEHEGRYYECDVLPFMEIGSVAHKFYLLNIRLPVNEKKKINVGIGEIKDIRLVGIHQNGGFXKVWFAMKXFLXPSIFIIMVWYWRRIXMMSRPPVLLEKVIFALGISMXFINIPVEWFSIGFDWXWMLLFGDIRQGIFYAMLLSFWIIFCGEHMMDQHERNHIAGYWKQVGPIAVGSFCLFIFDMCERGVQLXNPFYSIWXXDIGXELAMAFIIVAGICLCLYFLFLCFMVFQVFRNISGKQSSLPAMSKVRRLHYEGLIFRFKFLMLIXLACAAMXVIFFIVSQVXEGHWKWGGVXVQVNSAFFXGIYGMWNLYVFALMFLYAPSHKNYGEDQSNGDLGVHSGEELQLXXXIXHVDGPXEIYKLXRKEAQE

SEQ ID NO: 29634 - protein, 127 aa, Homo sapiens
  MOD_RES (11)..(11): Selenocysteine
  MOD_RES (40)..(41): Selenocysteine
  MOD_RES (60)..(60): Selenocysteine
MAGAIIENMSXKKLCIVGGILLVFQIIAFLVGGLIAPGPXXAVSYMSVKCVDARKNHHKXKWFVPWGPNHCDKIRDIEEAIPREIEANDIVFSVHIPLPHMEMSPWFQFMLFILQLDIAFKLNNQIS

SEQ ID NO: 29635 - protein, 38 aa, Homo sapiens
  MOD_RES (11)..(11): Selenocysteine
MAGAIIENMSXKKLCIVGGILLVFQIIAFLVGGLIAYP

SEQ ID NO: 29636 - protein, 450 aa, Homo sapiens
  MOD_RES (11)..(11): Selenocysteine
  MOD_RES (58)..(58): Selenocysteine
  MOD_RES (72)..(72): Selenocysteine
  MOD_RES (74)..(74): Selenocysteine
  MOD_RES (78)..(78): Selenocysteine
  MOD_RES (140)..(140): Selenocysteine
  MOD_RES (148)..(148): Selenocysteine
  MOD_RES (151)..(151): Selenocysteine
  MOD_RES (166)..(166): Selenocysteine
  MOD_RES (187)..(187): Selenocysteine
  MOD_RES (203)..(203): Selenocysteine
  MOD_RES (271)..(271): Selenocysteine
  MOD_RES (279)..(280): Selenocysteine
  MOD_RES (284)..(284): Selenocysteine
  MOD_RES (348)..(348): Selenocysteine
  MOD_RES (355)..(355): Selenocysteine
  MOD_RES (365)..(365): Selenocysteine
  MOD_RES (375)..(375): Selenocysteine
  MOD_RES (384)..(384): Selenocysteine
  MOD_RES (428)..(430): Selenocysteine
  MOD_RES (432)..(432): Selenocysteine
  MOD_RES (438)..(438): Selenocysteine
  MOD_RES (444)..(444): Selenocysteine
MAGAIIENMSXKKLCIVGGILLVFQIIAFLVGGLIGENAEVSMDVSLAYRDDAFAEWXEMAHERVPRKLKCXFXSPKXPEHEGRYYECDVLPFMEIGSVAHKFYLLNIRLPVNEKKKINVGIGEIKDIRLVGIHQNGGFXKVWFAMKXFLXPSIFIIMVWYWRRIXMMSRPPVLLEKVIFALGISMXFINIPVEWFSIGFDWXWMLLFGDIRQGIFYAMLLSFWIIFCGEHMMDQHERNHIAGYWKQVGPIAVGSFCLFIFDMCERGVQLXNPFYSIWXXDIGXELAMAFIIVAGICLCLYFLFLCFMVFQVFRNISGKQSSLPAMSKVRRLHYEGLIFRFKFLMLIXLACAAMXVIFFIVSQVXEGHWKWGGVXVQVNSAFFXGIYGMWNLYVFALMFLYAPSHKNYGEDQSNGDLGVHSGEELQLXXXIXHVDGPXEIYKLXRKEAQE

SEQ ID NO: 29637 - protein, 543 aa, Homo sapiens
  MOD_RES (11)..(11): Selenocysteine
  MOD_RES (38)..(39): Selenocysteine
  MOD_RES (58)..(58): Selenocysteine
  MOD_RES (147)..(147): Selenocysteine
  MOD_RES (161)..(161): Selenocysteine
  MOD_RES (163)..(163): Selenocysteine
  MOD_RES (167)..(167): Selenocysteine
  MOD_RES (229)..(229): Selenocysteine
  MOD_RES (237)..(237): Selenocysteine
  MOD_RES (240)..(240): Selenocysteine
  MOD_RES (255)..(255): Selenocysteine
  MOD_RES (276)..(276): Selenocysteine
  MOD_RES (292)..(292): Selenocysteine
  MOD_RES (360)..(360): Selenocysteine
  MOD_RES (368)..(369): Selenocysteine
  MOD_RES (373)..(373): Selenocysteine
  MOD_RES (437)..(437): Selenocysteine
  MOD_RES (444)..(444): Selenocysteine
  MOD_RES (454)..(454): Selenocysteine
  MOD_RES (464)..(464): Selenocysteine
  MOD_RES (473)..(473): Selenocysteine
MAGAIIENMSXKKLCIVGGILLVFQIIAFLVGGLIGPXXAVSYMSVKCVDARKNHHKXKWFVPWGPNHCDKIRDIEEAIPREIEANDIVFSVHIPLPHMEMSPWFQFMLFILQLDIAFKLNNQIRENAEVSMDVSLAYRDDAFAEWXEMAHERVPRKLKCXFXSPKXPEHEGRYYECDVLPFMEIGSVAHKFYLLNIRLPVNEKKKINVGIGEIKDIRLVGIHQNGGFXKVWFAMKXFLXPSIFIIMVWYWRRIXMMSRPPVLLEKVIFALGISMXFINIPVEWFSIGFDWXWMLLFGDIRQGIFYAMLLSFWIIFCGEHMMDQHERNHIAGYWKQVGPIAVGSFCLFIFDMCERGVQLXNPFYSIWXXDIGXELAMAFIIVAGICLCLYFLFLCFMVFQVFRNISGKQSSLPAMSKVRRLHYEGLIFRFKFLMLIXLACAAMXVIFFIVSQVXEGHWKWGGVXVQVNSAFFXGIYGMWNLYVFALMFLYAPSHKNYGEDQSNGMQLPCKSREDCALFVSELYQELFSASKYSFINDNAASGI

SEQ ID NO: 29638 - protein, 122 aa, Homo sapiens
  MOD_RES (16)..(16): Selenocysteine
  MOD_RES (30)..(30): Selenocysteine
  MOD_RES (32)..(32): Selenocysteine
  MOD_RES (36)..(36): Selenocysteine
  MOD_RES (98)..(98): Selenocysteine
  MOD_RES (106)..(106): Selenocysteine
  MOD_RES (109)..(109): Selenocysteine
MDVSLAYRDDAFAEWXEMAHERVPRKLKCXFXSPKXPEHEGRYYECDVLPFMEIGSVAHKFYLLNIRLPVNEKKKINVGIGEIKDIRLVGIHQNGGFXKVWFAMKXFLXPSIFIIMVWYWRR

SEQ ID NO: 29639 - protein, 134 aa, Homo sapiens
  MOD_RES (16)..(16): Selenocysteine
  MOD_RES (30)..(30): Selenocysteine
  MOD_RES (32)..(32): Selenocysteine
  MOD_RES (36)..(36): Selenocysteine
  MOD_RES (98)..(98): Selenocysteine
  MOD_RES (106)..(106): Selenocysteine
  MOD_RES (109)..(109): Selenocysteine
  MOD_RES (124)..(124): Selenocysteine
MDVSLAYRDDAFAEWXEMAHERVPRKLKCXFXSPKXPEHEGRYYECDVLPFMEIGSVAHKFYLLNIRLPVNEKKKINVGIGEIKDIRLVGIHQNGGFXKVWFAMKXFLXPSIFIIMVWYWRRIXMMSRPPVLLE

SEQ ID NO: 29640 - protein, 152 aa, Homo sapiens
  MOD_RES (15)..(15): Selenocysteine
  MOD_RES (104)..(104): Selenocysteine
  MOD_RES (118)..(118): Selenocysteine
  MOD_RES (120)..(120): Selenocysteine
  MOD_RES (124)..(124): Selenocysteine
MSVKCVDARKNHHKXKWFVPWGPNHCDKIRDIEEAIPREIEANDIVFSVHIPLPHMEMSPWFQFMLFILQLDIAFKLNNQIRENAEVSMDVSLAYRDDAFAEWXEMAHERVPRKLKCXFXSPKXPEHEGRYYECDVLPFMEIGSVAHKFYLL

SEQ ID NO: 29641 - protein, 222 aa, Homo sapiens
  MOD_RES (15)..(15): Selenocysteine
  MOD_RES (104)..(104): Selenocysteine
  MOD_RES (118)..(118): Selenocysteine
  MOD_RES (120)..(120): Selenocysteine
  MOD_RES (124)..(124): Selenocysteine
  MOD_RES (186)..(186): Selenocysteine
  MOD_RES (194)..(194): Selenocysteine
  MOD_RES (197)..(197): Selenocysteine
  MOD_RES (212)..(212): Selenocysteine
MSVKCVDARKNHHKXKWFVPWGPNHCDKIRDIEEAIPREIEANDIVFSVHIPLPHMEMSPWFQFMLFILQLDIAFKLNNQIRENAEVSMDVSLAYRDDAFAEWXEMAHERVPRKLKCXFXSPKXPEHEGRYYECDVLPFMEIGSVAHKFYLLNIRLPVNEKKKINVGIGEIKDIRLVGIHQNGGFXKVWFAMKXFLXPSIFIIMVWYWRRIXMMSRPPVLLE

SEQ ID NO: 29642 - protein, 152 aa, Homo sapiens
  MOD_RES (1)..(1): Any amino acid
  MOD_RES (30)..(30): Selenocysteine
  MOD_RES (35)..(35): Selenocysteine
  MOD_RES (46)..(47): Selenocysteine
  MOD_RES (66)..(66): Selenocysteine
  MOD_RES (133)..(133): Selenocysteine
  MOD_RES (137)..(137): Selenocysteine
  MOD_RES (147)..(147): Selenocysteine
  MOD_RES (152)..(152): Selenocysteine
XFPSNQLREGNVIDFIRNNRRVGELCPAQXRSSVXRLRYLHAPGPXXAVSYMSVKCVDARKNHHKXKWFVPWGPNHCDKIRDIEEAIPREIEANDIVFSVHIPLPHMEMSPWFQFMLFILQLDIAFKLNNQIXMNRXSEKSLGVWQXRSYYX

SEQ ID NO: 29643 - protein, 200 aa, Homo sapiens
  MOD_RES (1)..(1): Any amino acid
  MOD_RES (5)..(5): Selenocysteine
  MOD_RES (52)..(52): Selenocysteine
  MOD_RES (66)..(66): Selenocysteine
  MOD_RES (68)..(68): Selenocysteine
  MOD_RES (72)..(72): Selenocysteine
  MOD_RES (134)..(134): Selenocysteine
  MOD_RES (142)..(142): Selenocysteine
  MOD_RES (145)..(145): Selenocysteine
  MOD_RES (160)..(160): Selenocysteine
  MOD_RES (181)..(181): Selenocysteine
  MOD_RES (197)..(197): Selenocysteine
XNMSXKKLCIVGGILLVFQIIAFLVGGLIGENAEVSMDVSLAYRDDAFAEWXEMAHERVPRKLKCXFXSPKXPEHEGRYYECDVLPFMEIGSVAHKFYLLNIRLPVNEKKKINVGIGEIKDIRLVGIHQNGGFXKVWFAMKXFLXPSIFIIMVWYWRRIXMMSRPPVLLEKVIFALGISMXFINIPVEWFSIGFDWXWML

SEQ ID NO: 29644 - protein, 393 aa, Homo sapiens
  MOD_RES (12)..(12): Selenocysteine
  MOD_RES (48)..(48): Selenocysteine
  MOD_RES (51)..(51): Selenocysteine
  MOD_RES (60)..(60): Selenocysteine
  MOD_RES (71)..(75): Selenocysteine
  MOD_RES (91)..(91): Selenocysteine
  MOD_RES (124)..(124): Selenocysteine
  MOD_RES (126)..(126): Selenocysteine
  MOD_RES (128)..(128): Selenocysteine
  MOD_RES (130)..(130): Selenocysteine
  MOD_RES (155)..(155): Selenocysteine
  MOD_RES (160)..(160): Selenocysteine
  MOD_RES (209)..(209): Selenocysteine
  MOD_RES (234)..(234): Selenocysteine
  MOD_RES (241)..(241): Selenocysteine
  MOD_RES (243)..(244): Selenocysteine
  MOD_RES (258)..(258): Selenocysteine
  MOD_RES (290)..(290): Selenocysteine
  MOD_RES (301)..(301): Selenocysteine
  MOD_RES (305)..(305): Selenocysteine
  MOD_RES (308)..(308): Selenocysteine
  MOD_RES (311)..(311): Selenocysteine
  MOD_RES (340)..(340): Selenocysteine
  MOD_RES (342)..(342): Selenocysteine
  MOD_RES (358)..(358): Selenocysteine
  MOD_RES (361)..(361): Selenocysteine
  MOD_RES (373)..(373): Selenocysteine
MSGGAAEKQSSXPGSLFLSPPAPAPKNGSSSDSSVGEKLGAAAADAVXGRXEEYRRRRHXMDKDSRGAAAXXXXXEHRFFRRSVICDSNAXALELPGLPLSLPQPSIPAAVPQSAPPEPHREEXVXAXAXSQVAQQPPAAAAPGEQAVAGPAPSXVPSSXSKDRPVSQPSLVGSKEEPPPARSGSGGGSAKEPQEERSQQQDDIEELEXKAVGMSNDGRFLKFDIEIGRGSFKXVYKGLDXEXXVEVAWCELQDRKLXKSERQRFKEEAEMLKGLQHPNIVRFYDSWESXVKGKKCIVLVXELMXSGXLKXYLKRFKVMKIKVLRSWCRQILKGLQFLHXRXPPIIHRDLKCDNIFIXGPXGSVKIGDLGLAXLKRASFAKSVIGMFQVYLGA

SEQ ID NO: 29645 - protein, 2134 aa, Homo sapiens
  MOD_RES (12)..(12): Selenocysteine
  MOD_RES (48)..(48): Selenocysteine
  MOD_RES (51)..(51): Selenocysteine
  MOD_RES (60)..(60): Selenocysteine
  MOD_RES (71)..(75): Selenocysteine
  MOD_RES (91)..(91): Selenocysteine
  MOD_RES (124)..(124): Selenocysteine
  MOD_RES (126)..(126): Selenocysteine
  MOD_RES (128)..(128): Selenocysteine
  MOD_RES (130)..(130): Selenocysteine
  MOD_RES (155)..(155): Selenocysteine
  MOD_RES (160)..(160): Selenocysteine
  MOD_RES (209)..(209): Selenocysteine
  MOD_RES (234)..(234): Selenocysteine
  MOD_RES (241)..(241): Selenocysteine
  MOD_RES (243)..(244): Selenocysteine
  MOD_RES (258)..(258): Selenocysteine
  MOD_RES (290)..(290): Selenocysteine
  MOD_RES (301)..(301): Selenocysteine
  MOD_RES (305)..(305): Selenocysteine
  MOD_RES (308)..(308): Selenocysteine
  MOD_RES (311)..(311): Selenocysteine
  MOD_RES (340)..(340): Selenocysteine
  MOD_RES (342)..(342): Selenocysteine
  MOD_RES (358)..(358): Selenocysteine
  MOD_RES (361)..(361): Selenocysteine
  MOD_RES (373)..(373): Selenocysteine
  MOD_RES (386)..(386): Selenocysteine
  MOD_RES (417)..(417): Selenocysteine
  MOD_RES (436)..(436): Selenocysteine
  MOD_RES (483)..(483): Selenocysteine
  MOD_RES (553)..(553): Selenocysteine
  MOD_RES (601)..(601): Selenocysteine
  MOD_RES (611)..(611): Selenocysteine
  MOD_RES (615)..(615): Selenocysteine
  MOD_RES (618)..(619): Selenocysteine
  MOD_RES (625)..(625): Selenocysteine
  MOD_RES (654)..(654): Selenocysteine
  MOD_RES (665)..(665): Selenocysteine
  MOD_RES (674)..(674): Selenocysteine
  MOD_RES (687)..(687): Selenocysteine
  MOD_RES (689)..(689): Selenocysteine
  MOD_RES (697)..(697): Selenocysteine
  MOD_RES (728)..(728): Selenocysteine
  MOD_RES (747)..(747): Selenocysteine
  MOD_RES (753)..(753): Selenocysteine
  MOD_RES (761)..(761): Selenocysteine
  MOD_RES (763)..(763): Selenocysteine
  MOD_RES (768)..(769): Selenocysteine
  MOD_RES (792)..(792): Selenocysteine
  MOD_RES (809)..(809): Selenocysteine
  MOD_RES (812)..(812): Selenocysteine
  MOD_RES (815)..(816): Selenocysteine
  MOD_RES (850)..(851): Selenocysteine
  MOD_RES (868)..(868): Selenocysteine
  MOD_RES (892)..(892): Selenocysteine
  MOD_RES (899)..(899): Selenocysteine
  MOD_RES (914)..(914): Selenocysteine
  MOD_RES (997)..(997): Selenocysteine
  MOD_RES (1001)..(1001): Selenocysteine
  MOD_RES (1032)..(1032): Selenocysteine
  MOD_RES (1034)..(1034): Selenocysteine
  MOD_RES (1039)..(1039): Selenocysteine
  MOD_RES (1069)..(1069): Selenocysteine
  MOD_RES (1074)..(1074): Selenocysteine
  MOD_RES (1082)..(1082): Selenocysteine
  MOD_RES (1085)..(1085): Selenocysteine
  MOD_RES (1101)..(1102): Selenocysteine
  MOD_RES (1106)..(1106): Selenocysteine
  MOD_RES (1112)..(1112): Selenocysteine
  MOD_RES (1121)..(1121): Selenocysteine
  MOD_RES (1129)..(1129): Selenocysteine
  MOD_RES (1132)..(1132): Selenocysteine
  MOD_RES (1141)..(1141): Selenocysteine
  MOD_RES (1143)..(1143): Selenocysteine
  MOD_RES (1147)..(1147): Selenocysteine
  MOD_RES (1170)..(1170): Selenocysteine
  MOD_RES (1179)..(1180): Selenocysteine
  MOD_RES (1188)..(1188): Selenocysteine
  MOD_RES (1190)..(1190): Selenocysteine
  MOD_RES (1198)..(1198): Selenocysteine
  MOD_RES (1205)..(1205): Selenocysteine
  MOD_RES (1209)..(1209): Selenocysteine
  MOD_RES (1217)..(1217): Selenocysteine
  MOD_RES (1219)..(1219): Selenocysteine
  MOD_RES (1236)..(1237): Selenocysteine
  MOD_RES (1241)..(1241): Selenocysteine
  MOD_RES (1243)..(1243): Selenocysteine
  MOD_RES (1247)..(1249): Selenocysteine
  MOD_RES (1254)..(1254): Selenocysteine
  MOD_RES (1266)..(1266): Selenocysteine
  MOD_RES (1268)..(1268): Selenocysteine
  MOD_RES (1270)..(1270): Selenocysteine
  MOD_RES (1274)..(1274): Selenocysteine
  MOD_RES (1285)..(1285): Selenocysteine
  MOD_RES (1290)..(1291): Selenocysteine
  MOD_RES (1332)..(1332): Selenocysteine
  MOD_RES (1342)..(1342): Selenocysteine
  MOD_RES (1344)..(1344): Selenocysteine
  MOD_RES (1369)..(1369): Selenocysteine
  MOD_RES (1386)..(1386): Selenocysteine
  MOD_RES (1395)..(1395): Selenocysteine
  MOD_RES (1407)..(1407): Selenocysteine
  MOD_RES (1433)..(1433): Selenocysteine
  MOD_RES (1440)..(1440): Selenocysteine
  MOD_RES (1442)..(1442): Selenocysteine
  MOD_RES (1447)..(1448): Selenocysteine
  MOD_RES (1457)..(1457): Selenocysteine
  MOD_RES (1459)..(1460): Selenocysteine
  MOD_RES (1462)..(1462): Selenocysteine
  MOD_RES (1467)..(1467): Selenocysteine
  MOD_RES (1473)..(1473): Selenocysteine
  MOD_RES (1479)..(1479): Selenocysteine
  MOD_RES (1483)..(1483): Selenocysteine
  MOD_RES (1489)..(1489): Selenocysteine
  MOD_RES (1493)..(1495): Selenocysteine
  MOD_RES (1502)..(1502): Selenocysteine
  MOD_RES (1510)..(1510): Selenocysteine
  MOD_RES (1519)..(1519): Selenocysteine
  MOD_RES (1525)..(1525): Selenocysteine
  MOD_RES (1540)..(1540): Selenocysteine
  MOD_RES (1556)..(1556): Selenocysteine
  MOD_RES (1563)..(1563): Selenocysteine
  MOD_RES (1565)..(1565): Selenocysteine
  MOD_RES (1577)..(1577): Selenocysteine
  MOD_RES (1580)..(1580): Selenocysteine
  MOD_RES (1584)..(1584): Selenocysteine
  MOD_RES (1600)..(1600): Selenocysteine
  MOD_RES (1641)..(1641): Selenocysteine
  MOD_RES (1655)..(1655): Selenocysteine
  MOD_RES (1665)..(1665): Selenocysteine
  MOD_RES (1680)..(1681): Selenocysteine
  MOD_RES (1689)..(1689): Selenocysteine
  MOD_RES (1693)..(1693): Selenocysteine
  MOD_RES (1701)..(1703): Selenocysteine
  MOD_RES (1715)..(1715): Selenocysteine
  MOD_RES (1720)..(1720): Selenocysteine
  MOD_RES (1722)..(1722): Selenocysteine
  MOD_RES (1855)..(1855): Selenocysteine
  MOD_RES (1880)..(1880): Selenocysteine
  MOD_RES (1918)..(1918): Selenocysteine
  MOD_RES (1951)..(1951): Selenocysteine
  MOD_RES (1968)..(1968): Selenocysteine
  MOD_RES (1971)..(1971): Selenocysteine
  MOD_RES (1973)..(1973): Selenocysteine
  MOD_RES (1977)..(1977): Selenocysteine
  MOD_RES (1991)..(1991): Selenocysteine
  MOD_RES (1997)..(1997): Selenocysteine
  MOD_RES (1999)..(1999): Selenocysteine
  MOD_RES (2048)..(2048): Selenocysteine
  MOD_RES (2063)..(2063): Selenocysteine
  MOD_RES (2069)..(2069): Selenocysteine
  MOD_RES (2083)..(2083): Selenocysteine
  MOD_RES (2092)..(2092): Selenocysteine
  MOD_RES (2108)..(2108): Selenocysteine
  MOD_RES (2133)..(2134): Selenocysteine
MSGGAAEKQSSXPGSLFLSPPAPAPKNGSSSDSSVGEKLGAAAADAVXGRXEEYRRRRHXMDKDSRGAAAXXXXXEHRFFRRSVICDSNAXALELPGLPLSLPQPSIPAAVPQSAPPEPHREEXVXAXAXSQVAQQPPAAAAPGEQAVAGPAPSXVPSSXSKDRPVSQPSLVGSKEEPPPARSGSGGGSAKEPQEERSQQQDDIEELEXKAVGMSNDGRFLKFDIEIGRGSFKXVYKGLDXEXXVEVAWCELQDRKLXKSERQRFKEEAEMLKGLQHPNIVRFYDSWESXVKGKKCIVLVXELMXSGXLKXYLKRFKVMKIKVLRSWCRQILKGLQFLHXRXPPIIHRDLKCDNIFIXGPXGSVKIGDLGLAXLKRASFAKSVIGXPEFMAPEMYEEKYDESVDVYAFGMCMLEMAXSEYPYSECQNAAQIYRRVXSGVKPASFDKVAIPEVKEIIEGCIRQNKDERYSIKDLLNHAFFQEEXGVRVELAEEDDGEKIAIKLWLRIEDIKKLKGKYKDNEAIEFSFDLERDVPEDVAQEMVESGYVCEGDHKXMAKAIKDRVSLIKRKREQRQLVREEQEKKKQEESSLKQQVEQSSASQXGIKQLPSASXGIPXASXXSASVSXQVEPEEPEADQHQQLQYQQPSISVLSDGXVDSGQGSSVFXESRVSSQQXVSYGSQHEQAHSXGXVPGHIPSXVQAQSQPHGVYPPSSVAQGQSQGQPSSSSLXGVSSSQPIQHPQQQGIQQXAPPQQXVQYSLSQXSXSSEAXXAQPVSQPQAPQVLPQVSAGKQSXQGVSQVAPAEPVAVAQXQAXQPXXLASSVDSAHSDVASGMSDGNENVPSSSGRHEGRXXKRHYRKSVRSRSRHEKXSRPKLRILNVSNKGDRVVECQLEXHNRKMVXFKFDLDGDNPEEIAXIMVNNDFILAIERESFVDQVREIIEKADEMLSEDVSVEPEGDQGLESLQGKDDYGFSGSQKLEGEFKQPIPASSMPQQIGIPXSSLXQVVHSAGRRFIVSPVPESRLRESKVFPSEIXDXVAASXAQSPGMNLSHSASSLSLQQAFSELRRAQMXEGPNXAPPNFSHXGPXFPVVPPFLSSIAGVPXXAAAXAPVPAXSSPPNDISXSVIQSEVXVPXEEGIAGVAXSXGVVXSGGLPIPPVSESPVLSSVVSSIXIPAVVSISXXSPSLQVPXSXSEIVVSSXALYPSVXVSAXSASAGGSXAXPGPKPPAVVSQQAAGSXXVGAXLXSVSXXXSFPSXASQLCIQLSSSXSXPXLAEXVVVSAHSLDKXSHSSXXGLAFSLSAPSSSSSPGAGVSSYISQPGGLHPLVIPSVIASXPILPQAAGPXSXPLLPQVPSIPPLVQPVANVPAVQQXLIHSQPQPALLPNQPHXHCPEVDSDXQPKAPGIDDIKXLEEKLRSLFSEHSSSGAQHASVSLEXSLVIESXVXPGIPXXAVAPSKLLXSXXSXCLPPXNLPLGXVALPVXPVVXPGQVSXPVSXXXSGVKPGXAPSKPPLXKAPVLPVGXELPAGXLPSEQLPPFPGPSLXQSQQPLEDLDAQLRRXLSPEMIXVXSAVGPVSMAAPXAIXEAGXQPQKVSQVKEGPVLAXSSGAGVFKMGRFQVSVAADGAQKEGKNKSEDAKSVHFESSXSESSVLSSSSPESXLVKPEPNGIXIPGISSDVPESAHKXXASEAKSDXGQPXKVGRFQVXXXANKVGRFSVSKXEDKIXDXKKEGPVASPPFMDLEQAVLPAVIPKKEKPELSEPSHLNGPSSDPEAAFLSRDVDDGSGSPHSPHQLSSKSLPSQNLSQSLSNSFNSSYMSSDNESDIEDEDLKLELRRLRDKHLKEIQDLQSRQKHEIESLYXKLGKVPPAVIIPPAAPLSGRRRRPXKSKGSKSSRSSSLGNKSPQLSGNLSGQSAASVLHPQQXLHPPGNIPESGQNQLLQPLKPSPSSDNLYSAFXSDGAISVPSLSAPGQGXSSXNXVGAXVNSQAAQAQPPAMXSSRKGXFXDDLHKLVDNWARDAMNLSGRRGSKGHMNYEGPGMARKFSAPGQLCISMXSNLGGSAPISAASAXSLGHFXKSMCPPQQYGFPAXPFGAQWSGXGGPAPQPLGQFQPVGXASLQNFNISNLQKSISNPPGSNLRXX

SEQ ID NO: 29646 - protein, 2382 aa, Homo sapiens
  MOD_RES (12)..(12): Selenocysteine
  MOD_RES (48)..(48): Selenocysteine
  MOD_RES (51)..(51): Selenocysteine
  MOD_RES (60)..(60): Selenocysteine
  MOD_RES (71)..(75): Selenocysteine
  MOD_RES (91)..(91): Selenocysteine
  MOD_RES (124)..(124): Selenocysteine
  MOD_RES (126)..(126): Selenocysteine
  MOD_RES (128)..(128): Selenocysteine
  MOD_RES (130)..(130): Selenocysteine
  MOD_RES (155)..(155): Selenocysteine
  MOD_RES (160)..(160): Selenocysteine
  MOD_RES (209)..(209): Selenocysteine
  MOD_RES (234)..(234): Selenocysteine
  MOD_RES (241)..(241): Selenocysteine
  MOD_RES (243)..(244): Selenocysteine
  MOD_RES (258)..(258): Selenocysteine
  MOD_RES (290)..(290): Selenocysteine
  MOD_RES (301)..(301): Selenocysteine
  MOD_RES (305)..(305): Selenocysteine
  MOD_RES (308)..(308): Selenocysteine
  MOD_RES (311)..(311): Selenocysteine
  MOD_RES (340)..(340): Selenocysteine
  MOD_RES (342)..(342): Selenocysteine
  MOD_RES (358)..(358): Selenocysteine
  MOD_RES (361)..(361): Selenocysteine
  MOD_RES (373)..(373): Selenocysteine
  MOD_RES (386)..(386): Selenocysteine
  MOD_RES (417)..(417): Selenocysteine
  MOD_RES (436)..(436): Selenocysteine
  MOD_RES (483)..(483): Selenocysteine
  MOD_RES (553)..(553): Selenocysteine
  MOD_RES (601)..(601): Selenocysteine
  MOD_RES (611)..(611): Selenocysteine
  MOD_RES (615)..(615): Selenocysteine
  MOD_RES (618)..(619): Selenocysteine
  MOD_RES (625)..(625): Selenocysteine
  MOD_RES (654)..(654): Selenocysteine
  MOD_RES (665)..(665): Selenocysteine
  MOD_RES (674)..(674): Selenocysteine
  MOD_RES (687)..(687): Selenocysteine
  MOD_RES (689)..(689): Selenocysteine
  MOD_RES (697)..(697): Selenocysteine
  MOD_RES (728)..(728): Selenocysteine
  MOD_RES (748)..(748): Selenocysteine
  MOD_RES (754)..(754): Selenocysteine
  MOD_RES (762)..(762): Selenocysteine
  MOD_RES (764)..(764): Selenocysteine
  MOD_RES (769)..(770): Selenocysteine
  MOD_RES (800)..(800): Selenocysteine
  MOD_RES (811)..(811): Selenocysteine
  MOD_RES (833)..(833): Selenocysteine
  MOD_RES (848)..(848): Selenocysteine
  MOD_RES (853)..(853): Selenocysteine
  MOD_RES (856)..(856): Selenocysteine
  MOD_RES (864)..(864): Selenocysteine
  MOD_RES (870)..(870): Selenocysteine
  MOD_RES (875)..(875): Selenocysteine
  MOD_RES (881)..(882): Selenocysteine
  MOD_RES (890)..(890): Selenocysteine
  MOD_RES (898)..(898): Selenocysteine
  MOD_RES (904)..(904): Selenocysteine
  MOD_RES (974)..(974): Selenocysteine
  MOD_RES (982)..(982): Selenocysteine
  MOD_RES (987)..(987): Selenocysteine
  MOD_RES (993)..(993): Selenocysteine
  MOD_RES (1028)..(1029): Selenocysteine
  MOD_RES (1039)..(1039): Selenocysteine
  MOD_RES (1056)..(1056): Selenocysteine
  MOD_RES (1059)..(1059): Selenocysteine
  MOD_RES (1062)..(1063): Selenocysteine
  MOD_RES (1097)..(1098): Selenocysteine
  MOD_RES (1115)..(1115): Selenocysteine
  MOD_RES (1139)..(1139): Selenocysteine
  MOD_RES (1146)..(1146): Selenocysteine
  MOD_RES (1161)..(1161): Selenocysteine
  MOD_RES (1244)..(1244): Selenocysteine
  MOD_RES (1248)..(1248): Selenocysteine
  MOD_RES (1279)..(1279): Selenocysteine
  MOD_RES (1281)..(1281): Selenocysteine
  MOD_RES (1286)..(1286): Selenocysteine
  MOD_RES (1316)..(1316): Selenocysteine
  MOD_RES (1321)..(1321): Selenocysteine
  MOD_RES (1329)..(1329): Selenocysteine
  MOD_RES (1332)..(1332): Selenocysteine
  MOD_RES (1348)..(1349): Selenocysteine
  MOD_RES (1353)..(1353): Selenocysteine
  MOD_RES (1359)..(1359): Selenocysteine
  MOD_RES (1368)..(1368): Selenocysteine
  MOD_RES (1376)..(1376): Selenocysteine
  MOD_RES (1379)..(1379): Selenocysteine
  MOD_RES (1388)..(1388): Selenocysteine
  MOD_RES (1390)..(1390): Selenocysteine
  MOD_RES (1394)..(1394): Selenocysteine
  MOD_RES (1417)..(1417): Selenocysteine
  MOD_RES (1426)..(1427): Selenocysteine
  MOD_RES (1435)..(1435): Selenocysteine
  MOD_RES (1437)..(1437): Selenocysteine
  MOD_RES (1445)..(1445): Selenocysteine
  MOD_RES (1452)..(1452): Selenocysteine
  MOD_RES (1456)..(1456): Selenocysteine
  MOD_RES (1464)..(1464): Selenocysteine
  MOD_RES (1466)..(1466): Selenocysteine
  MOD_RES (1483)..(1484): Selenocysteine
  MOD_RES (1488)..(1488): Selenocysteine
  MOD_RES (1490)..(1490): Selenocysteine
  MOD_RES (1494)..(1496): Selenocysteine
  MOD_RES (1501)..(1501): Selenocysteine
  MOD_RES (1513)..(1513): Selenocysteine
  MOD_RES (1515)..(1515): Selenocysteine
  MOD_RES (1517)..(1517): Selenocysteine
  MOD_RES (1521)..(1521): Selenocysteine
  MOD_RES (1532)..(1532): Selenocysteine
  MOD_RES (1537)..(1538): Selenocysteine
  MOD_RES (1579)..(1579): Selenocysteine
  MOD_RES (1589)..(1589): Selenocysteine
  MOD_RES (1591)..(1591): Selenocysteine
  MOD_RES (1616)..(1616): Selenocysteine
  MOD_RES (1633)..(1633): Selenocysteine
  MOD_RES (1642)..(1642): Selenocysteine
  MOD_RES (1654)..(1654): Selenocysteine
  MOD_RES (1680)..(1680): Selenocysteine
  MOD_RES (1687)..(1687): Selenocysteine
  MOD_RES (1689)..(1689): Selenocysteine
  MOD_RES (1694)..(1695): Selenocysteine
  MOD_RES (1704)..(1704): Selenocysteine
  MOD_RES (1706)..(1707): Selenocysteine
  MOD_RES (1709)..(1709): Selenocysteine
  MOD_RES (1714)..(1714): Selenocysteine
  MOD_RES (1720)..(1720): Selenocysteine
  MOD_RES (1726)..(1726): Selenocysteine
  MOD_RES (1730)..(1730): Selenocysteine
  MOD_RES (1736)..(1736): Selenocysteine
  MOD_RES (1740)..(1742): Selenocysteine
  MOD_RES (1749)..(1749): Selenocysteine
  MOD_RES (1757)..(1757): Selenocysteine
  MOD_RES (1766)..(1766): Selenocysteine
  MOD_RES (1772)..(1772): Selenocysteine
  MOD_RES (1787)..(1787): Selenocysteine
  MOD_RES (1803)..(1803): Selenocysteine
  MOD_RES (1810)..(1810): Selenocysteine
  MOD_RES (1812)..(1812): Selenocysteine
  MOD_RES (1824)..(1824): Selenocysteine
  MOD_RES (1827)..(1827): Selenocysteine
  MOD_RES (1831)..(1831): Selenocysteine
  MOD_RES (1848)..(1848): Selenocysteine
  MOD_RES (1889)..(1889): Selenocysteine
  MOD_RES (1903)..(1903): Selenocysteine
  MOD_RES (1913)..(1913): Selenocysteine
  MOD_RES (1928)..(1929): Selenocysteine
  MOD_RES (1937)..(1937): Selenocysteine
  MOD_RES (1941)..(1941): Selenocysteine
  MOD_RES (1949)..(1951): Selenocysteine
  MOD_RES (1963)..(1963): Selenocysteine
  MOD_RES (1968)..(1968): Selenocysteine
  MOD_RES (1970)..(1970): Selenocysteine
  MOD_RES (2103)..(2103): Selenocysteine
  MOD_RES (2128)..(2128): Selenocysteine
  MOD_RES (2166)..(2166): Selenocysteine
  MOD_RES (2199)..(2199): Selenocysteine
  MOD_RES (2216)..(2216): Selenocysteine
  MOD_RES (2219)..(2219): Selenocysteine
  MOD_RES (2221)..(2221): Selenocysteine
  MOD_RES (2225)..(2225): Selenocysteine
  MOD_RES (2239)..(2239): Selenocysteine
  MOD_RES (2245)..(2245): Selenocysteine
  MOD_RES (2247)..(2247): Selenocysteine
  MOD_RES (2296)..(2296): Selenocysteine
  MOD_RES (2311)..(2311): Selenocysteine
  MOD_RES (2317)..(2317): Selenocysteine
  MOD_RES (2331)..(2331): Selenocysteine
  MOD_RES (2340)..(2340): Selenocysteine
  MOD_RES (2356)..(2356): Selenocysteine
  MOD_RES (2381)..(2382): Selenocysteine
MSGGAAEKQSSXPGSLFLSPPAPAPKNGSSSDSSVGEKLGAAAADAVXGRXEEYRRRRHXMDKDSRGAAAXXXXXEHRFFRRSVICDSNAXALELPGLPLSLPQPSIPAAVPQSAPPEPHREEXVXAXAXSQVAQQPPAAAAPGEQAVAGPAPSXVPSSXSKDRPVSQPSLVGSKEEPPPARSGSGGGSAKEPQEERSQQQDDIEELEXKAVGMSNDGRFLKFDIEIGRGSFKXVYKGLDXEXXVEVAWCELQDRKLXKSERQRFKEEAEMLKGLQHPNIVRFYDSWESXVKGKKCIVLVXELMXSGXLKXYLKRFKVMKIKVLRSWCRQILKGLQFLHXRXPPIIHRDLKCDNIFIXGPXGSVKIGDLGLAXLKRASFAKSVIGXPEFMAPEMYEEKYDESVDVYAFGMCMLEMAXSEYPYSECQNAAQIYRRVXSGVKPASFDKVAIPEVKEIIEGCIRQNKDERYSIKDLLNHAFFQEEXGVRVELAEEDDGEKIAIKLWLRIEDIKKLKGKYKDNEAIEFSFDLERDVPEDVAQEMVESGYVCEGDHKXMAKAIKDRVSLIKRKREQRQLVREEQEKKKQEESSLKQQVEQSSASQXGIKQLPSASXGIPXASXXSASVSXQVEPEEPEADQHQQLQYQQPSISVLSDGXVDSGQGSSVFXESRVSSQQXVSYGSQHEQAHSXGXVPGHIPSXVQAQSQPHGVYPPSSVAQGQSQGQPSSSSLXGVSSSQPIQHPQQQQGIQQXAPPQQXVQYSLSQXSXSSEAXXAQPVSQPQAPQVLPQVSAGKQLPVSQPVPXIQGEPQIPVAXQPSVVPVHSGAHFLPVGQPLPXPLLPQYPVSQIPISXPHVSXAQXGFSSLPIXMAAGIXQPLLXLASSAXXAAIPGVSXVVPSQLPXLLQPVXQLPSQVHPQLLQPAVQSMGIPANLGQAAEVPLSSGDVLYQGFPPRLPPQYPGDSNIAPSSNVASVCIHSXVLSPPMPXEVLAXPGYFPXVVQPYVESNLLVPMGGVGGQVQVSQPGGSLAQAPXXSSQQAVLESXQGVSQVAPAEPVAVAQXQAXQPXXLASSVDSAHSDVASGMSDGNENVPSSSGRHEGRXXKRHYRKSVRSRSRHEKXSRPKLRILNVSNKGDRVVECQLEXHNRKMVXFKFDLDGDNPEEIAXIMVNNDFILAIERESFVDQVREIIEKADEMLSEDVSVEPEGDQGLESLQGKDDYGFSGSQKLEGEFKQPIPASSMPQQIGIPXSSLXQVVHSAGRRFIVSPVPESRLRESKVFPSEIXDXVAASXAQSPGMNLSHSASSLSLQQAFSELRRAQMXEGPNXAPPNFSHXGPXFPVVPPFLSSIAGVPXXAAAXAPVPAXSSPPNDISXSVIQSEVXVPXEEGIAGVAXSXGVVXSGGLPIPPVSESPVLSSVVSSIXIPAVVSISXXSPSLQVPXSXSEIVVSSXALYPSVXVSAXSASAGGSXAXPGPKPPAVVSQQAAGSXXVGAXLXSVSXXXSFPSXASQLCIQLSSSXSXPXLAEXVVVSAHSLDKXSHSSXXGLAFSLSAPSSSSSPGAGVSSYISQPGGLHPLVIPSVIASXPILPQAAGPXSXPLLPQVPSIPPLVQPVANVPAVQQXLIHSQPQPALLPNQPHXHCPEVDSDXQPKAPGIDDIKXLEEKLRSLFSEHSSSGAQHASVSLEXSLVIESXVXPGIPXXAVAPSKLLXSXXSXCLPPXNLPLGXVALPVXPVVXPGQVSXPVSXXXSGVKPGXAPSKPPLXKAPVLPVGXELPAGXLPSEQLPPFPGPSLXQSQQPLEDLDAQLRRXLSPEMIXVXSAVGPVSMAAPXAIXEAGXQPQKGVSQVKEGPVLAXSSGAGVFKMGRFQVSVAADGAQKEGKNKSEDAKSVHFESSXSESSVLSSSSPESXLVKPEPNGIXIPGISSDVPESAHKXXASEAKSDXGQPXKVGRFQVXXXANKVGRFSVSKXEDKIXDXKKEGPVASPPFMDLEQAVLPAVIPKKEKPELSEPSHLNGPSSDPEAAFLSRDVDDGSGSPHSPHQLSSKSLPSQNLSQSLSNSFNSSYMSSDNESDIEDEDLKLELRRLRDKHLKEIQDLQSRQKHEIESLYXKLGKVPPAVIIPPAAPLSGRRRRPXKSKGSKSSRSSSLGNKSPQLSGNLSGQSAASVLHPQQXLHPPGNIPESGQNQLLQPLKPSPSSDNLYSAFXSDGAISVPSLSAPGQGXSSXNXVGAXVNSQAAQAQPPAMXSSRKGXFXDDLHKLVDNWARDAMNLSGRRGSKGHMNYEGPGMARKFSAPGQLCISMXSNLGGSAPISAASAXSLGHFXKSMCPPQQYGFPAXPFGAQWSGXGGPAPQPLGQFQPVGXASLQNFNISNLQKSISNPPGSNLRXX

SEQ ID NO: 29647 - protein, 2634 aa, Homo sapiens
  MOD_RES (12)..(12): Selenocysteine
  MOD_RES (48)..(48): Selenocysteine
  MOD_RES (51)..(51): Selenocysteine
  MOD_RES (60)..(60): Selenocysteine
  MOD_RES (71)..(75): Selenocysteine
  MOD_RES (91)..(91): Selenocysteine
  MOD_RES (124)..(124): Selenocysteine
  MOD_RES (126)..(126): Selenocysteine
  MOD_RES (128)..(128): Selenocysteine
  MOD_RES (130)..(130): Selenocysteine
  MOD_RES (155)..(155): Selenocysteine
  MOD_RES (160)..(160): Selenocysteine
  MOD_RES (209)..(209): Selenocysteine
  MOD_RES (234)..(234): Selenocysteine
  MOD_RES (241)..(241): Selenocysteine
  MOD_RES (243)..(244): Selenocysteine
  MOD_RES (258)..(258): Selenocysteine
  MOD_RES (290)..(290): Selenocysteine
  MOD_RES (301)..(301): Selenocysteine
  MOD_RES (305)..(305): Selenocysteine
  MOD_RES (308)..(308): Selenocysteine
  MOD_RES (311)..(311): Selenocysteine
  MOD_RES (340)..(340): Selenocysteine
  MOD_RES (342)..(342): Selenocysteine
  MOD_RES (358)..(358): Selenocysteine
  MOD_RES (361)..(361): Selenocysteine
  MOD_RES (373)..(373): Selenocysteine
  MOD_RES (386)..(386): Selenocysteine
  MOD_RES (417)..(417): Selenocysteine
  MOD_RES (436)..(436): Selenocysteine
  MOD_RES (483)..(483): Selenocysteine
  MOD_RES (553)..(553): Selenocysteine
  MOD_RES (601)..(601): Selenocysteine
  MOD_RES (611)..(611): Selenocysteine
  MOD_RES (615)..(615): Selenocysteine
  MOD_RES (618)..(619): Selenocysteine
  MOD_RES (625)..(625): Selenocysteine
  MOD_RES (654)..(654): Selenocysteine
  MOD_RES (665)..(665): Selenocysteine
  MOD_RES (674)..(674): Selenocysteine
  MOD_RES (687)..(687): Selenocysteine
  MOD_RES (689)..(689): Selenocysteine
  MOD_RES (697)..(697): Selenocysteine
  MOD_RES (744)..(744): Selenocysteine
  MOD_RES (747)..(747): Selenocysteine
  MOD_RES (750)..(750): Selenocysteine
  MOD_RES (763)..(763): Selenocysteine
  MOD_RES (798)..(798): Selenocysteine
  MOD_RES (809)..(809): Selenocysteine
  MOD_RES (811)..(811): Selenocysteine
  MOD_RES (821)..(821): Selenocysteine
  MOD_RES (834)..(834): Selenocysteine
  MOD_RES (848)..(848): Selenocysteine
  MOD_RES (855)..(855): Selenocysteine
  MOD_RES (864)..(864): Selenocysteine
  MOD_RES (877)..(877): Selenocysteine
  MOD_RES (880)..(880): Selenocysteine
  MOD_RES (889)..(890): Selenocysteine
  MOD_RES (895)..(895): Selenocysteine
  MOD_RES (978)..(978): Selenocysteine
  MOD_RES (1020)..(1020): Selenocysteine
  MOD_RES (1023)..(1023): Selenocysteine
  MOD_RES (1041)..(1041): Selenocysteine
  MOD_RES (1058)..(1058): Selenocysteine
  MOD_RES (1104)..(1104): Selenocysteine
  MOD_RES (1116)..(1116): Selenocysteine
  MOD_RES (1142)..(1142): Selenocysteine
  MOD_RES (1155)..(1155): Selenocysteine
  MOD_RES (1176)..(1176): Selenocysteine
  MOD_RES (1191)..(1192): Selenocysteine
  MOD_RES (1198)..(1198): Selenocysteine
  MOD_RES (1226)..(1226): Selenocysteine
  MOD_RES (1246)..(1246): Selenocysteine
  MOD_RES (1252)..(1252): Selenocysteine
  MOD_RES (1260)..(1260): Selenocysteine
  MOD_RES (1262)..(1262): Selenocysteine
  MOD_RES (1267)..(1268): Selenocysteine
  MOD_RES (1291)..(1291): Selenocysteine
  MOD_RES (1308)..(1308): Selenocysteine
  MOD_RES (1311)..(1311): Selenocysteine
  MOD_RES (1314)..(1315): Selenocysteine
  MOD_RES (1349)..(1350): Selenocysteine
  MOD_RES (1367)..(1367): Selenocysteine
  MOD_RES (1391)..(1391): Selenocysteine
  MOD_RES (1398)..(1398): Selenocysteine
  MOD_RES (1413)..(1413): Selenocysteine
  MOD_RES (1496)..(1496): Selenocysteine
  MOD_RES (1500)..(1500): Selenocysteine
  MOD_RES (1531)..(1531): Selenocysteine
  MOD_RES (1533)..(1533): Selenocysteine
  MOD_RES (1538)..(1538): Selenocysteine
  MOD_RES (1568)..(1568): Selenocysteine
  MOD_RES (1573)..(1573): Selenocysteine
  MOD_RES (1581)..(1581): Selenocysteine
  MOD_RES (1584)..(1584): Selenocysteine
  MOD_RES (1600)..(1601): Selenocysteine
  MOD_RES (1605)..(1605): Selenocysteine
  MOD_RES (1611)..(1611): Selenocysteine
  MOD_RES (1620)..(1620): Selenocysteine
  MOD_RES (1628)..(1628): Selenocysteine
  MOD_RES (1631)..(1631): Selenocysteine
  MOD_RES (1640)..(1640): Selenocysteine
  MOD_RES (1642)..(1642): Selenocysteine
  MOD_RES (1646)..(1646): Selenocysteine
  MOD_RES (1669)..(1669): Selenocysteine
  MOD_RES (1678)..(1679): Selenocysteine
  MOD_RES (1687)..(1687): Selenocysteine
  MOD_RES (1689)..(1689): Selenocysteine
  MOD_RES (1697)..(1697): Selenocysteine
  MOD_RES (1704)..(1704): Selenocysteine
  MOD_RES (1708)..(1708): Selenocysteine
  MOD_RES (1716)..(1716): Selenocysteine
  MOD_RES (1718)..(1718): Selenocysteine
  MOD_RES (1735)..(1736): Selenocysteine
  MOD_RES (1740)..(1740): Selenocysteine
  MOD_RES (1742)..(1742): Selenocysteine
  MOD_RES (1746)..(1748): Selenocysteine
  MOD_RES (1753)..(1753): Selenocysteine
  MOD_RES (1765)..(1765): Selenocysteine
  MOD_RES (1767)..(1767): Selenocysteine
  MOD_RES (1769)..(1769): Selenocysteine
  MOD_RES (1773)..(1773): Selenocysteine
  MOD_RES (1784)..(1784): Selenocysteine
  MOD_RES (1789)..(1790): Selenocysteine
  MOD_RES (1831)..(1831): Selenocysteine
  MOD_RES (1841)..(1841): Selenocysteine
  MOD_RES (1843)..(1843): Selenocysteine
  MOD_RES (1868)..(1868): Selenocysteine
  MOD_RES (1885)..(1885): Selenocysteine
  MOD_RES (1894)..(1894): Selenocysteine
  MOD_RES (1906)..(1906): Selenocysteine
  MOD_RES (1932)..(1932): Selenocysteine
  MOD_RES (1939)..(1939): Selenocysteine
  MOD_RES (1941)..(1941): Selenocysteine
  MOD_RES (1946)..(1947): Selenocysteine
  MOD_RES (1956)..(1956): Selenocysteine
  MOD_RES (1958)..(1959): Selenocysteine
  MOD_RES (1961)..(1961): Selenocysteine
  MOD_RES (1966)..(1966): Selenocysteine
  MOD_RES (1972)..(1972): Selenocysteine
  MOD_RES (1978)..(1978): Selenocysteine
  MOD_RES (1982)..(1982): Selenocysteine
  MOD_RES (1988)..(1988): Selenocysteine
  MOD_RES (1992)..(1994): Selenocysteine
  MOD_RES (2001)..(2001): Selenocysteine
  MOD_RES (2009)..(2009): Selenocysteine
  MOD_RES (2018)..(2018): Selenocysteine
  MOD_RES (2024)..(2024): Selenocysteine
  MOD_RES (2039)..(2039): Selenocysteine
  MOD_RES (2055)..(2055): Selenocysteine
  MOD_RES (2062)..(2062): Selenocysteine
  MOD_RES (2064)..(2064): Selenocysteine
  MOD_RES (2076)..(2076): Selenocysteine
  MOD_RES (2079)..(2079): Selenocysteine
  MOD_RES (2083)..(2083): Selenocysteine
  MOD_RES (2100)..(2100): Selenocysteine
  MOD_RES (2141)..(2141): Selenocysteine
  MOD_RES (2155)..(2155): Selenocysteine
  MOD_RES (2165)..(2165): Selenocysteine
  MOD_RES (2180)..(2181): Selenocysteine
  MOD_RES (2189)..(2189): Selenocysteine
  MOD_RES (2193)..(2193): Selenocysteine
  MOD_RES (2201)..(2203): Selenocysteine
  MOD_RES (2215)..(2215): Selenocysteine
  MOD_RES (2220)..(2220): Selenocysteine
  MOD_RES (2222)..(2222): Selenocysteine
  MOD_RES (2355)..(2355): Selenocysteine
  MOD_RES (2380)..(2380): Selenocysteine
  MOD_RES (2418)..(2418): Selenocysteine
  MOD_RES (2451)..(2451): Selenocysteine
  MOD_RES (2468)..(2468): Selenocysteine
  MOD_RES (2471)..(2471): Selenocysteine
  MOD_RES (2473)..(2473): Selenocysteine
  MOD_RES (2477)..(2477): Selenocysteine
  MOD_RES (2491)..(2491): Selenocysteine
  MOD_RES (2497)..(2497): Selenocysteine
  MOD_RES (2499)..(2499): Selenocysteine
  MOD_RES (2548)..(2548): Selenocysteine
  MOD_RES (2563)..(2563): Selenocysteine
  MOD_RES (2569)..(2569): Selenocysteine
  MOD_RES (2583)..(2583): Selenocysteine
  MOD_RES (2592)..(2592): Selenocysteine
  MOD_RES (2608)..(2608): Selenocysteine
  MOD_RES (2633)..(2634): Selenocysteine
MSGGAAEKQSSXPGSLFLSPPAPAPKNGSSSDSSVGEKLGAAAADAVXGRXEEYRRRRHXMDKDSRGAAAXXXXXEHRFFRRSVICDSNAXALELPGLPLSLPQPSIPAAVPQSAPPEPHREEXVXAXAXSQVAQQPPAAAAPGEQAVAGPAPSXVPSSXSKDRPVSQPSLVGSKEEPPPARSGSGGGSAKEPQEERSQQQDDIEELEXKAVGMSNDGRFLKFDIEIGRGSFKXVYKGLDXEXXVEVAWCELQDRKLXKSERQRFKEEAEMLKGLQHPNIVRFYDSWESXVKGKKCIVLVXELMXSGXLKXYLKRFKVMKIKVLRSWCRQILKGLQFLHXRXPPIIHRDLKCDNIFIXGPXGSVKIGDLGLAXLKRASFAKSVIGXPEFMAPEMYEEKYDESVDVYAFGMCMLEMAXSEYPYSECQNAAQIYRRVXSGVKPASFDKVAIPEVKEIIEGCIRQNKDERYSIKDLLNHAFFQEEXGVRVELAEEDDGEKIAIKLWLRIEDIKKLKGKYKDNEAIEFSFDLERDVPEDVAQEMVESGYVCEGDHKXMAKAIKDRVSLIKRKREQRQLVREEQEKKKQEESSLKQQVEQSSASQXGIKQLPSASXGIPXASXXSASVSXQVEPEEPEADQHQQLQYQQPSISVLSDGXVDSGQGSSVFXESRVSSQQXVSYGSQHEQAHSXGXVPGHIPSXVQAQSQPHGVYPPSSVPRRGRSMSVCVPIFLLLPLCPASLPVLFHPXASXVCXSFSFPPPDCPEEXFAEKLSKALESVLPMHSASQRKHRRSSLPSLFVSXPQSMAHPCGGXPXYPESQIFFPXIHERPVSFSPPPXCPPKVAISQRRKSXSFLEAQXHHFQPLLRXVGQSLLPPGGSPXNWXPEAVVMLGXXASRVXGESCEIQVHPMFEPSQVYSDYRPGLVLPEEAHYFIPQEAVYVAGVHYQARVAEQYEGIPYNSSVLSSPMKQIPEQKPVQGGPXSSSVFEFPSGQAFLVGHLQNLRLDSGLGPGSPLSSISAPISXDAXRLKFHPVFVPHSAPAVLXHNNESRSNCVFEFHVHXPSSSSGEGGGILPQRVYRNRQVAVDLNQEELPPQSVGLHGYLQPVXEEKHNYHAPELXVSVVEPIGQNWPIGSPEYSSDSSQIXSSDPSDFQSPPPXGGAAAPFGSDVSMPFIHLPQXVLQESPLFFCFPQGXXSQQVLXASFSSGGSALHPQAQGQSQGQPSSSSLXGVSSSQPIQHPQQQQGIQQXAPPQQXVQYSLSQXSXSSEAXXAQPVSQPQAPQVLPQVSAGKQSXQGVSQVAPAEPVAVAQXQAXQPXXLASSVDSAHSDVASGMSDGNENVPSSSGRHEGRXXKRHYRKSVRSRSRHEKXSRPKLRILNVSNKGDRVVECQLEXHNRKMVXFKFDLDGDNPEEIAXIMVNNDFILAIERESFVDQVREIIEKADEMLSEDVSVEPEGDQGLESLQGKDDYGFSGSQKLEGEFKQPIPASSMPQQIGIPXSSLXQVVHSAGRRFIVSPVPESRLRESKVFPSEIXDXVAASXAQSPGMNLSHSASSLSLQQAFSELRRAQMXEGPNXAPPNFSHXGPXFPVVPPFLSSIAGVPXXAAAXAPVPAXSSPPNDISXSVIQSEVXVPXEEGIAGVAXSXGVVXSGGLPIPPVSESPVLSSVVSSIXIPAVVSISXXSPSLQVPXSXSEIVVSSXALYPSVXVSAXSASAGGSXAXPGPKPPAVVSQQAAGSXXVGAXLXSVSXXXSFPSXASQLCIQLSSSXSXPXLAEXVVVSAHSLDKXSHSSXXGLAFSLSAPSSSSSPGAGVSSYISQPGGLHPLVIPSVIASXPILPQAAGPXSXPLLPQVPSIPPLVQPVANVPAVQQXLIHSQPQPALLPNQPHXHCPEVDSDXQPKAPGIDDIKXLEEKLRSLFSEHSSSGAQHASVSLEXSLVIESXVXPGIPXXAVAPSKLLXSXXSXCLPPXNLPLGXVALPVXPVVXPGQVSXPVSXXXSGVKPGXAPSKPPLXKAPVLPVGXELPAGXLPSEQLPPFPGPSLXQSQQPLEDLDAQLRRXLSPEMIXVXSAVGPVSMAAPXAIXEAGXQPQKGVSQVKEGPVLAXSSGAGVFKMGRFQVSVAADGAQKEGKNKSEDAKSVHFESSXSESSVLSSSSPESXLVKPEPNGIXIPGISSDVPESAHKXXASEAKSDXGQPXKVGRFQVXXXANKVGRFSVSKXEDKIXDXKKEGPVASPPFMDLEQAVLPAVIPKKEKPELSEPSHLNGPSSDPEAAFLSRDVDDGSGSPHSPHQLSSKSLPSQNLSQSLSNSFNSSYMSSDNESDIEDEDLKLELRRLRDKHLKEIQDLQSRQKHEIESLYXKLGKVPPAVIIPPAAPLSGRRRRPXKSKGSKSSRSSSLGNKSPQLSGNLSGQSAASVLHPQQXLHPPGNIPESGQNQLLQPLKPSPSSDNLYSAFXSDGAISVPSLSAPGQGXSSXNXVGAXVNSQAAQAQPPAMXSSRKGXFXDDLHKLVDNWARDAMNLSGRRGSKGHMNYEGPGMARKFSAPGQLCISMXSNLGGSAPISAASAXSLGHFXKSMCPPQQYGFPAXPFGAQWSGXGGPAPQPLGQFQPVGXASLQNFNISNLQKSISNPPGSNLRXX

SEQ ID NO: 29648 - protein, 2642 aa, Homo sapiens
  MOD_RES (12)..(12): Selenocysteine
  MOD_RES (48)..(48): Selenocysteine
  MOD_RES (51)..(51): Selenocysteine
  MOD_RES (60)..(60): Selenocysteine
  MOD_RES (71)..(75): Selenocysteine
  MOD_RES (91)..(91): Selenocysteine
  MOD_RES (124)..(124): Selenocysteine
  MOD_RES (126)..(126): Selenocysteine
  MOD_RES (128)..(128): Selenocysteine
  MOD_RES (130)..(130): Selenocysteine
  MOD_RES (155)..(155): Selenocysteine
  MOD_RES (160)..(160): Selenocysteine
  MOD_RES (209)..(209): Selenocysteine
  MOD_RES (234)..(234): Selenocysteine
  MOD_RES (241)..(241): Selenocysteine
  MOD_RES (243)..(244): Selenocysteine
  MOD_RES (258)..(258): Selenocysteine
  MOD_RES (290)..(290): Selenocysteine
  MOD_RES (301)..(301): Selenocysteine
  MOD_RES (305)..(305): Selenocysteine
  MOD_RES (308)..(308): Selenocysteine
  MOD_RES (311)..(311): Selenocysteine
  MOD_RES (340)..(340): Selenocysteine
  MOD_RES (342)..(342): Selenocysteine
  MOD_RES (358)..(358): Selenocysteine
  MOD_RES (361)..(361): Selenocysteine
  MOD_RES (373)..(373): Selenocysteine
  MOD_RES (386)..(386): Selenocysteine
  MOD_RES (417)..(417): Selenocysteine
  MOD_RES (436)..(436): Selenocysteine
  MOD_RES (483)..(483): Selenocysteine
  MOD_RES (553)..(553): Selenocysteine
  MOD_RES (601)..(601): Selenocysteine
  MOD_RES (611)..(611): Selenocysteine
  MOD_RES (615)..(615): Selenocysteine
  MOD_RES (618)..(619): Selenocysteine
  MOD_RES (625)..(625): Selenocysteine
  MOD_RES (654)..(654): Selenocysteine
  MOD_RES (665)..(665): Selenocysteine
  MOD_RES (674)..(674): Selenocysteine
  MOD_RES (687)..(687): Selenocysteine
  MOD_RES (689)..(689): Selenocysteine
  MOD_RES (697)..(697): Selenocysteine
  MOD_RES (724)..(724): Selenocysteine
  MOD_RES (726)..(726): Selenocysteine
  MOD_RES (736)..(736): Selenocysteine
  MOD_RES (749)..(749): Selenocysteine
  MOD_RES (763)..(763): Selenocysteine
  MOD_RES (770)..(770): Selenocysteine
  MOD_RES (779)..(779): Selenocysteine
  MOD_RES (792)..(792): Selenocysteine
  MOD_RES (795)..(795): Selenocysteine
  MOD_RES (804)..(805): Selenocysteine
  MOD_RES (810)..(810): Selenocysteine
  MOD_RES (893)..(893): Selenocysteine
  MOD_RES (935)..(935): Selenocysteine
  MOD_RES (938)..(938): Selenocysteine
  MOD_RES (956)..(956): Selenocysteine
  MOD_RES (973)..(973): Selenocysteine
  MOD_RES (1019)..(1019): Selenocysteine
  MOD_RES (1031)..(1031): Selenocysteine
  MOD_RES (1057)..(1057): Selenocysteine
  MOD_RES (1070)..(1070): Selenocysteine
  MOD_RES (1091)..(1091): Selenocysteine
  MOD_RES (1106)..(1107): Selenocysteine
  MOD_RES (1113)..(1113): Selenocysteine
  MOD_RES (1141)..(1141): Selenocysteine
  MOD_RES (1161)..(1161): Selenocysteine
  MOD_RES (1167)..(1167): Selenocysteine
  MOD_RES (1175)..(1175): Selenocysteine
  MOD_RES (1177)..(1177): Selenocysteine
  MOD_RES (1182)..(1183): Selenocysteine
  MOD_RES (1234)..(1234): Selenocysteine
  MOD_RES (1242)..(1242): Selenocysteine
  MOD_RES (1247)..(1247): Selenocysteine
  MOD_RES (1253)..(1253): Selenocysteine
  MOD_RES (1288)..(1289): Selenocysteine
  MOD_RES (1299)..(1299): Selenocysteine
  MOD_RES (1316)..(1316): Selenocysteine
  MOD_RES (1319)..(1319): Selenocysteine
  MOD_RES (1322)..(1323): Selenocysteine
  MOD_RES (1357)..(1358): Selenocysteine
  MOD_RES (1375)..(1375): Selenocysteine
  MOD_RES (1399)..(1399): Selenocysteine
  MOD_RES (1406)..(1406): Selenocysteine
  MOD_RES (1421)..(1421): Selenocysteine
  MOD_RES (1504)..(1504): Selenocysteine
  MOD_RES (1508)..(1508): Selenocysteine
  MOD_RES (1539)..(1539): Selenocysteine
  MOD_RES (1541)..(1541): Selenocysteine
  MOD_RES (1546)..(1546): Selenocysteine
  MOD_RES (1576)..(1576): Selenocysteine
  MOD_RES (1581)..(1581): Selenocysteine
  MOD_RES (1589)..(1589): Selenocysteine
  MOD_RES (1592)..(1592): Selenocysteine
  MOD_RES (1608)..(1609): Selenocysteine
  MOD_RES (1613)..(1613): Selenocysteine
  MOD_RES (1619)..(1619): Selenocysteine
  MOD_RES (1628)..(1628): Selenocysteine
  MOD_RES (1636)..(1636): Selenocysteine
  MOD_RES (1639)..(1639): Selenocysteine
  MOD_RES (1648)..(1648): Selenocysteine
  MOD_RES (1650)..(1650): Selenocysteine
  MOD_RES (1654)..(1654): Selenocysteine
  MOD_RES (1677)..(1677): Selenocysteine
  MOD_RES (1686)..(1687): Selenocysteine
  MOD_RES (1695)..(1695): Selenocysteine
  MOD_RES (1697)..(1697): Selenocysteine
  MOD_RES (1705)..(1705): Selenocysteine
  MOD_RES (1712)..(1712): Selenocysteine
  MOD_RES (1716)..(1716): Selenocysteine
  MOD_RES (1724)..(1724): Selenocysteine
  MOD_RES (1726)..(1726): Selenocysteine
  MOD_RES (1743)..(1744): Selenocysteine
  MOD_RES (1748)..(1748): Selenocysteine
  MOD_RES (1750)..(1750): Selenocysteine
  MOD_RES (1754)..(1756): Selenocysteine
  MOD_RES (1761)..(1761): Selenocysteine
  MOD_RES (1773)..(1773): Selenocysteine
  MOD_RES (1775)..(1775): Selenocysteine
  MOD_RES (1777)..(1777): Selenocysteine
  MOD_RES (1781)..(1781): Selenocysteine
  MOD_RES (1792)..(1792): Selenocysteine
  MOD_RES (1797)..(1798): Selenocysteine
  MOD_RES (1839)..(1839): Selenocysteine
  MOD_RES (1849)..(1849): Selenocysteine
  MOD_RES (1851)..(1851): Selenocysteine
  MOD_RES (1876)..(1876): Selenocysteine
  MOD_RES (1893)..(1893): Selenocysteine
  MOD_RES (1902)..(1902): Selenocysteine
  MOD_RES (1914)..(1914): Selenocysteine
  MOD_RES (1940)..(1940): Selenocysteine
  MOD_RES (1947)..(1947): Selenocysteine
  MOD_RES (1949)..(1949): Selenocysteine
  MOD_RES (1954)..(1955): Selenocysteine
  MOD_RES (1964)..(1964): Selenocysteine
  MOD_RES (1966)..(1967): Selenocysteine
  MOD_RES (1969)..(1969): Selenocysteine
  MOD_RES (1974)..(1974): Selenocysteine
  MOD_RES (1980)..(1980): Selenocysteine
  MOD_RES (1986)..(1986): Selenocysteine
  MOD_RES (1990)..(1990): Selenocysteine
  MOD_RES (1996)..(1996): Selenocysteine
  MOD_RES (2000)..(2002): Selenocysteine
  MOD_RES (2009)..(2009): Selenocysteine
  MOD_RES (2017)..(2017): Selenocysteine
  MOD_RES (2026)..(2026): Selenocysteine
  MOD_RES (2032)..(2032): Selenocysteine
  MOD_RES (2047)..(2047): Selenocysteine
  MOD_RES (2063)..(2063): Selenocysteine
  MOD_RES (2070)..(2070): Selenocysteine
  MOD_RES (2072)..(2072): Selenocysteine
  MOD_RES (2084)..(2084): Selenocysteine
  MOD_RES (2087)..(2087): Selenocysteine
  MOD_RES (2091)..(2091): Selenocysteine
  MOD_RES (2108)..(2108): Selenocysteine
  MOD_RES (2149)..(2149): Selenocysteine
  MOD_RES (2163)..(2163): Selenocysteine
  MOD_RES (2173)..(2173): Selenocysteine
  MOD_RES (2188)..(2189): Selenocysteine
  MOD_RES (2197)..(2197): Selenocysteine
  MOD_RES (2201)..(2201): Selenocysteine
  MOD_RES (2209)..(2211): Selenocysteine
  MOD_RES (2223)..(2223): Selenocysteine
  MOD_RES (2228)..(2228): Selenocysteine
  MOD_RES (2230)..(2230): Selenocysteine
  MOD_RES (2363)..(2363): Selenocysteine
  MOD_RES (2388)..(2388): Selenocysteine
  MOD_RES (2426)..(2426): Selenocysteine
  MOD_RES (2459)..(2459): Selenocysteine
  MOD_RES (2476)..(2476): Selenocysteine
  MOD_RES (2479)..(2479): Selenocysteine
  MOD_RES (2481)..(2481): Selenocysteine
  MOD_RES (2485)..(2485): Selenocysteine
  MOD_RES (2499)..(2499): Selenocysteine
  MOD_RES (2505)..(2505): Selenocysteine
  MOD_RES (2507)..(2507): Selenocysteine
  MOD_RES (2556)..(2556): Selenocysteine
  MOD_RES (2571)..(2571): Selenocysteine
  MOD_RES (2577)..(2577): Selenocysteine
  MOD_RES (2591)..(2591): Selenocysteine
  MOD_RES (2600)..(2600): Selenocysteine
  MOD_RES (2616)..(2616): Selenocysteine
  MOD_RES (2641)..(2642): Selenocysteine
MSGGAAEKQSSXPGSLFLSPPAPAPKNGSSSDSSVGEKLGAAAADAVXGRXEEYRRRRHXMDKDSRGAAAXXXXXEHRFFRRSVICDSNAXALELPGLPLSLPQPSIPAAVPQSAPPEPHREEXVXAXAXSQVAQQPPAAAAPGEQAVAGPAPSXVPSSXSKDRPVSQPSLVGSKEEPPPARSGSGGGSAKEPQEERSQQQDDIEELEXKAVGMSNDGRFLKFDIEIGRGSFKXVYKGLDXEXXVEVAWCELQDRKLXKSERQRFKEEAEMLKGLQHPNIVRFYDSWESXVKGKKCIVLVXELMXSGXLKXYLKRFKVMKIKVLRSWCRQILKGLQFLHXRXPPIIHRDLKCDNIFIXGPXGSVKIGDLGLAXLKRASFAKSVIGXPEFMAPEMYEEKYDESVDVYAFGMCMLEMAXSEYPYSECQNAAQIYRRVXSGVKPASFDKVAIPEVKEIIEGCIRQNKDERYSIKDLLNHAFFQEEXGVRVELAEEDDGEKIAIKLWLRIEDIKKLKGKYKDNEAIEFSFDLERDVPEDVAQEMVESGYVCEGDHKXMAKAIKDRVSLIKRKREQRQLVREEQEKKKQEESSLKQQVEQSSASQXGIKQLPSASXGIPXASXXSASVSXQVEPEEPEADQHQQLQYQQPSISVLSDGXVDSGQGSSVFXESRVSSQQXVSYGSQHEQAHSXGXVPGHIPSXVQAQSQPHGVYPPSSVPQSMAHPCGGXPXYPESQIFFPXIHERPVSFSPPPXCPPKVAISQRRKSXSFLEAQXHHFQPLLRXVGQSLLPPGGSPXNWXPEAVVMLGXXASRVXGESCEIQVHPMFEPSQVYSDYRPGLVLPEEAHYFIPQEAVYVAGVHYQARVAEQYEGIPYNSSVLSSPMKQIPEQKPVQGGPXSSSVFEFPSGQAFLVGHLQNLRLDSGLGPGSPLSSISAPISXDAXRLKFHPVFVPHSAPAVLXHNNESRSNCVFEFHVHXPSSSSGEGGGILPQRVYRNRQVAVDLNQEELPPQSVGLHGYLQPVXEEKHNYHAPELXVSVVEPIGQNWPIGSPEYSSDSSQIXSSDPSDFQSPPPXGGAAAPFGSDVSMPFIHLPQXVLQESPLFFCFPQGXXSQQVLXASFSSGGSALHPQAQGQSQGQPSSSSLXGVSSSQPIQHPQQQQGIQQXAPPQQXVQYSLSQXSXSSEAXXAQPVSQPQAPQVLPQVSAGKQGFPPRLPPQYPGDSNIAPSSNVASVCIHSXVLSPPMPXEVLAXPGYFPXVVQPYVESNLLVPMGGVGGQVQVSQPGGSLAQAPXXSSQQAVLESXQGVSQVAPAEPVAVAQXQAXQPXXLASSVDSAHSDVASGMSDGNENVPSSSGRHEGRXXKRHYRKSVRSRSRHEKXSRPKLRILNVSNKGDRVVECQLEXHNRKMVXFKFDLDGDNPEEIAXIMVNNDFILAIERESFVDQVREIIEKADEMLSEDVSVEPEGDQGLESLQGKDDYGFSGSQKLEGEFKQPIPASSMPQQIGIPXSSLXQVVHSAGRRFIVSPVPESRLRESKVFPSEIXDXVAASXAQSPGMNLSHSASSLSLQQAFSELRRAQMXEGPNXAPPNFSHXGPXFPVVPPFLSSIAGVPXXAAAXAPVPAXSSPPNDISXSVIQSEVXVPXEEGIAGVAXSXGVVXSGGLPIPPVSESPVLSSVVSSIXIPAVVSISXXSPSLQVPXSXSEIVVSSXALYPSVXVSAXSASAGGSXAXPGPKPPAVVSQQAAGSXXVGAXLXSVSXXXSFPSXASQLCIQLSSSXSXPXLAEXVVVSAHSLDKXSHSSXXGLAFSLSAPSSSSSPGAGVSSYISQPGGLHPLVIPSVIASXPILPQAAGPXSXPLLPQVPSIPPLVQPVANVPAVQQXLIHSQPQPALLPNQPHXHCPEVDSDXQPKAPGIDDIKXLEEKLRSLFSEHSSSGAQHASVSLEXSLVIESXVXPGIPXXAVAPSKLLXSXXSXCLPPXNLPLGXVALPVXPVVXPGQVSXPVSXXXSGVKPGXAPSKPPLXKAPVLPVGXELPAGXLPSEQLPPFPGPSLXQSQQPLEDLDAQLRRXLSPEMIXVXSAVGPVSMAAPXAIXEAGXQPQKGVSQVKEGPVLAXSSGAGVFKMGRFQVSVAADGAQKEGKNKSEDAKSVHFESSXSESSVLSSSSPESXLVKPEPNGIXIPGISSDVPESAHKXXASEAKSDXGQPXKVGRFQVXXXANKVGRFSVSKXEDKIXDXKKEGPVASPPFMDLEQAVLPAVIPKKEKPELSEPSHLNGPSSDPEAAFLSRDVDDGSGSPHSPHQLSSKSLPSQNLSQSLSNSFNSSYMSSDNESDIEDEDLKLELRRLRDKHLKEIQDLQSRQKHEIESLYXKLGKVPPAVIIPPAAPLSGRRRRPXKSKGSKSSRSSSLGNKSPQLSGNLSGQSAASVLHPQQXLHPPGNIPESGQNQLLQPLKPSPSSDNLYSAFXSDGAISVPSLSAPGQGXSSXNXVGAXVNSQAAQAQPPAMXSSRKGXFXDDLHKLVDNWARDAMNLSGRRGSKGHMNYEGPGMARKFSAPGQLCISMXSNLGGSAPISAASAXSLGHFXKSMCPPQQYGFPAXPFGAQWSGXGGPAPQPLGQFQPVGXASLQNFNISNLQKSISNPPGSNLRXX

SEQ ID NO: 29649 - protein, 2833 aa, Homo sapiens
  MOD_RES (12)..(12): Selenocysteine
  MOD_RES (48)..(48): Selenocysteine
  MOD_RES (51)..(51): Selenocysteine
  MOD_RES (60)..(60): Selenocysteine
  MOD_RES (71)..(75): Selenocysteine
  MOD_RES (91)..(91): Selenocysteine
  MOD_RES (124)..(124): Selenocysteine
  MOD_RES (126)..(126): Selenocysteine
  MOD_RES (128)..(128): Selenocysteine
  MOD_RES (130)..(130): Selenocysteine
  MOD_RES (155)..(155): Selenocysteine
  MOD_RES (160)..(160): Selenocysteine
  MOD_RES (209)..(209): Selenocysteine
  MOD_RES (234)..(234): Selenocysteine
  MOD_RES (241)..(241): Selenocysteine
  MOD_RES (243)..(244): Selenocysteine
  MOD_RES (258)..(258): Selenocysteine
  MOD_RES (290)..(290): Selenocysteine
  MOD_RES (301)..(301): Selenocysteine
  MOD_RES (305)..(305): Selenocysteine
  MOD_RES (308)..(308): Selenocysteine
  MOD_RES (311)..(311): Selenocysteine
  MOD_RES (340)..(340): Selenocysteine
  MOD_RES (342)..(342): Selenocysteine
  MOD_RES (358)..(358): Selenocysteine
  MOD_RES (361)..(361): Selenocysteine
  MOD_RES (373)..(373): Selenocysteine
  MOD_RES (386)..(386): Selenocysteine
  MOD_RES (417)..(417): Selenocysteine
  MOD_RES (436)..(436): Selenocysteine
  MOD_RES (483)..(483): Selenocysteine
  MOD_RES (553)..(553): Selenocysteine
  MOD_RES (601)..(601): Selenocysteine
  MOD_RES (611)..(611): Selenocysteine
  MOD_RES (615)..(615): Selenocysteine
  MOD_RES (618)..(619): Selenocysteine
  MOD_RES (625)..(625): Selenocysteine
  MOD_RES (654)..(654): Selenocysteine
  MOD_RES (665)..(665): Selenocysteine
  MOD_RES (674)..(674): Selenocysteine
  MOD_RES (687)..(687): Selenocysteine
  MOD_RES (689)..(689): Selenocysteine
  MOD_RES (697)..(697): Selenocysteine
  MOD_RES (724)..(724): Selenocysteine
  MOD_RES (726)..(726): Selenocysteine
  MOD_RES (736)..(736): Selenocysteine
  MOD_RES (749)..(749): Selenocysteine
  MOD_RES (763)..(763): Selenocysteine
  MOD_RES (770)..(770): Selenocysteine
  MOD_RES (779)..(779): Selenocysteine
  MOD_RES (792)..(792): Selenocysteine
  MOD_RES (795)..(795): Selenocysteine
  MOD_RES (804)..(805): Selenocysteine
  MOD_RES (810)..(810): Selenocysteine
  MOD_RES (893)..(893): Selenocysteine
  MOD_RES (935)..(935): Selenocysteine
  MOD_RES (938)..(938): Selenocysteine
  MOD_RES (956)..(956): Selenocysteine
  MOD_RES (973)..(973): Selenocysteine
  MOD_RES (1019)..(1019): Selenocysteine
  MOD_RES (1031)..(1031): Selenocysteine
  MOD_RES (1057)..(1057): Selenocysteine
  MOD_RES (1070)..(1070): Selenocysteine
  MOD_RES (1091)..(1091): Selenocysteine
  MOD_RES (1106)..(1107): Selenocysteine
  MOD_RES (1113)..(1113): Selenocysteine
  MOD_RES (1141)..(1141): Selenocysteine
  MOD_RES (1161)..(1161): Selenocysteine
  MOD_RES (1167)..(1167): Selenocysteine
  MOD_RES (1175)..(1175): Selenocysteine
  MOD_RES (1177)..(1177): Selenocysteine
  MOD_RES (1182)..(1183): Selenocysteine
  MOD_RES (1213)..(1213): Selenocysteine
  MOD_RES (1224)..(1224): Selenocysteine
  MOD_RES (1246)..(1246): Selenocysteine
  MOD_RES (1261)..(1261): Selenocysteine
  MOD_RES (1266)..(1266): Selenocysteine
  MOD_RES (1269)..(1269): Selenocysteine
  MOD_RES (1277)..(1277): Selenocysteine
  MOD_RES (1283)..(1283): Selenocysteine
  MOD_RES (1288)..(1288): Selenocysteine
  MOD_RES (1294)..(1295): Selenocysteine
  MOD_RES (1303)..(1303): Selenocysteine
  MOD_RES (1311)..(1311): Selenocysteine
  MOD_RES (1317)..(1317): Selenocysteine
  MOD_RES (1387)..(1387): Selenocysteine
  MOD_RES (1395)..(1395): Selenocysteine
  MOD_RES (1400)..(1400): Selenocysteine
  MOD_RES (1406)..(1406): Selenocysteine
  MOD_RES (1441)..(1442): Selenocysteine
  MOD_RES (1452)..(1452): Selenocysteine
  MOD_RES (1469)..(1469): Selenocysteine
  MOD_RES (1472)..(1472): Selenocysteine
  MOD_RES (1475)..(1476): Selenocysteine
  MOD_RES (1510)..(1511): Selenocysteine
  MOD_RES (1528)..(1528): Selenocysteine
  MOD_RES (1552)..(1552): Selenocysteine
  MOD_RES (1559)..(1559): Selenocysteine
  MOD_RES (1574)..(1574): Selenocysteine
  MOD_RES (1657)..(1657): Selenocysteine
  MOD_RES (1661)..(1661): Selenocysteine
  MOD_RES (1692)..(1692): Selenocysteine
  MOD_RES (1694)..(1694): Selenocysteine
  MOD_RES (1699)..(1699): Selenocysteine
  MOD_RES (1729)..(1729): Selenocysteine
  MOD_RES (1734)..(1734): Selenocysteine
  MOD_RES (1742)..(1742): Selenocysteine
  MOD_RES (1745)..(1745): Selenocysteine
  MOD_RES (1761)..(1762): Selenocysteine
  MOD_RES (1766)..(1766): Selenocysteine
  MOD_RES (1772)..(1772): Selenocysteine
  MOD_RES (1781)..(1781): Selenocysteine
  MOD_RES (1789)..(1789): Selenocysteine
  MOD_RES (1792)..(1792): Selenocysteine
  MOD_RES (1801)..(1801): Selenocysteine
  MOD_RES (1803)..(1803): Selenocysteine
  MOD_RES (1807)..(1807): Selenocysteine
  MOD_RES (1830)..(1830): Selenocysteine
  MOD_RES (1839)..(1840): Selenocysteine
  MOD_RES (1848)..(1848): Selenocysteine
  MOD_RES (1850)..(1850): Selenocysteine
  MOD_RES (1858)..(1858): Selenocysteine
  MOD_RES (1865)..(1865): Selenocysteine
  MOD_RES (1869)..(1869): Selenocysteine
  MOD_RES (1877)..(1877): Selenocysteine
  MOD_RES (1879)..(1879): Selenocysteine
  MOD_RES (1896)..(1897): Selenocysteine
  MOD_RES (1901)..(1901): Selenocysteine
  MOD_RES (1903)..(1903): Selenocysteine
  MOD_RES (1907)..(1909): Selenocysteine
  MOD_RES (1914)..(1914): Selenocysteine
  MOD_RES (1926)..(1926): Selenocysteine
  MOD_RES (1928)..(1928): Selenocysteine
  MOD_RES (1930)..(1930): Selenocysteine
  MOD_RES (1934)..(1934): Selenocysteine
  MOD_RES (1945)..(1945): Selenocysteine
  MOD_RES (1950)..(1951): Selenocysteine
  MOD_RES (1992)..(1992): Selenocysteine
  MOD_RES (2002)..(2002): Selenocysteine
  MOD_RES (2004)..(2004): Selenocysteine
  MOD_RES (2029)..(2029): Selenocysteine
  MOD_RES (2046)..(2046): Selenocysteine
  MOD_RES (2055)..(2055): Selenocysteine
  MOD_RES (2067)..(2067): Selenocysteine
  MOD_RES (2093)..(2093): Selenocysteine
  MOD_RES (2100)..(2100): Selenocysteine
  MOD_RES (2102)..(2102): Selenocysteine
  MOD_RES (2107)..(2108): Selenocysteine
  MOD_RES (2117)..(2117): Selenocysteine
  MOD_RES (2119)..(2120): Selenocysteine
  MOD_RES (2122)..(2122): Selenocysteine
  MOD_RES (2127)..(2127): Selenocysteine
  MOD_RES (2133)..(2133): Selenocysteine
  MOD_RES (2139)..(2139): Selenocysteine
  MOD_RES (2143)..(2143): Selenocysteine
  MOD_RES (2149)..(2149): Selenocysteine
  MOD_RES (2153)..(2155): Selenocysteine
  MOD_RES (2162)..(2162): Selenocysteine
  MOD_RES (2170)..(2170): Selenocysteine
  MOD_RES (2179)..(2179): Selenocysteine
  MOD_RES (2185)..(2185): Selenocysteine
  MOD_RES (2200)..(2200): Selenocysteine
  MOD_RES (2216)..(2216): Selenocysteine
  MOD_RES (2223)..(2223): Selenocysteine
  MOD_RES (2225)..(2225): Selenocysteine
  MOD_RES (2237)..(2237): Selenocysteine
  MOD_RES (2240)..(2240): Selenocysteine
  MOD_RES (2244)..(2244): Selenocysteine
  MOD_RES (2261)..(2261): Selenocysteine
  MOD_RES (2302)..(2302): Selenocysteine
  MOD_RES (2316)..(2316): Selenocysteine
  MOD_RES (2326)..(2326): Selenocysteine
  MOD_RES (2341)..(2342): Selenocysteine
  MOD_RES (2350)..(2350): Selenocysteine
  MOD_RES (2354)..(2354): Selenocysteine
  MOD_RES (2362)..(2364): Selenocysteine
  MOD_RES (2376)..(2376): Selenocysteine
  MOD_RES (2381)..(2381): Selenocysteine
  MOD_RES (2383)..(2383): Selenocysteine
  MOD_RES (2516)..(2516): Selenocysteine
  MOD_RES (2541)..(2541): Selenocysteine
  MOD_RES (2579)..(2579): Selenocysteine
  MOD_RES (2612)..(2612): Selenocysteine
  MOD_RES (2640)..(2640): Selenocysteine
  MOD_RES (2648)..(2648): Selenocysteine
  MOD_RES (2667)..(2667): Selenocysteine
  MOD_RES (2670)..(2670): Selenocysteine
  MOD_RES (2672)..(2672): Selenocysteine
  MOD_RES (2676)..(2676): Selenocysteine
  MOD_RES (2690)..(2690): Selenocysteine
  MOD_RES (2696)..(2696): Selenocysteine
  MOD_RES (2698)..(2698): Selenocysteine
  MOD_RES (2747)..(2747): Selenocysteine
  MOD_RES (2762)..(2762): Selenocysteine
  MOD_RES (2768)..(2768): Selenocysteine
  MOD_RES (2782)..(2782): Selenocysteine
  MOD_RES (2791)..(2791): Selenocysteine
  MOD_RES (2807)..(2807): Selenocysteine
  MOD_RES (2832)..(2833): Selenocysteine
MSGGAAEKQSSXPGSLFLSPPAPAPKNGSSSDSSVGEKLGAAAADAVXGRXEEYRRRRHXMDKDSRGAAAXXXXXEHRFFRRSVICDSNAXALELPGLPLSLPQPSIPAAVPQSAPPEPHREEXVXAXAXSQVAQQPPAAAAPGEQAVAGPAPSXVPSSXSKDRPVSQPSLVGSKEEPPPARSGSGGGSAKEPQEERSQQQDDIEELEXKAVGMSNDGRFLKFDIEIGRGSFKXVYKGLDXEXXVEVAWCELQDRKLXKSERQRFKEEAEMLKGLQHPNIVRFYDSWESXVKGKKCIVLVXELMXSGXLKXYLKRFKVMKIKVLRSWCRQILKGLQFLHXRXPPIIHRDLKCDNIFIXGPXGSVKIGDLGLAXLKRASFAKSVIGXPEFMAPEMYEEKYDESVDVYAFGMCMLEMAXSEYPYSECQNAAQIYRRVXSGVKPASFDKVAIPEVKEIIEGCIRQNKDERYSIKDLLNHAFFQEEXGVRVELAEEDDGEKIAIKLWLRIEDIKKLKGKYKDNEAIEFSFDLERDVPEDVAQEMVESGYVCEGDHKXMAKAIKDRVSLIKRKREQRQLVREEQEKKKQEESSLKQQVEQSSASQXGIKQLPSASXGIPXASXXSASVSXQVEPEEPEADQHQQLQYQQPSISVLSDGXVDSGQGSSVFXESRVSSQQXVSYGSQHEQAHSXGXVPGHIPSXVQAQSQPHGVYPPSSVPQSMAHPCGGXPXYPESQIFFPXIHERPVSFSPPPXCPPKVAISQRRKSXSFLEAQXHHFQPLLRXVGQSLLPPGGSPXNWXPEAVVMLGXXASRVXGESCEIQVHPMFEPSQVYSDYRPGLVLPEEAHYFIPQEAVYVAGVHYQARVAEQYEGIPYNSSVLSSPMKQIPEQKPVQGGPXSSSVFEFPSGQAFLVGHLQNLRLDSGLGPGSPLSSISAPISXDAXRLKFHPVFVPHSAPAVLXHNNESRSNCVFEFHVHXPSSSSGEGGGILPQRVYRNRQVAVDLNQEELPPQSVGLHGYLQPVXEEKHNYHAPELXVSVVEPIGQNWPIGSPEYSSDSSQIXSSDPSDFQSPPPXGGAAAPFGSDVSMPFIHLPQXVLQESPLFFCFPQGXXSQQVLXASFSSGGSALHPQAQGQSQGQPSSSSLXGVSSSQPIQHPQQQQGIQQXAPPQQXVQYSLSQXSXSSEAXXAQPVSQPQAPQVLPQVSAGKQLPVSQPVPXIQGEPQIPVAXQPSVVPVHSGAHFLPVGQPLPXPLLPQYPVSQIPISXPHVSXAQXGFSSLPIXMAAGIXQPLLXLASSAXXAAIPGVSXVVPSQLPXLLQPVXQLPSQVHPQLLQPAVQSMGIPANLGQAAEVPLSSGDVLYQGFPPRLPPQYPGDSNIAPSSNVASVCIHSXVLSPPMPXEVLAXPGYFPXVVQPYVESNLLVPMGGVGGQVQVSQPGGSLAQAPXXSSQQAVLESXQGVSQVAPAEPVAVAQXQAXQPXXLASSVDSAHSDVASGMSDGNENVPSSSGRHEGRXXKRHYRKSVRSRSRHEKXSRPKLRILNVSNKGDRVVECQLEXHNRKMVXFKFDLDGDNPEEIAXIMVNNDFILAIERESFVDQVREIIEKADEMLSEDVSVEPEGDQGLESLQGKDDYGFSGSQKLEGEFKQPIPASSMPQQIGIPXSSLXQVVHSAGRRFIVSPVPESRLRESKVFPSEIXDXVAASXAQSPGMNLSHSASSLSLQQAFSELRRAQMXEGPNXAPPNFSHXGPXFPVVPPFLSSIAGVPXXAAAXAPVPAXSSPPNDISXSVIQSEVXVPXEEGIAGVAXSXGVVXSGGLPIPPVSESPVLSSVVSSIXIPAVVSISXXSPSLQVPXSXSEIVVSSXALYPSVXVSAXSASAGGSXAXPGPKPPAVVSQQAAGSXXVGAXLXSVSXXXSFPSXASQLCIQLSSSXSXPXLAEXVVVSAHSLDKXSHSSXXGLAFSLSAPSSSSSPGAGVSSYISQPGGLHPLVIPSVIASXPILPQAAGPXSXPLLPQVPSIPPLVQPVANVPAVQQXLIHSQPQPALLPNQPHXHCPEVDSDXQPKAPGIDDIKXLEEKLRSLFSEHSSSGAQHASVSLEXSLVIESXVXPGIPXXAVAPSKLLXSXXSXCLPPXNLPLGXVALPVXPVVXPGQVSXPVSXXXSGVKPGXAPSKPPLXKAPVLPVGXELPAGXLPSEQLPPFPGPSLXQSQQPLEDLDAQLRRXLSPEMIXVXSAVGPVSMAAPXAIXEAGXQPQKGVSQVKEGPVLAXSSGAGVFKMGRFQVSVAADGAQKEGKNKSEDAKSVHFESSXSESSVLSSSSPESXLVKPEPNGIXIPGISSDVPESAHKXXASEAKSDXGQPXKVGRFQVXXXANKVGRFSVSKXEDKIXDXKKEGPVASPPFMDLEQAVLPAVIPKKEKPELSEPSHLNGPSSDPEAAFLSRDVDDGSGSPHSPHQLSSKSLPSQNLSQSLSNSFNSSYMSSDNESDIEDEDLKLELRRLRDKHLKEIQDLQSRQKHEIESLYXKLGKVPPAVIIPPAAPLSGRRRRPXKSKGSKSSRSSSLGNKSPQLSGNLSGQSAASVLHPQQXLHPPGNIPESGQNQLLQPLKPSPSSDNLYSAFXSDGAISVPSLSAPGQGCAKFNCASEQVXFKPGGRRXRFLRKMVKKVCPCNQLCRXSSXNXVGAXVNSQAAQAQPPAMXSSRKGXFXDDLHKLVDNWARDAMNLSGRRGSKGHMNYEGPGMARKFSAPGQLCISMXSNLGGSAPISAASAXSLGHFXKSMCPPQQYGFPAXPFGAQWSGXGGPAPQPLGQFQPVGXASLQNFNISNLQKSISNPPGSNLRXX

SEQ ID NO: 29650 - protein, 434 aa, Homo sapiens
  MOD_RES (23)..(23): Selenocysteine
  MOD_RES (25)..(25): Selenocysteine
  MOD_RES (35)..(35): Selenocysteine
  MOD_RES (48)..(48): Selenocysteine
  MOD_RES (62)..(62): Selenocysteine
  MOD_RES (69)..(69): Selenocysteine
  MOD_RES (78)..(78): Selenocysteine
  MOD_RES (91)..(91): Selenocysteine
  MOD_RES (94)..(94): Selenocysteine
  MOD_RES (103)..(104): Selenocysteine
  MOD_RES (109)..(109): Selenocysteine
  MOD_RES (192)..(192): Selenocysteine
  MOD_RES (234)..(234): Selenocysteine
  MOD_RES (237)..(237): Selenocysteine
  MOD_RES (255)..(255): Selenocysteine
  MOD_RES (272)..(272): Selenocysteine
  MOD_RES (318)..(318): Selenocysteine
  MOD_RES (330)..(330): Selenocysteine
  MOD_RES (356)..(356): Selenocysteine
  MOD_RES (369)..(369): Selenocysteine
  MOD_RES (390)..(390): Selenocysteine
  MOD_RES (405)..(406): Selenocysteine
  MOD_RES (412)..(412): Selenocysteine
MYELLVLFMLIQPQSMAHPCGGXPXYPESQIFFPXIHERPVSFSPPPXCPPKVAISQRRKSXSFLEAQXHHFQPLLRXVGQSLLPPGGSPXNWXPEAVVMLGXXASRVXGESCEIQVHPMFEPSQVYSDYRPGLVLPEEAHYFIPQEAVYVAGVHYQARVAEQYEGIPYNSSVLSSPMKQIPEQKPVQGGPXSSSVFEFPSGQAFLVGHLQNLRLDSGLGPGSPLSSISAPISXDAXRLKFHPVFVPHSAPAVLXHNNESRSNCVFEFHVHXPSSSSGEGGGILPQRVYRNRQVAVDLNQEELPPQSVGLHGYLQPVXEEKHNYHAPELXVSVVEPIGQNWPIGSPEYSSDSSQIXSSDPSDFQSPPPXGGAAAPFGSDVSMPFIHLPQXVLQESPLFFCFPQGXXSQQVLXASFSSGGSALHPQVIGKLPQLF

SEQ ID NO: 29651 - protein, 240 aa, Homo sapiens
  MOD_RES (9)..(9): Selenocysteine
  MOD_RES (26)..(26): Selenocysteine
  MOD_RES (72)..(72): Selenocysteine
  MOD_RES (84)..(84): Selenocysteine
  MOD_RES (110)..(110): Selenocysteine
  MOD_RES (123)..(123): Selenocysteine
  MOD_RES (144)..(144): Selenocysteine
  MOD_RES (159)..(160): Selenocysteine
  MOD_RES (166)..(166): Selenocysteine
  MOD_RES (194)..(194): Selenocysteine
  MOD_RES (214)..(214): Selenocysteine
  MOD_RES (220)..(220): Selenocysteine
  MOD_RES (228)..(228): Selenocysteine
  MOD_RES (230)..(230): Selenocysteine
  MOD_RES (235)..(236): Selenocysteine
PHSAPAVLXHNNESRSNCVFEFHVHXPSSSSGEGGGILPQRVYRNRQVAVDLNQEELPPQSVGLHGYLQPVXEEKHNYHAPELXVSVVEPIGQNWPIGSPEYSSDSSQIXSSDPSDFQSPPPXGGAAAPFGSDVSMPFIHLPQXVLQESPLFFCFPQGXXSQQVLXASFSSGGSALHPQAQGQSQGQPSSSSLXGVSSSQPIQHPQQQQGIQQXAPPQQXVQYSLSQXSXSSEAXXAQPV

SEQ ID NO: 29652 - protein, 67 aa, Homo sapiens
  MOD_RES (9)..(9): Selenocysteine
  MOD_RES (37)..(37): Selenocysteine
  MOD_RES (45)..(45): Selenocysteine
  MOD_RES (50)..(50): Selenocysteine
SDNLYSAFXSDGAISVPSLSAPGQGCAKFNCASEQVXFKPGGRRXRFLSXPCLALWKMVKKVCPCNQ

SEQ ID NO: 29653 - protein, 245 aa, Homo sapiens
  MOD_RES (18)..(18): Selenocysteine
  MOD_RES (24)..(24): Selenocysteine
  MOD_RES (32)..(32): Selenocysteine
  MOD_RES (34)..(34): Selenocysteine
  MOD_RES (39)..(40): Selenocysteine
  MOD_RES (70)..(70): Selenocysteine
  MOD_RES (81)..(81): Selenocysteine
  MOD_RES (103)..(103): Selenocysteine
  MOD_RES (118)..(118): Selenocysteine
  MOD_RES (123)..(123): Selenocysteine
  MOD_RES (126)..(126): Selenocysteine
  MOD_RES (134)..(134): Selenocysteine
  MOD_RES (140)..(140): Selenocysteine
  MOD_RES (145)..(145): Selenocysteine
  MOD_RES (151)..(152): Selenocysteine
  MOD_RES (160)..(160): Selenocysteine
  MOD_RES (168)..(168): Selenocysteine
  MOD_RES (174)..(174): Selenocysteine
  MOD_RES (244)..(244): Selenocysteine
SQPHGVYPPSSVQGIQQXAPPQQXVQYSLSQXSXSSEAXXAQPVSQPQAPQVLPQVSAGKQLPVSQPVPXIQGEPQIPVAXQPSVVPVHSGAHFLPVGQPLPXPLLPQYPVSQIPISXPHVSXAQXGFSSLPIXMAAGIXQPLLXLASSAXXAAIPGVSXVVPSQLPXLLQPVXQLPSQVHPQLLQPAVQSMGIPANLGQAAEVPLSSGDVLYQGFPPRLPPQYPGDSNIAPSSNVASVCIHSXV

SEQ ID NO: 29654 - protein, 195 aa, Homo sapiens
  MOD_RES (1)..(2): Selenocysteine
  MOD_RES (36)..(37): Selenocysteine
  MOD_RES (54)..(54): Selenocysteine
  MOD_RES (144)..(144): Selenocysteine
  MOD_RES (148)..(148): Selenocysteine
  MOD_RES (179)..(179): Selenocysteine
  MOD_RES (181)..(181): Selenocysteine
  MOD_RES (186)..(186): Selenocysteine
XXLASSVDSAHSDVASGMSDGNENVPSSSGRHEGRXXKRHYRKSVRSRSRHEKXSRPKLRILNVNNDFILAIERESFVDQVREIIEKADEMLSEDVSVEPEGDQGLESLQGKDDYGFSGSQKLEGEFKQPIPASSMPQQIGIPXSSLXQVVHSAGRRFIVSPVPESRLRESKVFPSEIXDXVAASXAQSPGMNLS

SEQ ID NO: 29655 - protein, 218 aa, Homo sapiens
  MOD_RES (1)..(1): Any amino acid
  MOD_RES (5)..(5): Selenocysteine
  MOD_RES (16)..(16): Selenocysteine
  MOD_RES (25)..(25): Selenocysteine
  MOD_RES (38)..(38): Selenocysteine
  MOD_RES (40)..(40): Selenocysteine
  MOD_RES (48)..(48): Selenocysteine
  MOD_RES (71)..(71): Selenocysteine
  MOD_RES (77)..(77): Selenocysteine
  MOD_RES (85)..(85): Selenocysteine
  MOD_RES (87)..(87): Selenocysteine
  MOD_RES (92)..(93): Selenocysteine
  MOD_RES (116)..(116): Selenocysteine
  MOD_RES (133)..(133): Selenocysteine
  MOD_RES (136)..(136): Selenocysteine
  MOD_RES (139)..(140): Selenocysteine
  MOD_RES (174)..(175): Selenocysteine
  MOD_RES (192)..(192): Selenocysteine
  MOD_RES (216)..(216): Selenocysteine
XADGXVDSGQGSSVFXESRVSSQQXVSYGSQHEQAHSXGXVPGHIPSXVQAQSQPHGVYPPSSVQQGIQQXAPPQQXVQYSLSQXSXSSEAXXAQPVSQPQAPQVLPQVSAGKQSXQGVSQVAPAEPVAVAQXQAXQPXXLASSVDSAHSDVASGMSDGNENVPSSSGRHEGRXXKRHYRKSVRSRSRHEKXSRPKLRILNVSNKGDRVVECQLEXHN

SEQ ID NO: 29656 - protein, 177 aa, Homo sapiens
  MOD_RES (1)..(1): Any amino acid
  MOD_RES (7)..(7): Selenocysteine
  MOD_RES (9)..(9): Selenocysteine
  MOD_RES (17)..(17): Selenocysteine
  MOD_RES (48)..(48): Selenocysteine
  MOD_RES (68)..(68): Selenocysteine
  MOD_RES (74)..(74): Selenocysteine
  MOD_RES (82)..(82): Selenocysteine
  MOD_RES (84)..(84): Selenocysteine
  MOD_RES (89)..(90): Selenocysteine
  MOD_RES (141)..(141): Selenocysteine
  MOD_RES (149)..(149): Selenocysteine
  MOD_RES (154)..(154): Selenocysteine
  MOD_RES (160)..(160): Selenocysteine
XEQAHSXGXVPGHIPSXVQAQSQPHGVYPPSSVAQGQSQGQPSSSSLXGVSSSQPIQHPQQQQGIQQXAPPQQXVQYSLSQXSXSSEAXXAQPVSQPQAPQVLPQVSAGKQGFPPRLPPQYPGDSNIAPSSNVASVCIHSXVLSPPMPXEVLAXPGYFPXVVQPYVESNLLVPMGGV

SEQ ID NO: 29657 - protein, 76 aa, Homo sapiens
  MOD_RES (1)..(1): Any amino acid
  MOD_RES (10)..(10): Selenocysteine
  MOD_RES (41)..(41): Selenocysteine
  MOD_RES (44)..(44): Selenocysteine
  MOD_RES (46)..(46): Selenocysteine
  MOD_RES (50)..(50): Selenocysteine
  MOD_RES (64)..(64): Selenocysteine
  MOD_RES (70)..(70): Selenocysteine
  MOD_RES (72)..(72): Selenocysteine
XSDNLYSAFXSDGAISVPSLSAPGQGKMVKKVCPCNQLCRXSSXNXVGAXVNSQAAQAQPPAMXSSRKGXFXDDLH

SEQ ID NO: 29658 - protein, 790 aa, Homo sapiens
  MOD_RES (13)..(13): Selenocysteine
  MOD_RES (81)..(81): Selenocysteine
  MOD_RES (121)..(121): Selenocysteine
  MOD_RES (135)..(135): Selenocysteine
  MOD_RES (150)..(150): Selenocysteine
  MOD_RES (168)..(168): Selenocysteine
  MOD_RES (188)..(188): Selenocysteine
  MOD_RES (208)..(208): Selenocysteine
  MOD_RES (215)..(215): Selenocysteine
  MOD_RES (217)..(217): Selenocysteine
  MOD_RES (232)..(232): Selenocysteine
  MOD_RES (275)..(275): Selenocysteine
  MOD_RES (279)..(279): Selenocysteine
  MOD_RES (282)..(282): Selenocysteine
  MOD_RES (285)..(285): Selenocysteine
  MOD_RES (314)..(314): Selenocysteine
  MOD_RES (316)..(316): Selenocysteine
  MOD_RES (332)..(332): Selenocysteine
  MOD_RES (335)..(335): Selenocysteine
  MOD_RES (347)..(347): Selenocysteine
  MOD_RES (360)..(360): Selenocysteine
  MOD_RES (391)..(391): Selenocysteine
  MOD_RES (410)..(410): Selenocysteine
  MOD_RES (457)..(457): Selenocysteine
  MOD_RES (473)..(473): Selenocysteine
  MOD_RES (499)..(499): Selenocysteine
  MOD_RES (506)..(506): Selenocysteine
  MOD_RES (576)..(576): Selenocysteine
  MOD_RES (602)..(602): Selenocysteine
  MOD_RES (605)..(605): Selenocysteine
  MOD_RES (608)..(608): Selenocysteine
  MOD_RES (615)..(615): Selenocysteine
  MOD_RES (623)..(623): Selenocysteine
  MOD_RES (676)..(676): Selenocysteine
  MOD_RES (686)..(686): Selenocysteine
  MOD_RES (753)..(753): Selenocysteine
  MOD_RES (770)..(770): Selenocysteine
  MOD_RES (772)..(772): Selenocysteine
MDGDGGRRDVPGXLMEPGRGAGPAGMAEPRAKAARPGPQRFLRRSVVESDQEEPPGLEAAEAPGPQPPQPLQRRVLLLCKXRRLIAERARGRPAAPAPAALVAQPGAPGAPADAGPEPVGXQEPGPDPIAAAVEXAPAPDGGPREEAAAXVRKEDEGAAEAKPEPGRXRRDEPEEEEDDEDDLKAVAXSLDGRFLKFDIELGRGSFKXVYKGLDXEXWVEVAWCELQDRKLXKLERQRFKEEAEMLKGLQHPNIVRFYDFWESSAKGKRCIVLVXELMXSGXLKXYLKRFKVMKPKVLRSWCRQILKGLLFLHXRXPPIIHRDLKCDNIFIXGPXGSVKIGDLGLAXLKRASFAKSVIGXPEFMAPEMYEEHYDESVDVYAFGMCMLEMAXSEYPYSECQNAAQIYRKVXCGIKPASFEKVHDPEIKEIIGECICKNKEERYEIKDLLSHAFFAEDXGVRVELAEEDHGRKSXIALRLWVEDPKKLKGKPKDNGAIEFXFDLEKEXPDEVAQEMIESGFFHESDVKIVAKSIRDRVALIQWRRERIWPALQPKEQQDVGSPDKARGPPVPLQVQVXYHAQAGQPGPPEPEEPEADQHLLPPXLPXSAXSLASDSXFDSGQGSXVYSDSQSSQQSVMLGSLADAAPSPAQCVCSPPVSEGPVLPQSLPSLGAYQQPXAAPPPLAQPXPLPQVLAPQPVVPLQPVPPHLPPYLAPASQVGAPAQLKPLQMPQAPLQPLAQVPPQMPPIPVVPPIXPLAGIDGLPPALPDLPXAXVPPVPPPQYFSPAVILPS

SEQ ID NO: 29659 - protein, 2217 aa, Homo sapiens
  MOD_RES (13)..(13): Selenocysteine
  MOD_RES (81)..(81): Selenocysteine
  MOD_RES (121)..(121): Selenocysteine
  MOD_RES (135)..(135): Selenocysteine
  MOD_RES (150)..(150): Selenocysteine
  MOD_RES (168)..(168): Selenocysteine
  MOD_RES (188)..(188): Selenocysteine
  MOD_RES (208)..(208): Selenocysteine
  MOD_RES (215)..(215): Selenocysteine
  MOD_RES (217)..(217): Selenocysteine
  MOD_RES (232)..(232): Selenocysteine
  MOD_RES (275)..(275): Selenocysteine
  MOD_RES (279)..(279): Selenocysteine
  MOD_RES (282)..(282): Selenocysteine
  MOD_RES (285)..(285): Selenocysteine
  MOD_RES (314)..(314): Selenocysteine
  MOD_RES (316)..(316): Selenocysteine
  MOD_RES (332)..(332): Selenocysteine
  MOD_RES (335)..(335): Selenocysteine
  MOD_RES (347)..(347): Selenocysteine
  MOD_RES (360)..(360): Selenocysteine
  MOD_RES (391)..(391): Selenocysteine
  MOD_RES (410)..(410): Selenocysteine
  MOD_RES (457)..(457): Selenocysteine
  MOD_RES (473)..(473): Selenocysteine
  MOD_RES (499)..(499): Selenocysteine
  MOD_RES (506)..(506): Selenocysteine
  MOD_RES (576)..(576): Selenocysteine
  MOD_RES (602)..(602): Selenocysteine
  MOD_RES (605)..(605): Selenocysteine
  MOD_RES (608)..(608): Selenocysteine
  MOD_RES (615)..(615): Selenocysteine
  MOD_RES (623)..(623): Selenocysteine
  MOD_RES (676)..(676): Selenocysteine
  MOD_RES (715)..(715): Selenocysteine
  MOD_RES (719)..(719): Selenocysteine
  MOD_RES (738)..(738): Selenocysteine
  MOD_RES (805)..(805): Selenocysteine
  MOD_RES (822)..(822): Selenocysteine
  MOD_RES (824)..(824): Selenocysteine
  MOD_RES (875)..(875): Selenocysteine
  MOD_RES (883)..(883): Selenocysteine
  MOD_RES (922)..(922): Selenocysteine
  MOD_RES (931)..(931): Selenocysteine
  MOD_RES (938)..(938): Selenocysteine
  MOD_RES (949)..(949): Selenocysteine
  MOD_RES (961)..(961): Selenocysteine
  MOD_RES (973)..(973): Selenocysteine
  MOD_RES (1018)..(1018): Selenocysteine
  MOD_RES (1041)..(1041): Selenocysteine
  MOD_RES (1075)..(1075): Selenocysteine
  MOD_RES (1085)..(1085): Selenocysteine
  MOD_RES (1087)..(1087): Selenocysteine
  MOD_RES (1089)..(1089): Selenocysteine
  MOD_RES (1110)..(1110): Selenocysteine
  MOD_RES (1114)..(1114): Selenocysteine
  MOD_RES (1144)..(1144): Selenocysteine
  MOD_RES (1175)..(1175): Selenocysteine
  MOD_RES (1190)..(1190): Selenocysteine
  MOD_RES (1197)..(1197): Selenocysteine
  MOD_RES (1208)..(1208): Selenocysteine
  MOD_RES (1215)..(1215): Selenocysteine
  MOD_RES (1230)..(1230): Selenocysteine
  MOD_RES (1245)..(1245): Selenocysteine
  MOD_RES (1265)..(1265): Selenocysteine
  MOD_RES (1275)..(1275): Selenocysteine
  MOD_RES (1282)..(1282): Selenocysteine
  MOD_RES (1287)..(1287): Selenocysteine
  MOD_RES (1308)..(1308): Selenocysteine
  MOD_RES (1392)..(1392): Selenocysteine
  MOD_RES (1403)..(1403): Selenocysteine
  MOD_RES (1405)..(1405): Selenocysteine
  MOD_RES (1413)..(1413): Selenocysteine
  MOD_RES (1422)..(1422): Selenocysteine
  MOD_RES (1427)..(1427): Selenocysteine
  MOD_RES (1432)..(1432): Selenocysteine
  MOD_RES (1439)..(1439): Selenocysteine
  MOD_RES (1457)..(1457): Selenocysteine
  MOD_RES (1465)..(1465): Selenocysteine
  MOD_RES (1488)..(1488): Selenocysteine
  MOD_RES (1511)..(1511): Selenocysteine
  MOD_RES (1522)..(1522): Selenocysteine
  MOD_RES (1548)..(1548): Selenocysteine
  MOD_RES (1558)..(1558): Selenocysteine
  MOD_RES (1567)..(1567): Selenocysteine
  MOD_RES (1574)..(1574): Selenocysteine
  MOD_RES (1584)..(1584): Selenocysteine
  MOD_RES (1631)..(1631): Selenocysteine
  MOD_RES (1640)..(1640): Selenocysteine
  MOD_RES (1645)..(1645): Selenocysteine
  MOD_RES (1689)..(1689): Selenocysteine
  MOD_RES (1710)..(1710): Selenocysteine
  MOD_RES (1720)..(1720): Selenocysteine
  MOD_RES (1744)..(1744): Selenocysteine
  MOD_RES (1753)..(1753): Selenocysteine
  MOD_RES (1758)..(1758): Selenocysteine
  MOD_RES (1793)..(1793): Selenocysteine
  MOD_RES (1841)..(1841): Selenocysteine
  MOD_RES (1857)..(1857): Selenocysteine
  MOD_RES (1867)..(1867): Selenocysteine
  MOD_RES (1871)..(1871): Selenocysteine
  MOD_RES (1939)..(1939): Selenocysteine
  MOD_RES (1943)..(1943): Selenocysteine
  MOD_RES (1949)..(1949): Selenocysteine
  MOD_RES (1974)..(1974): Selenocysteine
  MOD_RES (1997)..(1997): Selenocysteine
  MOD_RES (2001)..(2001): Selenocysteine
  MOD_RES (2010)..(2010): Selenocysteine
  MOD_RES (2041)..(2041): Selenocysteine
  MOD_RES (2046)..(2046): Selenocysteine
  MOD_RES (2051)..(2051): Selenocysteine
  MOD_RES (2090)..(2090): Selenocysteine
  MOD_RES (2120)..(2120): Selenocysteine
  MOD_RES (2122)..(2122): Selenocysteine
  MOD_RES (2133)..(2133): Selenocysteine
  MOD_RES (2136)..(2136): Selenocysteine
  MOD_RES (2145)..(2145): Selenocysteine
  MOD_RES (2152)..(2152): Selenocysteine
  MOD_RES (2174)..(2174): Selenocysteine
  MOD_RES (2194)..(2195): Selenocysteine
  MOD_RES (2203)..(2203): Selenocysteine
  MOD_RES (2208)..(2208): Selenocysteine
MDGDGGRRDVPGXLMEPGRGAGPAGMAEPRAKAARPGPQRFLRRSVVESDQEEPPGLEAAEAPGPQPPQPLQRRVLLLCKXRRLIAERARGRPAAPAPAALVAQPGAPGAPADAGPEPVGXQEPGPDPIAAAVEXAPAPDGGPREEAAAXVRKEDEGAAEAKPEPGRXRRDEPEEEEDDEDDLKAVAXSLDGRFLKFDIELGRGSFKXVYKGLDXEXWVEVAWCELQDRKLXKLERQRFKEEAEMLKGLQHPNIVRFYDFWESSAKGKRCIVLVXELMXSGXLKXYLKRFKVMKPKVLRSWCRQILKGLLFLHXRXPPIIHRDLKCDNIFIXGPXGSVKIGDLGLAXLKRASFAKSVIGXPEFMAPEMYEEHYDESVDVYAFGMCMLEMAXSEYPYSECQNAAQIYRKVXCGIKPASFEKVHDPEIKEIIGECICKNKEERYEIKDLLSHAFFAEDXGVRVELAEEDHGRKSXIALRLWVEDPKKLKGKPKDNGAIEFXFDLEKEXPDEVAQEMIESGFFHESDVKIVAKSIRDRVALIQWRRERIWPALQPKEQQDVGSPDKARGPPVPLQVQVXYHAQAGQPGPPEPEEPEADQHLLPPXLPXSAXSLASDSXFDSGQGSXVYSDSQSSQQSVMLGSLADAAPSPAQCVCSPPVSEGPVLPQSLPSLGAYQQPXAAPGLPVGSVPAPACPPSLQQHFPDPAMSFAPVLPPPSXPMPXGPGQPAPPGQQPPPLAQPXPLPQVLAPQPVVPLQPVPPHLPPYLAPASQVGAPAQLKPLQMPQAPLQPLAQVPPQMPPIPVVPPIXPLAGIDGLPPALPDLPXAXVPPVPPPQYFSPAVILPSLAAPLPPASPALPLQAVKLPHPPGAPLAMPCRXIVPNAPAXIPLLAVAPPGVAALSIHSAVAQLPGQPVYPAAFPQMAPXDVPPSPHHXVQNMRAXPPQPALPPQPXLPPQPVLPPQPXLPPQPVLPPQPXRPPQPVLPPQPMLPPQPVLPPQPALPVRPEPLQPHLPEQAAPAAXPGSQILLGHPAPYAVDVAAQVPXVPVPPAAVLSPPLPEVLLPAAPELLPQFPSSLAXVSASVQSVPXQXAXLLPPANPPLPGGPGIASPCPXVQLXVEPVQEEQASQDKPPGLPQSCESYGGSDVXSGKELSDSCEGAFGGGRLEGRAARKHHRRSXRARSRQERASRPRLXILNVCNXGDKMVECQLEXHNHKMVXFKFDLDGDAPDEIAXYMVEHDFILQAEREXFIEQMKDVMDKAEDMLSEDXDADRGSDPGXSPPHLSXCGLGXGEESRQSQANAPVYQQNVLHXGKRWFIICPVAEHPAPEAPESSPPLPLSSLPPEASQDSAPYKDQLSSKEQPSFLASQQLLSQAGPSNPPGAPPAPLAPSSPPVXALPQDGAAPAXSXMPEPASGXASQAGGPGXPQGLXSELEXSQPLAEXHEAPLAVQPLVVGLAPCXPAPEAASXRDASAPREPLPPPAPEPSPHSGXPQPALGQPAPLLPAAVGAVSLAXSQLPSPPLGPXVPPQPPSALESDGEGPPPRVGFVDSXIKSLDEKLRXLLYQEHVPXSSASAGXPVEVGDRDFXLEPLRGDQPRSEVCGGDLALPPVPKEAVSGRVQLPQPLVEKSELAPXRGAVMEQGXSSSMXAESSPRSMLGYDRDGRQVASDSHVVPSVPQDVPAFVRPARVEPXDRDGGEAGESSAEPPPSDMGXVGGQASHPQXLGARALGSPRKRPEQQDVSSPAKXVGRFSVVSXQDEWXLASPHSLRYSAPPDVYLDEAPSSPDVKLAVRRAQXASSIEVGVGEPVSSDSGDEGPRARPPVQKQASLPVSGSVAGDFVKKAXAFLQRPSRAGSLGPEXPSRVGMKVPXISVXSFHSQSSYISSDNDSELEDADIKKELQSLREKHLKEISELQSQQKQEIEALYRRLGKPLPPNVGFFHXAPPXGRRRKXSKSKLKAGKLLNPLVRQLKVVASSXGHLADSSRGPPAKDPAQASVGLXADSXGLSGKAVQXQQPCSVRASLSSDICSGLASDGGGARGQGWXVYHPXSERVXYKSSSKPRARFLSGPVSVSIWSALKRLCLGKEHSSRSSXSSLAPGPEPGPQPALHVQAQVNNSNNKKGXFXDDLHKLVDEWXSKXVGAAQLKPXLNQLKQXQKLQDMEAQAGWAAPGEARAMXAPRAGVGMPRLPPAPGPLSXXVIPGAAPXLSVPXPDPESEKPD

SEQ ID NO: 29660 - protein, 2297 aa, Homo sapiens
  MOD_RES (13)..(13): Selenocysteine
  MOD_RES (81)..(81): Selenocysteine
  MOD_RES (121)..(121): Selenocysteine
  MOD_RES (135)..(135): Selenocysteine
  MOD_RES (150)..(150): Selenocysteine
  MOD_RES (168)..(168): Selenocysteine
  MOD_RES (188)..(188): Selenocysteine
  MOD_RES (208)..(208): Selenocysteine
  MOD_RES (215)..(215): Selenocysteine
  MOD_RES (217)..(217): Selenocysteine
  MOD_RES (232)..(232): Selenocysteine
  MOD_RES (275)..(275): Selenocysteine
  MOD_RES (279)..(279): Selenocysteine
  MOD_RES (282)..(282): Selenocysteine
  MOD_RES (285)..(285): Selenocysteine
  MOD_RES (314)..(314): Selenocysteine
  MOD_RES (316)..(316): Selenocysteine
  MOD_RES (332)..(332): Selenocysteine
  MOD_RES (335)..(335): Selenocysteine
  MOD_RES (347)..(347): Selenocysteine
  MOD_RES (360)..(360): Selenocysteine
  MOD_RES (391)..(391): Selenocysteine
  MOD_RES (410)..(410): Selenocysteine
  MOD_RES (457)..(457): Selenocysteine
  MOD_RES (473)..(473): Selenocysteine
  MOD_RES (499)..(499): Selenocysteine
  MOD_RES (506)..(506): Selenocysteine
  MOD_RES (576)..(576): Selenocysteine
  MOD_RES (602)..(602): Selenocysteine
  MOD_RES (605)..(605): Selenocysteine
  MOD_RES (608)..(608): Selenocysteine
  MOD_RES (615)..(615): Selenocysteine
  MOD_RES (623)..(623): Selenocysteine
  MOD_RES (676)..(676): Selenocysteine
  MOD_RES (715)..(715): Selenocysteine
  MOD_RES (719)..(719): Selenocysteine
  MOD_RES (738)..(738): Selenocysteine
  MOD_RES (805)..(805): Selenocysteine
  MOD_RES (822)..(822): Selenocysteine
  MOD_RES (824)..(824): Selenocysteine
  MOD_RES (875)..(875): Selenocysteine
  MOD_RES (883)..(883): Selenocysteine
  MOD_RES (922)..(922): Selenocysteine
  MOD_RES (931)..(931): Selenocysteine
  MOD_RES (938)..(938): Selenocysteine
  MOD_RES (949)..(949): Selenocysteine
  MOD_RES (961)..(961): Selenocysteine
  MOD_RES (973)..(973): Selenocysteine
  MOD_RES (1018)..(1018): Selenocysteine
  MOD_RES (1041)..(1041): Selenocysteine
  MOD_RES (1075)..(1075): Selenocysteine
  MOD_RES (1085)..(1085): Selenocysteine
  MOD_RES (1087)..(1087): Selenocysteine
  MOD_RES (1089)..(1089): Selenocysteine
  MOD_RES (1110)..(1110): Selenocysteine
  MOD_RES (1114)..(1114): Selenocysteine
  MOD_RES (1144)..(1144): Selenocysteine
  MOD_RES (1175)..(1175): Selenocysteine
  MOD_RES (1190)..(1190): Selenocysteine
  MOD_RES (1197)..(1197): Selenocysteine
  MOD_RES (1208)..(1208): Selenocysteine
  MOD_RES (1215)..(1215): Selenocysteine
  MOD_RES (1230)..(1230): Selenocysteine
  MOD_RES (1245)..(1245): Selenocysteine
  MOD_RES (1265)..(1265): Selenocysteine
  MOD_RES (1275)..(1275): Selenocysteine
  MOD_RES (1282)..(1282): Selenocysteine
  MOD_RES (1287)..(1287): Selenocysteine
  MOD_RES (1308)..(1308): Selenocysteine
  MOD_RES (1351)..(1351): Selenocysteine
  MOD_RES (1429)..(1429): Selenocysteine
  MOD_RES (1440)..(1440): Selenocysteine
  MOD_RES (1442)..(1442): Selenocysteine
  MOD_RES (1450)..(1450): Selenocysteine
  MOD_RES (1459)..(1459): Selenocysteine
  MOD_RES (1464)..(1464): Selenocysteine
  MOD_RES (1469)..(1469): Selenocysteine
  MOD_RES (1476)..(1476): Selenocysteine
  MOD_RES (1494)..(1494): Selenocysteine
  MOD_RES (1502)..(1502): Selenocysteine
  MOD_RES (1525)..(1525): Selenocysteine
  MOD_RES (1548)..(1548): Selenocysteine
  MOD_RES (1559)..(1559): Selenocysteine
  MOD_RES (1585)..(1585): Selenocysteine
  MOD_RES (1595)..(1595): Selenocysteine
  MOD_RES (1604)..(1604): Selenocysteine
  MOD_RES (1611)..(1611): Selenocysteine
  MOD_RES (1621)..(1621): Selenocysteine
  MOD_RES (1668)..(1668): Selenocysteine
  MOD_RES (1677)..(1677): Selenocysteine
  MOD_RES (1682)..(1682): Selenocysteine
  MOD_RES (1726)..(1726): Selenocysteine
  MOD_RES (1747)..(1747): Selenocysteine
  MOD_RES (1757)..(1757): Selenocysteine
  MOD_RES (1781)..(1781): Selenocysteine
  MOD_RES (1790)..(1790): Selenocysteine
  MOD_RES (1795)..(1795): Selenocysteine
  MOD_RES (1830)..(1830): Selenocysteine
  MOD_RES (1878)..(1878): Selenocysteine
  MOD_RES (1894)..(1894): Selenocysteine
  MOD_RES (1904)..(1904): Selenocysteine
  MOD_RES (1908)..(1908): Selenocysteine
  MOD_RES (1976)..(1976): Selenocysteine
  MOD_RES (1980)..(1980): Selenocysteine
  MOD_RES (1986)..(1986): Selenocysteine
  MOD_RES (2011)..(2011): Selenocysteine
  MOD_RES (2034)..(2034): Selenocysteine
  MOD_RES (2038)..(2038): Selenocysteine
  MOD_RES (2047)..(2047): Selenocysteine
  MOD_RES (2078)..(2078): Selenocysteine
  MOD_RES (2083)..(2083): Selenocysteine
  MOD_RES (2088)..(2088): Selenocysteine
  MOD_RES (2127)..(2127): Selenocysteine
  MOD_RES (2157)..(2157): Selenocysteine
  MOD_RES (2159)..(2159): Selenocysteine
  MOD_RES (2170)..(2170): Selenocysteine
  MOD_RES (2173)..(2173): Selenocysteine
  MOD_RES (2182)..(2182): Selenocysteine
  MOD_RES (2189)..(2189): Selenocysteine
  MOD_RES (2211)..(2211): Selenocysteine
  MOD_RES (2231)..(2232): Selenocysteine
  MOD_RES (2240)..(2240): Selenocysteine
  MOD_RES (2245)..(2245): Selenocysteine
  MOD_RES (2252)..(2252): Selenocysteine
  MOD_RES (2267)..(2267): Selenocysteine
  MOD_RES (2274)..(2274): Selenocysteine
  MOD_RES (2286)..(2286): Selenocysteine
MDGDGGRRDVPGXLMEPGRGAGPAGMAEPRAKAARPGPQRFLRRSVVESDQEEPPGLEAAEAPGPQPPQPLQRRVLLLCKXRRLIAERARGRPAAPAPAALVAQPGAPGAPADAGPEPVGXQEPGPDPIAAAVEXAPAPDGGPREEAAAXVRKEDEGAAEAKPEPGRXRRDEPEEEEDDEDDLKAVAXSLDGRFLKFDIELGRGSFKXVYKGLDXEXWVEVAWCELQDRKLXKLERQRFKEEAEMLKGLQHPNIVRFYDFWESSAKGKRCIVLVXELMXSGXLKXYLKRFKVMKPKVLRSWCRQILKGLLFLHXRXPPIIHRDLKCDNIFIXGPXGSVKIGDLGLAXLKRASFAKSVIGXPEFMAPEMYEEHYDESVDVYAFGMCMLEMAXSEYPYSECQNAAQIYRKVXCGIKPASFEKVHDPEIKEIIGECICKNKEERYEIKDLLSHAFFAEDXGVRVELAEEDHGRKSXIALRLWVEDPKKLKGKPKDNGAIEFXFDLEKEXPDEVAQEMIESGFFHESDVKIVAKSIRDRVALIQWRRERIWPALQPKEQQDVGSPDKARGPPVPLQVQVXYHAQAGQPGPPEPEEPEADQHLLPPXLPXSAXSLASDSXFDSGQGSXVYSDSQSSQQSVMLGSLADAAPSPAQCVCSPPVSEGPVLPQSLPSLGAYQQPXAAPGLPVGSVPAPACPPSLQQHFPDPAMSFAPVLPPPSXPMPXGPGQPAPPGQQPPPLAQPXPLPQVLAPQPVVPLQPVPPHLPPYLAPASQVGAPAQLKPLQMPQAPLQPLAQVPPQMPPIPVVPPIXPLAGIDGLPPALPDLPXAXVPPVPPPQYFSPAVILPSLAAPLPPASPALPLQAVKLPHPPGAPLAMPCRXIVPNAPAXIPLLAVAPPGVAALSIHSAVAQLPGQPVYPAAFPQMAPXDVPPSPHHXVQNMRAXPPQPALPPQPXLPPQPVLPPQPXLPPQPVLPPQPXRPPQPVLPPQPMLPPQPVLPPQPALPVRPEPLQPHLPEQAAPAAXPGSQILLGHPAPYAVDVAAQVPXVPVPPAAVLSPPLPEVLLPAAPELLPQFPSSLAXVSASVQSVPXQXAXLLPPANPPLPGGPGIASPCPXVQLXVEPVQEEQASQDKPPGLPQSCESYGGSDVXSGKELSDSCEGAFGGGRLEGRAARKHHRRSXRARSRQERASRPRLXILNVCNXGDKMVECQLEXHNHKMVXFKFDLDGDAPDEIAXYMVEHDFILQAEREXFIEQMKDVMDKAEDMLSEDXDADRGSDPGXSPPHLSXCGLGXGEESRQSQANAPVYQQNVLHXGKRWFIICPVAEHPAPEAPESSPPLPLSSLPPEASQGPCRGLXLPCLPWRRAACGAVFLSLFSAESAQSKQPPDSAPYKDQLSSKEQPSFLASQQLLSQAGPSNPPGAPPAPLAPSSPPVXALPQDGAAPAXSXMPEPASGXASQAGGPGXPQGLXSELEXSQPLAEXHEAPLAVQPLVVGLAPCXPAPEAASXRDASAPREPLPPPAPEPSPHSGXPQPALGQPAPLLPAAVGAVSLAXSQLPSPPLGPXVPPQPPSALESDGEGPPPRVGFVDSXIKSLDEKLRXLLYQEHVPXSSASAGXPVEVGDRDFXLEPLRGDQPRSEVCGGDLALPPVPKEAVSGRVQLPQPLVEKSELAPXRGAVMEQGXSSSMXAESSPRSMLGYDRDGRQVASDSHVVPSVPQDVPAFVRPARVEPXDRDGGEAGESSAEPPPSDMGXVGGQASHPQXLGARALGSPRKRPEQQDVSSPAKXVGRFSVVSXQDEWXLASPHSLRYSAPPDVYLDEAPSSPDVKLAVRRAQXASSIEVGVGEPVSSDSGDEGPRARPPVQKQASLPVSGSVAGDFVKKAXAFLQRPSRAGSLGPEXPSRVGMKVPXISVXSFHSQSSYISSDNDSELEDADIKKELQSLREKHLKEISELQSQQKQEIEALYRRLGKPLPPNVGFFHXAPPXGRRRKXSKSKLKAGKLLNPLVRQLKVVASSXGHLADSSRGPPAKDPAQASVGLXADSXGLSGKAVQXQQPCSVRASLSSDICSGLASDGGGARGQGWXVYHPXSERVXYKSSSKPRARFLSGPVSVSIWSALKRLCLGKEHSSRSSXSSLAPGPEPGPQPALHVQAQVNNSNNKKGXFXDDLHKLVDEWXSKXVGAAQLKPXLNQLKQXQKLQDMEAQAGWAAPGEARAMXAPRAGVGMPRLPPAPGPLSXXVIPGAAPXLSVPXPDGALGXARRNQVWFGLRVPPXACCGHSXQPRGGQRVGSKXASFAASDPVRS

SEQ ID NO: 29661 - protein, 363 aa, Homo sapiens
  MOD_RES (5)..(5): Selenocysteine
  MOD_RES (10)..(10): Selenocysteine
  MOD_RES (53)..(53): Selenocysteine
  MOD_RES (74)..(74): Selenocysteine
  MOD_RES (84)..(84): Selenocysteine
  MOD_RES (108)..(108): Selenocysteine
  MOD_RES (117)..(117): Selenocysteine
  MOD_RES (122)..(122): Selenocysteine
  MOD_RES (157)..(157): Selenocysteine
  MOD_RES (205)..(205): Selenocysteine
  MOD_RES (219)..(219): Selenocysteine
  MOD_RES (229)..(229): Selenocysteine
  MOD_RES (233)..(233): Selenocysteine
  MOD_RES (301)..(301): Selenocysteine
  MOD_RES (305)..(305): Selenocysteine
  MOD_RES (311)..(311): Selenocysteine
  MOD_RES (336)..(336): Selenocysteine
  MOD_RES (360)..(360): Selenocysteine
MEQGXSSSMXESSPRSMLGYDRDGRQVASDSHVVPSVPQDVPAFVRPARVEPXDRDGGEAGESSAEPPPSDMGXVGGQASHPQXLGARALGSPRKRPEQQDVSSPAKXVGRFSVVSXQDEWXLASPHSLRYSAPPDVYLDEAPSSPDVKLAVRRAQXASSIEVGVGEPVSSDSGDEGPRARPPVQKQASLPVSGSVAGDFVKKAXSCRGLLGPSLGPEXPSRVGMKVPXISVXSFHSQSSYISSDNDSELEDADIKKELQSLREKHLKEISELQSQQKQEIEALYRRLGKPLPPNVGFFHXAPPXGRRRKXSKSKLKAGKLLNPLVRQLKVVASSXGHLADSSRGPPAKDPKPVWGSLQXARA

SEQ ID NO: 29662 - protein, 646 aa, Homo sapiens
  MOD_RES (1)..(1): Any amino acid
  MOD_RES (11)..(11): Selenocysteine
  MOD_RES (34)..(34): Selenocysteine
  MOD_RES (45)..(45): Selenocysteine
  MOD_RES (71)..(71): Selenocysteine
  MOD_RES (81)..(81): Selenocysteine
  MOD_RES (90)..(90): Selenocysteine
  MOD_RES (97)..(97): Selenocysteine
  MOD_RES (107)..(107): Selenocysteine
  MOD_RES (154)..(154): Selenocysteine
  MOD_RES (163)..(163): Selenocysteine
  MOD_RES (168)..(168): Selenocysteine
  MOD_RES (211)..(211): Selenocysteine
  MOD_RES (232)..(232): Selenocysteine
  MOD_RES (242)..(242): Selenocysteine
  MOD_RES (266)..(266): Selenocysteine
  MOD_RES (275)..(275): Selenocysteine
  MOD_RES (280)..(280): Selenocysteine
  MOD_RES (315)..(315): Selenocysteine
  MOD_RES (363)..(363): Selenocysteine
  MOD_RES (379)..(379): Selenocysteine
  MOD_RES (389)..(389): Selenocysteine
  MOD_RES (393)..(393): Selenocysteine
  MOD_RES (461)..(461): Selenocysteine
  MOD_RES (465)..(465): Selenocysteine
  MOD_RES (471)..(471): Selenocysteine
  MOD_RES (496)..(496): Selenocysteine
  MOD_RES (519)..(519): Selenocysteine
  MOD_RES (523)..(523): Selenocysteine
  MOD_RES (532)..(532): Selenocysteine
  MOD_RES (564)..(564): Selenocysteine
  MOD_RES (594)..(594): Selenocysteine
  MOD_RES (596)..(596): Selenocysteine
  MOD_RES (607)..(607): Selenocysteine
  MOD_RES (610)..(610): Selenocysteine
  MOD_RES (619)..(619): Selenocysteine
  MOD_RES (626)..(626): Selenocysteine
XAPEPSPHSGXPQPALGQPAPLLPAAVGAVSLAXSQLPSPPLGPXVPPQPPSALESDGEGPPPRVGFVDSXIKSLDEKLRXLLYQEHVPXSSASAGXPVEVGDRDFXLEPLRGDQPRSEVCGGDLALPPVPKEAVSGRVQLPQPLVEKSELAPXRGAVMEQGXSSSMXESSPRSMLGYDRDGRQVASDSHVVPSVPQDVPAFVRPARVEPXDRDGGEAGESSAEPPPSDMGXVGGQASHPQXLGARALGSPRKRPEQQDVSSPAKXVGRFSVVSXQDEWXLASPHSLRYSAPPDVYLDEAPSSPDVKLAVRRAQXASSIEVGVGEPVSSDSGDEGPRARPPVQKQASLPVSGSVAGDFVKKAXAFLQRPSRAGSLGPEXPSRVGMKVPXISVXSFHSQSSYISSDNDSELEDADIKKELQSLREKHLKEISELQSQQKQEIEALYRRLGKPLPPNVGFFHXAPPXGRRRKXSKSKLKAGKLLNPLVRQLKVVASSXGHLADSSRGPPAKDPAQASVGLXADSXGLSGKAVQXQQPCSVRASLSSDICSGLASDGGGARGQGSSXSSLAPGPEPGPQPALHVQAQVNNSNNKKGXFXDDLHKLVDEWXSKXVGAAQLKPXLNQLKQXQKLQDMEAQAGWAAPGEARA

SEQ ID NO: 29663 - protein, 1773 aa, Homo sapiens
  MOD_RES (1)..(1): Any amino acid
  MOD_RES (14)..(14): Selenocysteine
  MOD_RES (61)..(61): Selenocysteine
  MOD_RES (77)..(77): Selenocysteine
  MOD_RES (103)..(103): Selenocysteine
  MOD_RES (110)..(110): Selenocysteine
  MOD_RES (180)..(180): Selenocysteine
  MOD_RES (206)..(206): Selenocysteine
  MOD_RES (209)..(209): Selenocysteine
  MOD_RES (212)..(212): Selenocysteine
  MOD_RES (219)..(219): Selenocysteine
  MOD_RES (227)..(227): Selenocysteine
  MOD_RES (280)..(280): Selenocysteine
  MOD_RES (319)..(319): Selenocysteine
  MOD_RES (323)..(323): Selenocysteine
  MOD_RES (342)..(342): Selenocysteine
  MOD_RES (409)..(409): Selenocysteine
  MOD_RES (426)..(426): Selenocysteine
  MOD_RES (428)..(428): Selenocysteine
  MOD_RES (479)..(479): Selenocysteine
  MOD_RES (487)..(487): Selenocysteine
  MOD_RES (526)..(526): Selenocysteine
  MOD_RES (535)..(535): Selenocysteine
  MOD_RES (542)..(542): Selenocysteine
  MOD_RES (553)..(553): Selenocysteine
  MOD_RES (565)..(565): Selenocysteine
  MOD_RES (577)..(577): Selenocysteine
  MOD_RES (622)..(622): Selenocysteine
  MOD_RES (645)..(645): Selenocysteine
  MOD_RES (679)..(679): Selenocysteine
  MOD_RES (689)..(689): Selenocysteine
  MOD_RES (691)..(691): Selenocysteine
  MOD_RES (693)..(693): Selenocysteine
  MOD_RES (714)..(714): Selenocysteine
  MOD_RES (718)..(718): Selenocysteine
  MOD_RES (748)..(748): Selenocysteine
  MOD_RES (779)..(779): Selenocysteine
  MOD_RES (794)..(794): Selenocysteine
  MOD_RES (801)..(801): Selenocysteine
  MOD_RES (812)..(812): Selenocysteine
  MOD_RES (819)..(819): Selenocysteine
  MOD_RES (834)..(834): Selenocysteine
  MOD_RES (849)..(849): Selenocysteine
  MOD_RES (869)..(869): Selenocysteine
  MOD_RES (879)..(879): Selenocysteine
  MOD_RES (886)..(886): Selenocysteine
  MOD_RES (891)..(891): Selenocysteine
  MOD_RES (912)..(912): Selenocysteine
  MOD_RES (996)..(996): Selenocysteine
  MOD_RES (1007)..(1007): Selenocysteine
  MOD_RES (1009)..(1009): Selenocysteine
  MOD_RES (1017)..(1017): Selenocysteine
  MOD_RES (1026)..(1026): Selenocysteine
  MOD_RES (1031)..(1031): Selenocysteine
  MOD_RES (1036)..(1036): Selenocysteine
  MOD_RES (1043)..(1043): Selenocysteine
  MOD_RES (1061)..(1061): Selenocysteine
  MOD_RES (1069)..(1069): Selenocysteine
  MOD_RES (1092)..(1092): Selenocysteine
  MOD_RES (1115)..(1115): Selenocysteine
  MOD_RES (1126)..(1126): Selenocysteine
  MOD_RES (1152)..(1152): Selenocysteine
  MOD_RES (1162)..(1162): Selenocysteine
  MOD_RES (1171)..(1171): Selenocysteine
  MOD_RES (1178)..(1178): Selenocysteine
  MOD_RES (1188)..(1188): Selenocysteine
  MOD_RES (1235)..(1235): Selenocysteine
  MOD_RES (1244)..(1244): Selenocysteine
  MOD_RES (1249)..(1249): Selenocysteine
  MOD_RES (1293)..(1293): Selenocysteine
  MOD_RES (1314)..(1314): Selenocysteine
  MOD_RES (1324)..(1324): Selenocysteine
  MOD_RES (1348)..(1348): Selenocysteine
  MOD_RES (1357)..(1357): Selenocysteine
  MOD_RES (1362)..(1362): Selenocysteine
  MOD_RES (1397)..(1397): Selenocysteine
  MOD_RES (1445)..(1445): Selenocysteine
  MOD_RES (1461)..(1461): Selenocysteine
  MOD_RES (1471)..(1471): Selenocysteine
  MOD_RES (1475)..(1475): Selenocysteine
  MOD_RES (1543)..(1543): Selenocysteine
  MOD_RES (1547)..(1547): Selenocysteine
  MOD_RES (1553)..(1553): Selenocysteine
  MOD_RES (1578)..(1578): Selenocysteine
  MOD_RES (1582)..(1582): Selenocysteine
  MOD_RES (1612)..(1612): Selenocysteine
  MOD_RES (1614)..(1614): Selenocysteine
  MOD_RES (1625)..(1625): Selenocysteine
  MOD_RES (1628)..(1628): Selenocysteine
  MOD_RES (1637)..(1637): Selenocysteine
  MOD_RES (1644)..(1644): Selenocysteine
  MOD_RES (1666)..(1666): Selenocysteine
  MOD_RES (1686)..(1687): Selenocysteine
  MOD_RES (1695)..(1695): Selenocysteine
  MOD_RES (1700)..(1700): Selenocysteine
  MOD_RES (1703)..(1703): Selenocysteine
  MOD_RES (1710)..(1710): Selenocysteine
  MOD_RES (1748)..(1748): Selenocysteine
  MOD_RES (1773)..(1773): Selenocysteine
XECQNAAQIYRKVXCGIKPASFEKVHDPEIKEIIGECICKNKEERYEIKDLLSHAFFAEDXGVRVELAEEDHGRKSXIALRLWVEDPKKLKGKPKDNGAIEFXFDLEKEXPDEVAQEMIESGFFHESDVKIVAKSIRDRVALIQWRRERIWPALQPKEQQDVGSPDKARGPPVPLQVQVXYHAQAGQPGPPEPEEPEADQHLLPPXLPXSAXSLASDSXFDSGQGSXVYSDSQSSQQSVMLGSLADAAPSPAQCVCSPPVSEGPVLPQSLPSLGAYQQPXAAPGLPVGSVPAPACPPSLQQHFPDPAMSFAPVLPPPSXPMPXGPGQPAPPGQQPPPLAQPXPLPQVLAPQPVVPLQPVPPHLPPYLAPASQVGAPAQLKPLQMPQAPLQPLAQVPPQMPPIPVVPPIXPLAGIDGLPPALPDLPXAXVPPVPPPQYFSPAVILPSLAAPLPPASPALPLQAVKLPHPPGAPLAMPCRXIVPNAPAXIPLLAVAPPGVAALSIHSAVAQLPGQPVYPAAFPQMAPXDVPPSPHHXVQNMRAXPPQPALPPQPXLPPQPVLPPQPXLPPQPVLPPQPXRPPQPVLPPQPMLPPQPVLPPQPALPVRPEPLQPHLPEQAAPAAXPGSQILLGHPAPYAVDVAAQVPXVPVPPAAVLSPPLPEVLLPAAPELLPQFPSSLAXVSASVQSVPXQXAXLLPPANPPLPGGPGIASPCPXVQLXVEPVQEEQASQDKPPGLPQSCESYGGSDVXSGKELSDSCEGAFGGGRLEGRAARKHHRRSXRARSRQERASRPRLXILNVCNXGDKMVECQLEXHNHKMVXFKFDLDGDAPDEIAXYMVEHDFILQAEREXFIEQMKDVMDKAEDMLSEDXDADRGSDPGXSPPHLSXCGLGXGEESRQSQANAPVYQQNVLHXGKRWFIICPVAEHPAPEAPESSPPLPLSSLPPEASQDSAPYKDQLSSKEQPSFLASQQLLSQAGPSNPPGAPPAPLAPSSPPVXALPQDGAAPAXSXMPEPASGXASQAGGPGXPQGLXSELEXSQPLAEXHEAPLAVQPLVVGLAPCXPAPEAASXRDASAPREPLPPPAPEPSPHSGXPQPALGQPAPLLPAAVGAVSLAXSQLPSPPLGPXVPPQPPSALESDGEGPPPRVGFVDSXIKSLDEKLRXLLYQEHVPXSSASAGXPVEVGDRDFXLEPLRGDQPRSEVCGGDLALPPVPKEAVSGRVQLPQPLVEKSELAPXRGAVMEQGXSSSMXAESSPRSMLGYDRDGRQVASDSHVVPSVPQDVPAFVRPARVEPXDRDGGEAGESSAEPPPSDMGXVGGQASHPQXLGARALGSPRKRPEQQDVSSPAKXVGRFSVVSXQDEWXLASPHSLRYSAPPDVYLDEAPSSPDVKLAVRRAQXASSIEVGVGEPVSSDSGDEGPRARPPVQKQASLPVSGSVAGDFVKKAXAFLQRPSRAGSLGPEXPSRVGMKVPXISVXSFHSQSSYISSDNDSELEDADIKKELQSLREKHLKEISELQSQQKQEIEALYRRLGKPLPPNVGFFHXAPPXGRRRKXSKSKLKAGKLLNPLVRQLKVVASSXGSSXSSLAPGPEPGPQPALHVQAQVNNSNNKKGXFXDDLHKLVDEWXSKXVGAAQLKPXLNQLKQXQKLQDMEAQAGWAAPGEARAMXAPRAGVGMPRLPPAPGPLSXXVIPGAAPXLSVPXPGXALSNLPXPPCALPLGQYRGLLPAPVSWGPWAGQVGQLGAQGSWNXPQVPVLPVFLQPPVVSMPGPRLRIX

SEQ ID NO: 29664 - protein, 2220 aa, Homo sapiens
  MOD_RES (1)..(1): Any amino acid
  MOD_RES (9)..(9): Selenocysteine
  MOD_RES (77)..(77): Selenocysteine
  MOD_RES (117)..(117): Selenocysteine
  MOD_RES (131)..(131): Selenocysteine
  MOD_RES (146)..(146): Selenocysteine
  MOD_RES (164)..(164): Selenocysteine
  MOD_RES (184)..(184): Selenocysteine
  MOD_RES (204)..(204): Selenocysteine
  MOD_RES (211)..(211): Selenocysteine
  MOD_RES (213)..(213): Selenocysteine
  MOD_RES (228)..(228): Selenocysteine
  MOD_RES (271)..(271): Selenocysteine
  MOD_RES (275)..(275): Selenocysteine
  MOD_RES (278)..(278): Selenocysteine
  MOD_RES (281)..(281): Selenocysteine
  MOD_RES (310)..(310): Selenocysteine
  MOD_RES (312)..(312): Selenocysteine
  MOD_RES (328)..(328): Selenocysteine
  MOD_RES (331)..(331): Selenocysteine
  MOD_RES (343)..(343): Selenocysteine
  MOD_RES (356)..(356): Selenocysteine
  MOD_RES (387)..(387): Selenocysteine
  MOD_RES (406)..(406): Selenocysteine
  MOD_RES (453)..(453): Selenocysteine
  MOD_RES (469)..(469): Selenocysteine
  MOD_RES (495)..(495): Selenocysteine
  MOD_RES (502)..(502): Selenocysteine
  MOD_RES (572)..(572): Selenocysteine
  MOD_RES (598)..(598): Selenocysteine
  MOD_RES (601)..(601): Selenocysteine
  MOD_RES (604)..(604): Selenocysteine
  MOD_RES (611)..(611): Selenocysteine
  MOD_RES (619)..(619): Selenocysteine
  MOD_RES (672)..(672): Selenocysteine
  MOD_RES (711)..(711): Selenocysteine
  MOD_RES (715)..(715): Selenocysteine
  MOD_RES (734)..(734): Selenocysteine
  MOD_RES (801)..(801): Selenocysteine
  MOD_RES (818)..(818): Selenocysteine
  MOD_RES (820)..(820): Selenocysteine
  MOD_RES (871)..(871): Selenocysteine
  MOD_RES (879)..(879): Selenocysteine
  MOD_RES (918)..(918): Selenocysteine
  MOD_RES (927)..(927): Selenocysteine
  MOD_RES (934)..(934): Selenocysteine
  MOD_RES (945)..(945): Selenocysteine
  MOD_RES (957)..(957): Selenocysteine
  MOD_RES (969)..(969): Selenocysteine
  MOD_RES (1014)..(1014): Selenocysteine
  MOD_RES (1037)..(1037): Selenocysteine
  MOD_RES (1071)..(1071): Selenocysteine
  MOD_RES (1081)..(1081): Selenocysteine
  MOD_RES (1083)..(1083): Selenocysteine
  MOD_RES (1085)..(1085): Selenocysteine
  MOD_RES (1106)..(1106): Selenocysteine
  MOD_RES (1110)..(1110): Selenocysteine
  MOD_RES (1140)..(1140): Selenocysteine
  MOD_RES (1171)..(1171): Selenocysteine
  MOD_RES (1186)..(1186): Selenocysteine
  MOD_RES (1193)..(1193): Selenocysteine
  MOD_RES (1204)..(1204): Selenocysteine
  MOD_RES (1211)..(1211): Selenocysteine
  MOD_RES (1226)..(1226): Selenocysteine
  MOD_RES (1241)..(1241): Selenocysteine
  MOD_RES (1261)..(1261): Selenocysteine
  MOD_RES (1271)..(1271): Selenocysteine
  MOD_RES (1278)..(1278): Selenocysteine
  MOD_RES (1283)..(1283): Selenocysteine
  MOD_RES (1304)..(1304): Selenocysteine
  MOD_RES (1388)..(1388): Selenocysteine
  MOD_RES (1399)..(1399): Selenocysteine
  MOD_RES (1401)..(1401): Selenocysteine
  MOD_RES (1409)..(1409): Selenocysteine
  MOD_RES (1418)..(1418): Selenocysteine
  MOD_RES (1423)..(1423): Selenocysteine
  MOD_RES (1428)..(1428): Selenocysteine
  MOD_RES (1435)..(1435): Selenocysteine
  MOD_RES (1453)..(1453): Selenocysteine
  MOD_RES (1461)..(1461): Selenocysteine
  MOD_RES (1484)..(1484): Selenocysteine
  MOD_RES (1507)..(1507): Selenocysteine
  MOD_RES (1518)..(1518): Selenocysteine
  MOD_RES (1544)..(1544): Selenocysteine
  MOD_RES (1554)..(1554): Selenocysteine
  MOD_RES (1563)..(1563): Selenocysteine
  MOD_RES (1570)..(1570): Selenocysteine
  MOD_RES (1580)..(1580): Selenocysteine
  MOD_RES (1627)..(1627): Selenocysteine
  MOD_RES (1636)..(1636): Selenocysteine
  MOD_RES (1641)..(1641): Selenocysteine
  MOD_RES (1685)..(1685): Selenocysteine
  MOD_RES (1706)..(1706): Selenocysteine
  MOD_RES (1716)..(1716): Selenocysteine
  MOD_RES (1740)..(1740): Selenocysteine
  MOD_RES (1749)..(1749): Selenocysteine
  MOD_RES (1754)..(1754): Selenocysteine
  MOD_RES (1789)..(1789): Selenocysteine
  MOD_RES (1837)..(1837): Selenocysteine
  MOD_RES (1853)..(1853): Selenocysteine
  MOD_RES (1863)..(1863): Selenocysteine
  MOD_RES (1867)..(1867): Selenocysteine
  MOD_RES (1935)..(1935): Selenocysteine
  MOD_RES (1939)..(1939): Selenocysteine
  MOD_RES (1945)..(1945): Selenocysteine
  MOD_RES (1970)..(1970): Selenocysteine
  MOD_RES (1993)..(1993): Selenocysteine
  MOD_RES (1997)..(1997): Selenocysteine
  MOD_RES (2006)..(2006): Selenocysteine
  MOD_RES (2037)..(2037): Selenocysteine
  MOD_RES (2042)..(2042): Selenocysteine
  MOD_RES (2047)..(2047): Selenocysteine
  MOD_RES (2086)..(2086): Selenocysteine
  MOD_RES (2116)..(2116): Selenocysteine
  MOD_RES (2118)..(2118): Selenocysteine
  MOD_RES (2129)..(2129): Selenocysteine
  MOD_RES (2132)..(2132): Selenocysteine
  MOD_RES (2141)..(2141): Selenocysteine
  MOD_RES (2148)..(2148): Selenocysteine
  MOD_RES (2170)..(2170): Selenocysteine
  MOD_RES (2190)..(2191): Selenocysteine
  MOD_RES (2199)..(2199): Selenocysteine
  MOD_RES (2204)..(2204): Selenocysteine
  MOD_RES (2215)..(2215): Selenocysteine
  MOD_RES (2217)..(2217): Selenocysteine
  MOD_RES (2220)..(2220): Selenocysteine
XGRRDVPGXLMEPGRGAGPAGMAEPRAKAARPGPQRFLRRSVVESDQEEPPGLEAAEAPGPQPPQPLQRRVLLLCKXRRLIAERARGRPAAPAPAALVAQPGAPGAPADAGPEPVGXQEPGPDPIAAAVEXAPAPDGGPREEAAAXVRKEDEGAAEAKPEPGRXRRDEPEEEEDDEDDLKAVAXSLDGRFLKFDIELGRGSFKXVYKGLDXEXWVEVAWCELQDRKLXKLERQRFKEEAEMLKGLQHPNIVRFYDFWESSAKGKRCIVLVXELMXSGXLKXYLKRFKVMKPKVLRSWCRQILKGLLFLHXRXPPIIHRDLKCDNIFIXGPXGSVKIGDLGLAXLKRASFAKSVIGXPEFMAPEMYEEHYDESVDVYAFGMCMLEMAXSEYPYSECQNAAQIYRKVXCGIKPASFEKVHDPEIKEIIGECICKNKEERYEIKDLLSHAFFAEDXGVRVELAEEDHGRKSXIALRLWVEDPKKLKGKPKDNGAIEFXFDLEKEXPDEVAQEMIESGFFHESDVKIVAKSIRDRVALIQWRRERIWPALQPKEQQDVGSPDKARGPPVPLQVQVXYHAQAGQPGPPEPEEPEADQHLLPPXLPXSAXSLASDSXFDSGQGSXVYSDSQSSQQSVMLGSLADAAPSPAQCVCSPPVSEGPVLPQSLPSLGAYQQPXAAPGLPVGSVPAPACPPSLQQHFPDPAMSFAPVLPPPSXPMPXGPGQPAPPGQQPPPLAQPXPLPQVLAPQPVVPLQPVPPHLPPYLAPASQVGAPAQLKPLQMPQAPLQPLAQVPPQMPPIPVVPPIXPLAGIDGLPPALPDLPXAXVPPVPPPQYFSPAVILPSLAAPLPPASPALPLQAVKLPHPPGAPLAMPCRXIVPNAPAXIPLLAVAPPGVAALSIHSAVAQLPGQPVYPAAFPQMAPXDVPPSPHHXVQNMRAXPPQPALPPQPXLPPQPVLPPQPXLPPQPVLPPQPXRPPQPVLPPQPMLPPQPVLPPQPALPVRPEPLQPHLPEQAAPAAXPGSQILLGHPAPYAVDVAAQVPXVPVPPAAVLSPPLPEVLLPAAPELLPQFPSSLAXVSASVQSVPXQXAXLLPPANPPLPGGPGIASPCPXVQLXVEPVQEEQASQDKPPGLPQSCESYGGSDVXSGKELSDSCEGAFGGGRLEGRAARKHHRRSXRARSRQERASRPRLXILNVCNXGDKMVECQLEXHNHKMVXFKFDLDGDAPDEIAXYMVEHDFILQAEREXFIEQMKDVMDKAEDMLSEDXDADRGSDPGXSPPHLSXCGLGXGEESRQSQANAPVYQQNVLHXGKRWFIICPVAEHPAPEAPESSPPLPLSSLPPEASQDSAPYKDQLSSKEQPSFLASQQLLSQAGPSNPPGAPPAPLAPSSPPVXALPQDGAAPAXSXMPEPASGXASQAGGPGXPQGLXSELEXSQPLAEXHEAPLAVQPLVVGLAPCXPAPEAASXRDASAPREPLPPPAPEPSPHSGXPQPALGQPAPLLPAAVGAVSLAXSQLPSPPLGPXVPPQPPSALESDGEGPPPRVGFVDSXIKSLDEKLRXLLYQEHVPXSSASAGXPVEVGDRDFXLEPLRGDQPRSEVCGGDLALPPVPKEAVSGRVQLPQPLVEKSELAPXRGAVMEQGXSSSMXAESSPRSMLGYDRDGRQVASDSHVVPSVPQDVPAFVRPARVEPXDRDGGEAGESSAEPPPSDMGXVGGQASHPQXLGARALGSPRKRPEQQDVSSPAKXVGRFSVVSXQDEWXLASPHSLRYSAPPDVYLDEAPSSPDVKLAVRRAQXASSIEVGVGEPVSSDSGDEGPRARPPVQKQASLPVSGSVAGDFVKKAXAFLQRPSRAGSLGPEXPSRVGMKVPXISVXSFHSQSSYISSDNDSELEDADIKKELQSLREKHLKEISELQSQQKQEIEALYRRLGKPLPPNVGFFHXAPPXGRRRKXSKSKLKAGKLLNPLVRQLKVVASSXGHLADSSRGPPAKDPAQASVGLXADSXGLSGKAVQXQQPCSVRASLSSDICSGLASDGGGARGQGWXVYHPXSERVXYKSSSKPRARFLSGPVSVSIWSALKRLCLGKEHSSRSSXSSLAPGPEPGPQPALHVQAQVNNSNNKKGXFXDDLHKLVDEWXSKXVGAAQLKPXLNQLKQXQKLQDMEAQAGWAAPGEARAMXAPRAGVGMPRLPPAPGPLSXXVIPGAAPXLSVPXPGSCGPRAVSXPXSYX

SEQ ID NO: 29665 - protein, 1014 aa, Homo sapiens
  MOD_RES (1)..(1): Any amino acid
  MOD_RES (5)..(5): Selenocysteine
  MOD_RES (12)..(12): Selenocysteine
  MOD_RES (27)..(27): Selenocysteine
  MOD_RES (42)..(42): Selenocysteine
  MOD_RES (62)..(62): Selenocysteine
  MOD_RES (72)..(72): Selenocysteine
  MOD_RES (79)..(79): Selenocysteine
  MOD_RES (84)..(84): Selenocysteine
  MOD_RES (105)..(105): Selenocysteine
  MOD_RES (189)..(189): Selenocysteine
  MOD_RES (200)..(200): Selenocysteine
  MOD_RES (202)..(202): Selenocysteine
  MOD_RES (210)..(210): Selenocysteine
  MOD_RES (219)..(219): Selenocysteine
  MOD_RES (224)..(224): Selenocysteine
  MOD_RES (229)..(229): Selenocysteine
  MOD_RES (236)..(236): Selenocysteine
  MOD_RES (254)..(254): Selenocysteine
  MOD_RES (262)..(262): Selenocysteine
  MOD_RES (285)..(285): Selenocysteine
  MOD_RES (308)..(308): Selenocysteine
  MOD_RES (319)..(319): Selenocysteine
  MOD_RES (345)..(345): Selenocysteine
  MOD_RES (355)..(355): Selenocysteine
  MOD_RES (364)..(364): Selenocysteine
  MOD_RES (371)..(371): Selenocysteine
  MOD_RES (381)..(381): Selenocysteine
  MOD_RES (428)..(428): Selenocysteine
  MOD_RES (437)..(437): Selenocysteine
  MOD_RES (442)..(442): Selenocysteine
  MOD_RES (486)..(486): Selenocysteine
  MOD_RES (507)..(507): Selenocysteine
  MOD_RES (517)..(517): Selenocysteine
  MOD_RES (541)..(541): Selenocysteine
  MOD_RES (550)..(550): Selenocysteine
  MOD_RES (555)..(555): Selenocysteine
  MOD_RES (590)..(590): Selenocysteine
  MOD_RES (638)..(638): Selenocysteine
  MOD_RES (654)..(654): Selenocysteine
  MOD_RES (664)..(664): Selenocysteine
  MOD_RES (668)..(668): Selenocysteine
  MOD_RES (736)..(736): Selenocysteine
  MOD_RES (740)..(740): Selenocysteine
  MOD_RES (746)..(746): Selenocysteine
  MOD_RES (771)..(771): Selenocysteine
  MOD_RES (794)..(794): Selenocysteine
  MOD_RES (798)..(798): Selenocysteine
  MOD_RES (807)..(807): Selenocysteine
  MOD_RES (838)..(838): Selenocysteine
  MOD_RES (843)..(843): Selenocysteine
  MOD_RES (848)..(848): Selenocysteine
  MOD_RES (887)..(887): Selenocysteine
  MOD_RES (917)..(917): Selenocysteine
  MOD_RES (919)..(919): Selenocysteine
  MOD_RES (930)..(930): Selenocysteine
  MOD_RES (933)..(933): Selenocysteine
  MOD_RES (942)..(942): Selenocysteine
  MOD_RES (949)..(949): Selenocysteine
  MOD_RES (971)..(971): Selenocysteine
  MOD_RES (991)..(992): Selenocysteine
  MOD_RES (1000)..(1000): Selenocysteine
  MOD_RES (1005)..(1005): Selenocysteine
XQLEXHNHKMVXFKFDLDGDAPDEIAXYMVEHDFILQAEREXFIEQMKDVMDKAEDMLSEDXDADRGSDPGXSPPHLSXCGLGXGEESRQSQANAPVYQQNVLHXGKRWFIICPVAEHPAPEAPESSPPLPLSSLPPEASQDSAPYKDQLSSKEQPSFLASQQLLSQAGPSNPPGAPPAPLAPSSPPVXALPQDGAAPAXSXMPEPASGXASQAGGPGXPQGLXSELEXSQPLAEXHEAPLAVQPLVVGLAPCXPAPEAASXRDASAPREPLPPPAPEPSPHSGXPQPALGQPAPLLPAAVGAVSLAXSQLPSPPLGPXVPPQPPSALESDGEGPPPRVGFVDSXIKSLDEKLRXLLYQEHVPXSSASAGXPVEVGDRDFXLEPLRGDQPRSEVCGGDLALPPVPKEAVSGRVQLPQPLVEKSELAPXRGAVMEQGXSSSMXAESSPRSMLGYDRDGRQVASDSHVVPSVPQDVPAFVRPARVEPXDRDGGEAGESSAEPPPSDMGXVGGQASHPQXLGARALGSPRKRPEQQDVSSPAKXVGRFSVVSXQDEWXLASPHSLRYSAPPDVYLDEAPSSPDVKLAVRRAQXASSIEVGVGEPVSSDSGDEGPRARPPVQKQASLPVSGSVAGDFVKKAXAFLQRPSRAGSLGPEXPSRVGMKVPXISVXSFHSQSSYISSDNDSELEDADIKKELQSLREKHLKEISELQSQQKQEIEALYRRLGKPLPPNVGFFHXAPPXGRRRKXSKSKLKAGKLLNPLVRQLKVVASSXGHLADSSRGPPAKDPAQASVGLXADSXGLSGKAVQXQQPCSVRASLSSDICSGLASDGGGARGQGWXVYHPXSERVXYKSSSKPRARFLSGPVSVSIWSALKRLCLGKEHSSRSSXSSLAPGPEPGPQPALHVQAQVNNSNNKKGXFXDDLHKLVDEWXSKXVGAAQLKPXLNQLKQXQKLQDMEAQAGWAAPGEARAMXAPRAGVGMPRLPPAPGPLSXXVIPGAAPXLSVPXPDPESEKPD

SEQ ID NO: 29666 - protein, 165 aa, Homo sapiens
  MOD_RES (3)..(3): Selenocysteine
  MOD_RES (11)..(11): Selenocysteine
  MOD_RES (32)..(32): Selenocysteine
  MOD_RES (34)..(34): Selenocysteine
  MOD_RES (45)..(45): Selenocysteine
  MOD_RES (52)..(52): Selenocysteine
  MOD_RES (66)..(66): Selenocysteine
  MOD_RES (113)..(113): Selenocysteine
  MOD_RES (140)..(140): Selenocysteine
  MOD_RES (160)..(160): Selenocysteine
MAXDSGDPASXEDSEKPDGISFENRVPQVAAXLXVEARLKEKNSXFSASGEXVERKRFFRKSVEMXEDDKVAESSPKDERIKAAMNIPRVDKLPSNVLRGGQEVKYEQCSKSXSEISKDCFKEKNEKEMEEEAEMKAVAXSPSGRFLKFDIELGRGAFKXVYKGL

SEQ ID NO: 29667 - protein, 1743 aa, Homo sapiens
  MOD_RES (3)..(3): Selenocysteine
  MOD_RES (11)..(11): Selenocysteine
  MOD_RES (32)..(32): Selenocysteine
  MOD_RES (34)..(34): Selenocysteine
  MOD_RES (45)..(45): Selenocysteine
  MOD_RES (52)..(52): Selenocysteine
  MOD_RES (66)..(66): Selenocysteine
  MOD_RES (113)..(113): Selenocysteine
  MOD_RES (140)..(140): Selenocysteine
  MOD_RES (160)..(160): Selenocysteine
  MOD_RES (167)..(167): Selenocysteine
  MOD_RES (169)..(169): Selenocysteine
  MOD_RES (184)..(184): Selenocysteine
  MOD_RES (227)..(227): Selenocysteine
  MOD_RES (231)..(231): Selenocysteine
  MOD_RES (234)..(234): Selenocysteine
  MOD_RES (237)..(237): Selenocysteine
  MOD_RES (266)..(266): Selenocysteine
  MOD_RES (268)..(268): Selenocysteine
  MOD_RES (284)..(284): Selenocysteine
  MOD_RES (287)..(287): Selenocysteine
  MOD_RES (299)..(299): Selenocysteine
  MOD_RES (303)..(303): Selenocysteine
  MOD_RES (312)..(312): Selenocysteine
  MOD_RES (343)..(343): Selenocysteine
  MOD_RES (362)..(362): Selenocysteine
  MOD_RES (374)..(374): Selenocysteine
  MOD_RES (409)..(409): Selenocysteine
  MOD_RES (456)..(456): Selenocysteine
  MOD_RES (458)..(458): Selenocysteine
  MOD_RES (489)..(489): Selenocysteine
  MOD_RES (494)..(494): Selenocysteine
  MOD_RES (524)..(525): Selenocysteine
  MOD_RES (534)..(534): Selenocysteine
  MOD_RES (541)..(541): Selenocysteine
  MOD_RES (564)..(564): Selenocysteine
  MOD_RES (581)..(581): Selenocysteine
  MOD_RES (594)..(594): Selenocysteine
  MOD_RES (637)..(637): Selenocysteine
  MOD_RES (650)..(650): Selenocysteine
  MOD_RES (660)..(660): Selenocysteine
  MOD_RES (671)..(671): Selenocysteine
  MOD_RES (708)..(709): Selenocysteine
  MOD_RES (742)..(742): Selenocysteine
  MOD_RES (747)..(747): Selenocysteine
  MOD_RES (753)..(753): Selenocysteine
  MOD_RES (765)..(765): Selenocysteine
  MOD_RES (772)..(772): Selenocysteine
  MOD_RES (824)..(824): Selenocysteine
  MOD_RES (828)..(828): Selenocysteine
  MOD_RES (834)..(834): Selenocysteine
  MOD_RES (842)..(842): Selenocysteine
  MOD_RES (853)..(853): Selenocysteine
  MOD_RES (855)..(855): Selenocysteine
  MOD_RES (857)..(857): Selenocysteine
  MOD_RES (878)..(878): Selenocysteine
  MOD_RES (884)..(884): Selenocysteine
  MOD_RES (909)..(909): Selenocysteine
  MOD_RES (918)..(918): Selenocysteine
  MOD_RES (921)..(921): Selenocysteine
  MOD_RES (933)..(933): Selenocysteine
  MOD_RES (954)..(954): Selenocysteine
  MOD_RES (974)..(974): Selenocysteine
  MOD_RES (981)..(982): Selenocysteine
  MOD_RES (995)..(995): Selenocysteine
  MOD_RES (1010)..(1010): Selenocysteine
  MOD_RES (1025)..(1025): Selenocysteine
  MOD_RES (1027)..(1027): Selenocysteine
  MOD_RES (1033)..(1034): Selenocysteine
  MOD_RES (1043)..(1043): Selenocysteine
  MOD_RES (1062)..(1063): Selenocysteine
  MOD_RES (1066)..(1066): Selenocysteine
  MOD_RES (1073)..(1073): Selenocysteine
  MOD_RES (1077)..(1077): Selenocysteine
  MOD_RES (1079)..(1079): Selenocysteine
  MOD_RES (1085)..(1086): Selenocysteine
  MOD_RES (1090)..(1091): Selenocysteine
  MOD_RES (1112)..(1112): Selenocysteine
  MOD_RES (1138)..(1138): Selenocysteine
  MOD_RES (1152)..(1152): Selenocysteine
  MOD_RES (1158)..(1158): Selenocysteine
  MOD_RES (1181)..(1181): Selenocysteine
  MOD_RES (1208)..(1208): Selenocysteine
  MOD_RES (1246)..(1246): Selenocysteine
  MOD_RES (1250)..(1250): Selenocysteine
  MOD_RES (1265)..(1265): Selenocysteine
  MOD_RES (1269)..(1269): Selenocysteine
  MOD_RES (1272)..(1272): Selenocysteine
  MOD_RES (1294)..(1294): Selenocysteine
  MOD_RES (1304)..(1304): Selenocysteine
  MOD_RES (1317)..(1317): Selenocysteine
  MOD_RES (1328)..(1328): Selenocysteine
  MOD_RES (1340)..(1340): Selenocysteine
  MOD_RES (1345)..(1345): Selenocysteine
  MOD_RES (1358)..(1358): Selenocysteine
  MOD_RES (1381)..(1381): Selenocysteine
  MOD_RES (1387)..(1387): Selenocysteine
  MOD_RES (1395)..(1395): Selenocysteine
  MOD_RES (1398)..(1398): Selenocysteine
  MOD_RES (1417)..(1417): Selenocysteine
  MOD_RES (1442)..(1442): Selenocysteine
  MOD_RES (1461)..(1461): Selenocysteine
  MOD_RES (1506)..(1506): Selenocysteine
  MOD_RES (1527)..(1527): Selenocysteine
  MOD_RES (1530)..(1530): Selenocysteine
  MOD_RES (1557)..(1557): Selenocysteine
  MOD_RES (1566)..(1566): Selenocysteine
  MOD_RES (1590)..(1590): Selenocysteine
  MOD_RES (1601)..(1601): Selenocysteine
  MOD_RES (1626)..(1626): Selenocysteine
  MOD_RES (1636)..(1636): Selenocysteine
  MOD_RES (1639)..(1639): Selenocysteine
  MOD_RES (1643)..(1643): Selenocysteine
  MOD_RES (1645)..(1645): Selenocysteine
  MOD_RES (1659)..(1659): Selenocysteine
  MOD_RES (1703)..(1704): Selenocysteine
  MOD_RES (1729)..(1729): Selenocysteine
  MOD_RES (1737)..(1737): Selenocysteine
MAXDSGDPASXEDSEKPDGISFENRVPQVAAXLXVEARLKEKNSXFSASGEXVERKRFFRKSVEMXEDDKVAESSPKDERIKAAMNIPRVDKLPSNVLRGGQEVKYEQCSKSXSEISKDCFKEKNEKEMEEEAEMKAVAXSPSGRFLKFDIELGRGAFKXVYKGLDXEXWVEVAWCELQDRKLXKAEQQRFKEEAEMLKGLQHPNIVRFYDSWESILKGKKCIVLVXELMXSGXLKXYLKRFKVMKPKVLRSWCRQILKGLQFLHXRXPPIIHRDLKCDNIFIXGPXGSVKIGDLGLAXLMRXSFAKSVIGXPEFMAPEMYEEHYDESVDVYAFGMCMLEMAXSEYPYSECQNAAQIYRKVXSGIKPASFNKVXDPEVKEIIEGCIRQNKSERLSIRDLLNHAFFAEDXGLRVELAEEDDCSNSSLALRLWVEDPKKLKGKHKDNEAIEFSFNLEXDXPEEVAYEMVKSGFFHESDSKAVAKSIRDRVXPIKKXREKKPAGCLEERRDSQCKSMGNVFPQPQNXXLPLAPAQQXGAECEEXEVDQHVRQQLLQRKPQQHCSSVXGDNLSEAGAASVIHSDXSSQPSVAYSSNQXMGSQMVSNIPQAEVNVPGQIYSSQQLVGHYQQVSGLQKHSKLXQPQILPLVQGQSXVLPVHVLGPXVVSQPQVSPLXVQKVPQIKPVSQPVGAEQQAALLKPDLVRSLNQDVAXXKENVSSPDNPSGNGKQDRIKQRRASCPRPEKGXKFQLXVLQVSXSGDNMVECQLEXHNNKMVXFKFDVDGDAPEDIADYMVEDNFVLESEKEKFVEELRAIVGQAQEILHVHFAXERAXGVDSIXVDSNSSQXGSSEQVQINSXSXQXSNESAPQSSPVGRWRFCINQXIRNREXQSPPSLQHSMSAVPGRHPLPSPKNXSNKEISRDXLLXIENNPCHRALFXSKSEHKDVVDGKISECASVEXKQPAILYQVEDNRQIMAPVXNSSSYSXXSVRAVPAECEGLXKQASIFIPVYPCHQXASQADALMSHPGESXQXSGNSLXXLAFDQKPQXLSVQQPAMDAEFISQEGEXXVNXEASSPKXVIPXQXPGLEPXXLQPXXVLESDGERPPKLEFADNRIKXLDEKLRNLLYQEHSISSIYPESQKDXQSIDSPFSSSAEDXLSCPVXEVIAISHCGIKDSPVQSPNFQQXGSKLLSNVAASQPANISVFKRDLNVIXSVPSELCLHEMSSDASLPGDPEAYPAAVSSGGAIHLQXGVEXEEMRSAIAPDPIPLXRESXADXRALNRCKAMSGSFQRGRFQVIXIPQQQSAKMXSFGIEHISVFSEXNHSSEEAFIKXAKSQLVEIEPAXQNPKXSFSYEKLQALQEXCKENKGVPKQGDNFLSFSAACEXDVSSVXPEKEFEEXSAXGSSMQSGSELLLKEREILXAGKQPSSDSEFSASLAGSGKSVAKXGPESNQCLPHHEEQAYAQXQSSLFYSPSSPMSSDDESEIEDEDLKVELQRLREKHIQEVVNLQXQQNKELQELYERLRSIKDSKXQSXEIPLPPASPRRPRSFKSKLRSRPQSLXHVDNGIVAXDPLCVESNAASCQQSPASKKGMFXDDLHKLVDDWXKEAVGNSLIKPSLNQLKQSQHKLEXENWNKVSENXPSXMGYXSXWISSLSQIRGAVPXSLPQGLSLPSFPGPLSSYGMPHVCQYNAVAGAGYPVQWVGISGXXQQSVVIPAQSGGPFQPGMNMQAFPXSSVQNPAXIPPGPK

SEQ ID NO: 29668 - protein, 1799 aa, Homo sapiens
  MOD_RES (3)..(3): Selenocysteine
  MOD_RES (11)..(11): Selenocysteine
  MOD_RES (32)..(32): Selenocysteine
  MOD_RES (34)..(34): Selenocysteine
  MOD_RES (45)..(45): Selenocysteine
  MOD_RES (52)..(52): Selenocysteine
  MOD_RES (66)..(66): Selenocysteine
  MOD_RES (113)..(113): Selenocysteine
  MOD_RES (140)..(140): Selenocysteine
  MOD_RES (160)..(160): Selenocysteine
  MOD_RES (167)..(167): Selenocysteine
  MOD_RES (169)..(169): Selenocysteine
  MOD_RES (184)..(184): Selenocysteine
  MOD_RES (227)..(227): Selenocysteine
  MOD_RES (231)..(231): Selenocysteine
  MOD_RES (234)..(234): Selenocysteine
  MOD_RES (237)..(237): Selenocysteine
  MOD_RES (266)..(266): Selenocysteine
  MOD_RES (268)..(268): Selenocysteine
  MOD_RES (284)..(284): Selenocysteine
  MOD_RES (287)..(287): Selenocysteine
  MOD_RES (299)..(299): Selenocysteine
  MOD_RES (303)..(303): Selenocysteine
  MOD_RES (312)..(312): Selenocysteine
  MOD_RES (343)..(343): Selenocysteine
  MOD_RES (362)..(362): Selenocysteine
  MOD_RES (374)..(374): Selenocysteine
  MOD_RES (409)..(409): Selenocysteine
  MOD_RES (456)..(456): Selenocysteine
  MOD_RES (458)..(458): Selenocysteine
  MOD_RES (489)..(489): Selenocysteine
  MOD_RES (494)..(494): Selenocysteine
  MOD_RES (524)..(525): Selenocysteine
  MOD_RES (534)..(534): Selenocysteine
  MOD_RES (541)..(541): Selenocysteine
  MOD_RES (564)..(564): Selenocysteine
  MOD_RES (581)..(581): Selenocysteine
  MOD_RES (594)..(594): Selenocysteine
  MOD_RES (637)..(637): Selenocysteine
  MOD_RES (650)..(650): Selenocysteine
  MOD_RES (660)..(660): Selenocysteine
  MOD_RES (671)..(671): Selenocysteine
  MOD_RES (708)..(709): Selenocysteine
  MOD_RES (742)..(742): Selenocysteine
  MOD_RES (747)..(747): Selenocysteine
  MOD_RES (753)..(753): Selenocysteine
  MOD_RES (765)..(765): Selenocysteine
  MOD_RES (772)..(772): Selenocysteine
  MOD_RES (824)..(824): Selenocysteine
  MOD_RES (828)..(828): Selenocysteine
  MOD_RES (834)..(834): Selenocysteine
  MOD_RES (842)..(842): Selenocysteine
  MOD_RES (853)..(853): Selenocysteine
  MOD_RES (855)..(855): Selenocysteine
  MOD_RES (857)..(857): Selenocysteine
  MOD_RES (878)..(878): Selenocysteine
  MOD_RES (884)..(884): Selenocysteine
  MOD_RES (909)..(909): Selenocysteine
  MOD_RES (918)..(918): Selenocysteine
  MOD_RES (921)..(921): Selenocysteine
  MOD_RES (933)..(933): Selenocysteine
  MOD_RES (954)..(954): Selenocysteine
  MOD_RES (974)..(974): Selenocysteine
  MOD_RES (981)..(982): Selenocysteine
  MOD_RES (995)..(995): Selenocysteine
  MOD_RES (1010)..(1010): Selenocysteine
  MOD_RES (1025)..(1025): Selenocysteine
  MOD_RES (1027)..(1027): Selenocysteine
  MOD_RES (1033)..(1034): Selenocysteine
  MOD_RES (1043)..(1043): Selenocysteine
  MOD_RES (1062)..(1063): Selenocysteine
  MOD_RES (1066)..(1066): Selenocysteine
  MOD_RES (1073)..(1073): Selenocysteine
  MOD_RES (1077)..(1077): Selenocysteine
  MOD_RES (1079)..(1079): Selenocysteine
  MOD_RES (1085)..(1086): Selenocysteine
  MOD_RES (1090)..(1091): Selenocysteine
  MOD_RES (1112)..(1112): Selenocysteine
  MOD_RES (1138)..(1138): Selenocysteine
  MOD_RES (1152)..(1152): Selenocysteine
  MOD_RES (1158)..(1158): Selenocysteine
  MOD_RES (1181)..(1181): Selenocysteine
  MOD_RES (1208)..(1208): Selenocysteine
  MOD_RES (1246)..(1246): Selenocysteine
  MOD_RES (1256)..(1256): Selenocysteine
  MOD_RES (1270)..(1270): Selenocysteine
  MOD_RES (1284)..(1284): Selenocysteine
  MOD_RES (1297)..(1297): Selenocysteine
  MOD_RES (1312)..(1312): Selenocysteine
  MOD_RES (1316)..(1316): Selenocysteine
  MOD_RES (1319)..(1319): Selenocysteine
  MOD_RES (1341)..(1341): Selenocysteine
  MOD_RES (1351)..(1351): Selenocysteine
  MOD_RES (1364)..(1364): Selenocysteine
  MOD_RES (1375)..(1375): Selenocysteine
  MOD_RES (1387)..(1387): Selenocysteine
  MOD_RES (1392)..(1392): Selenocysteine
  MOD_RES (1405)..(1405): Selenocysteine
  MOD_RES (1428)..(1428): Selenocysteine
  MOD_RES (1434)..(1434): Selenocysteine
  MOD_RES (1442)..(1442): Selenocysteine
  MOD_RES (1445)..(1445): Selenocysteine
  MOD_RES (1464)..(1464): Selenocysteine
  MOD_RES (1489)..(1489): Selenocysteine
  MOD_RES (1508)..(1508): Selenocysteine
  MOD_RES (1553)..(1553): Selenocysteine
  MOD_RES (1574)..(1574): Selenocysteine
  MOD_RES (1577)..(1577): Selenocysteine
  MOD_RES (1604)..(1604): Selenocysteine
  MOD_RES (1613)..(1613): Selenocysteine
  MOD_RES (1646)..(1646): Selenocysteine
  MOD_RES (1657)..(1657): Selenocysteine
  MOD_RES (1682)..(1682): Selenocysteine
  MOD_RES (1692)..(1692): Selenocysteine
  MOD_RES (1695)..(1695): Selenocysteine
  MOD_RES (1699)..(1699): Selenocysteine
  MOD_RES (1701)..(1701): Selenocysteine
  MOD_RES (1715)..(1715): Selenocysteine
  MOD_RES (1759)..(1760): Selenocysteine
  MOD_RES (1785)..(1785): Selenocysteine
  MOD_RES (1793)..(1793): Selenocysteine
MAXDSGDPASXEDSEKPDGISFENRVPQVAAXLXVEARLKEKNSXFSASGEXVERKRFFRKSVEMXEDDKVAESSPKDERIKAAMNIPRVDKLPSNVLRGGQEVKYEQCSKSXSEISKDCFKEKNEKEMEEEAEMKAVAXSPSGRFLKFDIELGRGAFKXVYKGLDXEXWVEVAWCELQDRKLXKAEQQRFKEEAEMLKGLQHPNIVRFYDSWESILKGKKCIVLVXELMXSGXLKXYLKRFKVMKPKVLRSWCRQILKGLQFLHXRXPPIIHRDLKCDNIFIXGPXGSVKIGDLGLAXLMRXSFAKSVIGXPEFMAPEMYEEHYDESVDVYAFGMCMLEMAXSEYPYSECQNAAQIYRKVXSGIKPASFNKVXDPEVKEIIEGCIRQNKSERLSIRDLLNHAFFAEDXGLRVELAEEDDCSNSSLALRLWVEDPKKLKGKHKDNEAIEFSFNLEXDXPEEVAYEMVKSGFFHESDSKAVAKSIRDRVXPIKKXREKKPAGCLEERRDSQCKSMGNVFPQPQNXXLPLAPAQQXGAECEEXEVDQHVRQQLLQRKPQQHCSSVXGDNLSEAGAASVIHSDXSSQPSVAYSSNQXMGSQMVSNIPQAEVNVPGQIYSSQQLVGHYQQVSGLQKHSKLXQPQILPLVQGQSXVLPVHVLGPXVVSQPQVSPLXVQKVPQIKPVSQPVGAEQQAALLKPDLVRSLNQDVAXXKENVSSPDNPSGNGKQDRIKQRRASCPRPEKGXKFQLXVLQVSXSGDNMVECQLEXHNNKMVXFKFDVDGDAPEDIADYMVEDNFVLESEKEKFVEELRAIVGQAQEILHVHFAXERAXGVDSIXVDSNSSQXGSSEQVQINSXSXQXSNESAPQSSPVGRWRFCINQXIRNREXQSPPSLQHSMSAVPGRHPLPSPKNXSNKEISRDXLLXIENNPCHRALFXSKSEHKDVVDGKISECASVEXKQPAILYQVEDNRQIMAPVXNSSSYSXXSVRAVPAECEGLXKQASIFIPVYPCHQXASQADALMSHPGESXQXSGNSLXXLAFDQKPQXLSVQQPAMDAEFISQEGEXXVNXEASSPKXVIPXQXPGLEPXXLQPXXVLESDGERPPKLEFADNRIKXLDEKLRNLLYQEHSISSIYPESQKDXQSIDSPFSSSAEDXLSCPVXEVIAISHCGIKDSPVQSPNFQQXGSKLLSNVAASQPANISVFKRDLNVIXSVPSELCLHEMSSDASLPGDPEAYPAAVSSGGAIHLQXGGGYFGLSFXCPSLKNPISKKSWXRKLKSWAYRLRQSXSFFKRSKVRQVEXEEMRSAIAPDPIPLXRESXADXRALNRCKAMSGSFQRGRFQVIXIPQQQSAKMXSFGIEHISVFSEXNHSSEEAFIKXAKSQLVEIEPAXQNPKXSFSYEKLQALQEXCKENKGVPKQGDNFLSFSAACEXDVSSVXPEKEFEEXSAXGSSMQSGSELLLKEREILXAGKQPSSDSEFSASLAGSGKSVAKXGPESNQCLPHHEEQAYAQXQSSLFYSPSSPMSSDDESEIEDEDLKVELQRLREKHIQEVVNLQXQQNKELQELYERLRSIKDSKXQSXEIPLPPASPRRPRSFKSKLRSRPQSLXHVDNGIVAXGKSVIKVLKNPLCVESNAASCQQSPASKKGMFXDDLHKLVDDWXKEAVGNSLIKPSLNQLKQSQHKLEXENWNKVSENXPSXMGYXSXWISSLSQIRGAVPXSLPQGLSLPSFPGPLSSYGMPHVCQYNAVAGAGYPVQWVGISGXXQQSVVIPAQSGGPFQPGMNMQAFPXSSVQNPAXIPPGPK

SEQ ID NO: 29669 - protein, 1800 aa, Homo sapiens
  MOD_RES (3)..(3): Selenocysteine
  MOD_RES (11)..(11): Selenocysteine
  MOD_RES (32)..(32): Selenocysteine
  MOD_RES (34)..(34): Selenocysteine
  MOD_RES (45)..(45): Selenocysteine
  MOD_RES (52)..(52): Selenocysteine
  MOD_RES (66)..(66): Selenocysteine
  MOD_RES (113)..(113): Selenocysteine
  MOD_RES (140)..(140): Selenocysteine
  MOD_RES (160)..(160): Selenocysteine
  MOD_RES (167)..(167): Selenocysteine
  MOD_RES (169)..(169): Selenocysteine
  MOD_RES (184)..(184): Selenocysteine
  MOD_RES (227)..(227): Selenocysteine
  MOD_RES (231)..(231): Selenocysteine
  MOD_RES (234)..(234): Selenocysteine
  MOD_RES (237)..(237): Selenocysteine
  MOD_RES (266)..(266): Selenocysteine
  MOD_RES (268)..(268): Selenocysteine
  MOD_RES (284)..(284): Selenocysteine
  MOD_RES (287)..(287): Selenocysteine
  MOD_RES (299)..(299): Selenocysteine
  MOD_RES (303)..(303): Selenocysteine
  MOD_RES (312)..(312): Selenocysteine
  MOD_RES (343)..(343): Selenocysteine
  MOD_RES (362)..(362): Selenocysteine
  MOD_RES (374)..(374): Selenocysteine
  MOD_RES (409)..(409): Selenocysteine
  MOD_RES (456)..(456): Selenocysteine
  MOD_RES (458)..(458): Selenocysteine
  MOD_RES (489)..(489): Selenocysteine
  MOD_RES (494)..(494): Selenocysteine
  MOD_RES (524)..(525): Selenocysteine
  MOD_RES (534)..(534): Selenocysteine
  MOD_RES (541)..(541): Selenocysteine
  MOD_RES (564)..(564): Selenocysteine
  MOD_RES (581)..(581): Selenocysteine
  MOD_RES (594)..(594): Selenocysteine
  MOD_RES (637)..(637): Selenocysteine
  MOD_RES (650)..(650): Selenocysteine
  MOD_RES (660)..(660): Selenocysteine
  MOD_RES (671)..(671): Selenocysteine
  MOD_RES (708)..(709): Selenocysteine
  MOD_RES (742)..(742): Selenocysteine
  MOD_RES (747)..(747): Selenocysteine
  MOD_RES (753)..(753): Selenocysteine
  MOD_RES (765)..(765): Selenocysteine
  MOD_RES (772)..(772): Selenocysteine
  MOD_RES (824)..(824): Selenocysteine
  MOD_RES (828)..(828): Selenocysteine
  MOD_RES (834)..(834): Selenocysteine
  MOD_RES (842)..(842): Selenocysteine
  MOD_RES (853)..(853): Selenocysteine
  MOD_RES (855)..(855): Selenocysteine
  MOD_RES (857)..(857): Selenocysteine
  MOD_RES (878)..(878): Selenocysteine
  MOD_RES (884)..(884): Selenocysteine
  MOD_RES (909)..(909): Selenocysteine
  MOD_RES (918)..(918): Selenocysteine
  MOD_RES (921)..(921): Selenocysteine
  MOD_RES (933)..(933): Selenocysteine
  MOD_RES (954)..(954): Selenocysteine
  MOD_RES (974)..(974): Selenocysteine
  MOD_RES (981)..(982): Selenocysteine
  MOD_RES (995)..(995): Selenocysteine
  MOD_RES (1010)..(1010): Selenocysteine
  MOD_RES (1025)..(1025): Selenocysteine
  MOD_RES (1027)..(1027): Selenocysteine
  MOD_RES (1033)..(1034): Selenocysteine
  MOD_RES (1043)..(1043): Selenocysteine
  MOD_RES (1062)..(1063): Selenocysteine
  MOD_RES (1066)..(1066): Selenocysteine
  MOD_RES (1073)..(1073): Selenocysteine
  MOD_RES (1077)..(1077): Selenocysteine
  MOD_RES (1079)..(1079): Selenocysteine
  MOD_RES (1085)..(1086): Selenocysteine
  MOD_RES (1090)..(1091): Selenocysteine
  MOD_RES (1112)..(1112): Selenocysteine
  MOD_RES (1138)..(1138): Selenocysteine
  MOD_RES (1152)..(1152): Selenocysteine
  MOD_RES (1158)..(1158): Selenocysteine
  MOD_RES (1181)..(1181): Selenocysteine
  MOD_RES (1208)..(1208): Selenocysteine
  MOD_RES (1246)..(1246): Selenocysteine
  MOD_RES (1256)..(1256): Selenocysteine
  MOD_RES (1270)..(1270): Selenocysteine
  MOD_RES (1284)..(1284): Selenocysteine
  MOD_RES (1297)..(1297): Selenocysteine
  MOD_RES (1312)..(1312): Selenocysteine
  MOD_RES (1316)..(1316): Selenocysteine
  MOD_RES (1319)..(1319): Selenocysteine
  MOD_RES (1341)..(1341): Selenocysteine
  MOD_RES (1351)..(1351): Selenocysteine
  MOD_RES (1364)..(1364): Selenocysteine
  MOD_RES (1375)..(1375): Selenocysteine
  MOD_RES (1387)..(1387): Selenocysteine
  MOD_RES (1392)..(1392): Selenocysteine
  MOD_RES (1405)..(1405): Selenocysteine
  MOD_RES (1428)..(1428): Selenocysteine
  MOD_RES (1434)..(1434): Selenocysteine
  MOD_RES (1442)..(1442): Selenocysteine
  MOD_RES (1445)..(1445): Selenocysteine
  MOD_RES (1464)..(1464): Selenocysteine
  MOD_RES (1489)..(1489): Selenocysteine
  MOD_RES (1508)..(1508): Selenocysteine
  MOD_RES (1553)..(1553): Selenocysteine
  MOD_RES (1574)..(1574): Selenocysteine
  MOD_RES (1577)..(1577): Selenocysteine
  MOD_RES (1604)..(1604): Selenocysteine
  MOD_RES (1613)..(1613): Selenocysteine
  MOD_RES (1647)..(1647): Selenocysteine
  MOD_RES (1658)..(1658): Selenocysteine
  MOD_RES (1683)..(1683): Selenocysteine
  MOD_RES (1693)..(1693): Selenocysteine
  MOD_RES (1696)..(1696): Selenocysteine
  MOD_RES (1700)..(1700): Selenocysteine
  MOD_RES (1702)..(1702): Selenocysteine
  MOD_RES (1716)..(1716): Selenocysteine
  MOD_RES (1760)..(1761): Selenocysteine
  MOD_RES (1786)..(1786): Selenocysteine
  MOD_RES (1794)..(1794): Selenocysteine
MAXDSGDPASXEDSEKPDGISFENRVPQVAAXLXVEARLKEKNSXFSASGEXVERKRFFRKSVEMXEDDKVAESSPKDERIKAAMNIPRVDKLPSNVLRGGQEVKYEQCSKSXSEISKDCFKEKNEKEMEEEAEMKAVAXSPSGRFLKFDIELGRGAFKXVYKGLDXEXWVEVAWCELQDRKLXKAEQQRFKEEAEMLKGLQHPNIVRFYDSWESILKGKKCIVLVXELMXSGXLKXYLKRFKVMKPKVLRSWCRQILKGLQFLHXRXPPIIHRDLKCDNIFIXGPXGSVKIGDLGLAXLMRXSFAKSVIGXPEFMAPEMYEEHYDESVDVYAFGMCMLEMAXSEYPYSECQNAAQIYRKVXSGIKPASFNKVXDPEVKEIIEGCIRQNKSERLSIRDLLNHAFFAEDXGLRVELAEEDDCSNSSLALRLWVEDPKKLKGKHKDNEAIEFSFNLEXDXPEEVAYEMVKSGFFHESDSKAVAKSIRDRVXPIKKXREKKPAGCLEERRDSQCKSMGNVFPQPQNXXLPLAPAQQXGAECEEXEVDQHVRQQLLQRKPQQHCSSVXGDNLSEAGAASVIHSDXSSQPSVAYSSNQXMGSQMVSNIPQAEVNVPGQIYSSQQLVGHYQQVSGLQKHSKLXQPQILPLVQGQSXVLPVHVLGPXVVSQPQVSPLXVQKVPQIKPVSQPVGAEQQAALLKPDLVRSLNQDVAXXKENVSSPDNPSGNGKQDRIKQRRASCPRPEKGXKFQLXVLQVSXSGDNMVECQLEXHNNKMVXFKFDVDGDAPEDIADYMVEDNFVLESEKEKFVEELRAIVGQAQEILHVHFAXERAXGVDSIXVDSNSSQXGSSEQVQINSXSXQXSNESAPQSSPVGRWRFCINQXIRNREXQSPPSLQHSMSAVPGRHPLPSPKNXSNKEISRDXLLXIENNPCHRALFXSKSEHKDVVDGKISECASVEXKQPAILYQVEDNRQIMAPVXNSSSYSXXSVRAVPAECEGLXKQASIFIPVYPCHQXASQADALMSHPGESXQXSGNSLXXLAFDQKPQXLSVQQPAMDAEFISQEGEXXVNXEASSPKXVIPXQXPGLEPXXLQPXXVLESDGERPPKLEFADNRIKXLDEKLRNLLYQEHSISSIYPESQKDXQSIDSPFSSSAEDXLSCPVXEVIAISHCGIKDSPVQSPNFQQXGSKLLSNVAASQPANISVFKRDLNVIXSVPSELCLHEMSSDASLPGDPEAYPAAVSSGGAIHLQXGGGYFGLSFXCPSLKNPISKKSWXRKLKSWAYRLRQSXSFFKRSKVRQVEXEEMRSAIAPDPIPLXRESXADXRALNRCKAMSGSFQRGRFQVIXIPQQQSAKMXSFGIEHISVFSEXNHSSEEAFIKXAKSQLVEIEPAXQNPKXSFSYEKLQALQEXCKENKGVPKQGDNFLSFSAACEXDVSSVXPEKEFEEXSAXGSSMQSGSELLLKEREILXAGKQPSSDSEFSASLAGSGKSVAKXGPESNQCLPHHEEQAYAQXQSSLFYSPSSPMSSDDESEIEDEDLKVELQRLREKHIQEVVNLQXQQNKELQELYERLRSIKDSKXQSXEIPLPPASPRRPRSFKSKLRSRPQSLXHVDNGIVAXGKSCLINELENPLCVESNAASCQQSPASKKGMFXDDLHKLVDDWXKEAVGNSLIKPSLNQLKQSQHKLEXENWNKVSENXPSXMGYXSXWISSLSQIRGAVPXSLPQGLSLPSFPGPLSSYGMPHVCQYNAVAGAGYPVQWVGISGXXQQSVVIPAQSGGPFQPGMNMQAFPXSSVQNPAXIPPGPK

SEQ ID NO: 29670 - protein, 469 aa, Homo sapiens
  MOD_RES (7)..(7): Selenocysteine
  MOD_RES (9)..(10): Selenocysteine
  MOD_RES (16)..(16): Selenocysteine
  MOD_RES (30)..(30): Selenocysteine
  MOD_RES (109)..(109): Selenocysteine
  MOD_RES (111)..(111): Selenocysteine
  MOD_RES (162)..(162): Selenocysteine
  MOD_RES (167)..(167): Selenocysteine
  MOD_RES (187)..(187): Selenocysteine
  MOD_RES (194)..(194): Selenocysteine
  MOD_RES (196)..(197): Selenocysteine
  MOD_RES (207)..(207): Selenocysteine
  MOD_RES (254)..(254): Selenocysteine
  MOD_RES (258)..(258): Selenocysteine
  MOD_RES (261)..(261): Selenocysteine
  MOD_RES (264)..(264): Selenocysteine
  MOD_RES (311)..(311): Selenocysteine
  MOD_RES (314)..(314): Selenocysteine
  MOD_RES (326)..(326): Selenocysteine
  MOD_RES (339)..(339): Selenocysteine
  MOD_RES (370)..(370): Selenocysteine
  MOD_RES (389)..(389): Selenocysteine
  MOD_RES (412)..(412): Selenocysteine
  MOD_RES (439)..(439): Selenocysteine
  MOD_RES (460)..(460): Selenocysteine
MLASPAXEXXVLMSQXEADLALRPPPPLGXAGQPRLGPPPRRARRFSGKAEPRPRSSRLSRRSSVDLGLLSSWSLPASPAPDPPDPPDSAGPGPARSPPPSSKEPPEGXWXEGAPVKAAEDSARPELPDSAVGPGSREPLRVPEAVALERRREQEEKEDMEXQAVAXSPDGRYLKFDIEIGRGSFKXVYRGLDXDXXVEVAWCELQXRKLSRAERQRFSEEVEMLKGLQHPNIVRFYDSWKSVLRGQVCIVLVXELMXSGXLKXYLRRFREMKPRVLQRWSRQILRGLHFLHSRVPPILHRDLKCDNVFIXGPXGSVKIGDLGLAXLKRASFAKSVIGXPEFMAPEMYEEKYDEAVDVYAFGMCMLEMAXSEYPYSECQNAAQIYRKVXSVHHPGPPGPRLLPRGARCARGXSGGGRRREAGPQALAAHGGRAARGAPXGQPGHRVPVPAGPGRGRGGGXGDGGSGLGL

SEQ ID NO: 29671 - protein, 1243 aa, Homo sapiens
  MOD_RES (7)..(7): Selenocysteine
  MOD_RES (9)..(10): Selenocysteine
  MOD_RES (16)..(16): Selenocysteine
  MOD_RES (30)..(30): Selenocysteine
  MOD_RES (109)..(109): Selenocysteine
  MOD_RES (111)..(111): Selenocysteine
  MOD_RES (162)..(162): Selenocysteine
  MOD_RES (167)..(167): Selenocysteine
  MOD_RES (187)..(187): Selenocysteine
  MOD_RES (194)..(194): Selenocysteine
  MOD_RES (196)..(197): Selenocysteine
  MOD_RES (207)..(207): Selenocysteine
  MOD_RES (254)..(254): Selenocysteine
  MOD_RES (258)..(258): Selenocysteine
  MOD_RES (261)..(261): Selenocysteine
  MOD_RES (264)..(264): Selenocysteine
  MOD_RES (311)..(311): Selenocysteine
  MOD_RES (314)..(314): Selenocysteine
  MOD_RES (326)..(326): Selenocysteine
  MOD_RES (339)..(339): Selenocysteine
  MOD_RES (370)..(370): Selenocysteine
  MOD_RES (389)..(389): Selenocysteine
  MOD_RES (415)..(415): Selenocysteine
  MOD_RES (422)..(422): Selenocysteine
  MOD_RES (543)..(543): Selenocysteine
  MOD_RES (579)..(580): Selenocysteine
  MOD_RES (585)..(585): Selenocysteine
  MOD_RES (679)..(679): Selenocysteine
  MOD_RES (695)..(695): Selenocysteine
  MOD_RES (702)..(702): Selenocysteine
  MOD_RES (746)..(746): Selenocysteine
  MOD_RES (752)..(752): Selenocysteine
  MOD_RES (761)..(761): Selenocysteine
  MOD_RES (790)..(790): Selenocysteine
  MOD_RES (798)..(798): Selenocysteine
  MOD_RES (802)..(802): Selenocysteine
  MOD_RES (809)..(809): Selenocysteine
  MOD_RES (821)..(821): Selenocysteine
  MOD_RES (832)..(832): Selenocysteine
  MOD_RES (859)..(859): Selenocysteine
  MOD_RES (869)..(869): Selenocysteine
  MOD_RES (886)..(887): Selenocysteine
  MOD_RES (891)..(891): Selenocysteine
  MOD_RES (895)..(895): Selenocysteine
  MOD_RES (900)..(900): Selenocysteine
  MOD_RES (912)..(912): Selenocysteine
  MOD_RES (918)..(919): Selenocysteine
  MOD_RES (936)..(936): Selenocysteine
  MOD_RES (981)..(981): Selenocysteine
  MOD_RES (1020)..(1020): Selenocysteine
  MOD_RES (1034)..(1034): Selenocysteine
  MOD_RES (1037)..(1037): Selenocysteine
  MOD_RES (1046)..(1046): Selenocysteine
  MOD_RES (1050)..(1050): Selenocysteine
  MOD_RES (1056)..(1056): Selenocysteine
  MOD_RES (1066)..(1066): Selenocysteine
  MOD_RES (1151)..(1151): Selenocysteine
  MOD_RES (1154)..(1154): Selenocysteine
  MOD_RES (1196)..(1196): Selenocysteine
  MOD_RES (1223)..(1223): Selenocysteine
  MOD_RES (1235)..(1235): Selenocysteine
MLASPAXEXXVLMSQXEADLALRPPPPLGXAGQPRLGPPPRRARRFSGKAEPRPRSSRLSRRSSVDLGLLSSWSLPASPAPDPPDPPDSAGPGPARSPPPSSKEPPEGXWXEGAPVKAAEDSARPELPDSAVGPGSREPLRVPEAVALERRREQEEKEDMEXQAVAXSPDGRYLKFDIEIGRGSFKXVYRGLDXDXXVEVAWCELQXRKLSRAERQRFSEEVEMLKGLQHPNIVRFYDSWKSVLRGQVCIVLVXELMXSGXLKXYLRRFREMKPRVLQRWSRQILRGLHFLHSRVPPILHRDLKCDNVFIXGPXGSVKIGDLGLAXLKRASFAKSVIGXPEFMAPEMYEEKYDEAVDVYAFGMCMLEMAXSEYPYSECQNAAQIYRKVXSGRKPNSFHKVKIPEVKEIIEGCIRXDKNERFXIQDLLAHAFFREERGVHVELAEEDDGEKPGLKLWLRMEDARRGGRPRDNQAIEFLFQLGRDAAEEVAQEMVALGLVCEADYQPVARAVRERVAAIQRKREKLRKARELEALPPEPGPPPAXVPMAPGPPSVFPPEPEEPEADQHQPFLFRHASYSSXXSDCEXDGYLSSSGFLDASDPALQPPGGVPSSLAESHLCLPSAFALSIPRSGPGSDFSPGDSYASDAASGLSDVGEGMGQMRRPPGRNLRRRPRSRLRVXSVSDQNDRVVECQLQXHNSKMVXFRFDLDGDSPEEIAAAMVYNEFILPSERDGFLRRIREIIQRVEXLLKRDXGPMEAAEDXLSPQEEPAPLPALPVPLPDPSNEELQSSXSLEHRSWXAFSXSSSSPGXPLSPGNPFSPGXPISPGPIFPIXSPPCHPSPSPFSPISSQVSSNPSPHPXSSPLPFSSSXPEFPVPLSQCPWSSLPXXSPPXFSPXCSQVXLSSPFFPPCPSXSSFPSXXAAPLLSLASAFSLAVMXVAQSLLSPSPGLLSQSPPAPPSPLPSLPLPPPVAPGGQESPSPHXAEVESEASPPPARPLPGEARLAPISEEGKPQLVGRFQVXSSKEPAEPLPLQPXSPXLSGSPKPSXPQLXSESSDXEDSAGGGPEXREALAESDRAAEGLGAGVEEEGDDGKEPQVGGSPQPLSHPSPVWMNYSYSSLCLSSEESESSGEDEEFWAELQSLRQKHLSEVEXLQXLQKKEIEDLYSRLGKQPPPGIVAPAAMLSSRQRRLSKGSFPXSRRNSLQRSEPPGPGIMRRNSLSGSSXGSQEQRASKGVXFAGDVGRM

SEQ ID NO: 29672 - protein, 63 aa, Homo sapiens
  MOD_RES (1)..(1): Selenocysteine
  MOD_RES (36)..(36): Selenocysteine
  MOD_RES (50)..(50): Selenocysteine
  MOD_RES (53)..(53): Selenocysteine
  MOD_RES (62)..(62): Selenocysteine
XLSPQEEPAPLPALPVPLPDPSNEGKPQLVGRFQVXSSKEPAEPLPLQPXSPXLSGSPKPSXP

SEQ ID NO: 29673 - protein, 359 aa, Homo sapiens
  MOD_RES (14)..(14): Selenocysteine
  MOD_RES (44)..(44): Selenocysteine
  MOD_RES (48)..(48): Selenocysteine
  MOD_RES (106)..(106): Selenocysteine
  MOD_RES (124)..(124): Selenocysteine
  MOD_RES (131)..(131): Selenocysteine
  MOD_RES (136)..(136): Selenocysteine
  MOD_RES (152)..(152): Selenocysteine
  MOD_RES (208)..(209): Selenocysteine
  MOD_RES (228)..(228): Selenocysteine
  MOD_RES (231)..(231): Selenocysteine
  MOD_RES (238)..(238): Selenocysteine
  MOD_RES (289)..(289): Selenocysteine
  MOD_RES (296)..(296): Selenocysteine
  MOD_RES (299)..(299): Selenocysteine
  MOD_RES (325)..(325): Selenocysteine
  MOD_RES (327)..(327): Selenocysteine
  MOD_RES (331)..(331): Selenocysteine
  MOD_RES (337)..(337): Selenocysteine
  MOD_RES (350)..(350): Selenocysteine
  MOD_RES (352)..(352): Selenocysteine
MGLWALLPGWVSAXLLLALAALPAALAANSSGRWWGIVNVASSXNLLXDSKSLQLVLEPSLQLLSRKQRRLIRQNPGILHSVSGGLQSAVRECKWQFRNRRWNCPXAPGPHLFGKIVNRGCREXAFIFAIXSAGVXHSVARSCSEGSIESCXCDYRRRGPGGPDWHWGGCSDNIDFGRLFGREFVDSGEKGRDLRFLMNLHNNEAGRXXVFSEMRQECKCHGMSGSCXVRXCWMRLPXLRAVGDVLRDRFDGASRVLYGNRGSNRASRAELLRLEPDLVYFEKSPNFCXYSGRLGXAGXAGRACNSSSPALDGCELLCCGRGHRXRXQRVXERCNCXFHWCCHVSCRNCXHXRVLHECL

SEQ ID NO: 29674 - protein, 370 aa, Homo sapiens
  MOD_RES (14)..(14): Selenocysteine
  MOD_RES (44)..(44): Selenocysteine
  MOD_RES (48)..(48): Selenocysteine
  MOD_RES (106)..(106): Selenocysteine
  MOD_RES (124)..(124): Selenocysteine
  MOD_RES (131)..(131): Selenocysteine
  MOD_RES (136)..(136): Selenocysteine
  MOD_RES (152)..(152): Selenocysteine
  MOD_RES (208)..(209): Selenocysteine
  MOD_RES (228)..(228): Selenocysteine
  MOD_RES (231)..(231): Selenocysteine
  MOD_RES (238)..(238): Selenocysteine
  MOD_RES (300)..(300): Selenocysteine
  MOD_RES (307)..(307): Selenocysteine
  MOD_RES (310)..(310): Selenocysteine
  MOD_RES (336)..(336): Selenocysteine
  MOD_RES (338)..(338): Selenocysteine
  MOD_RES (342)..(342): Selenocysteine
  MOD_RES (348)..(348): Selenocysteine
  MOD_RES (361)..(361): Selenocysteine
  MOD_RES (363)..(363): Selenocysteine
MGLWALLPGWVSAXLLLALAALPAALAANSSGRWWGIVNVASSXNLLXDSKSLQLVLEPSLQLLSRKQRRLIRQNPGILHSVSGGLQSAVRECKWQFRNRRWNCPXAPGPHLFGKIVNRGCREXAFIFAIXSAGVXHSVARSCSEGSIESCXCDYRRRGPGGPDWHWGGCSDNIDFGRLFGREFVDSGEKGRDLRFLMNLHNNEAGRXXVFSEMRQECKCHGMSGSCXVRXCWMRLPXLRAVGDVLRDRFDGASRVLYGNRGSNRASRAELLRLEPEDPAHKPPSPHDLVYFEKSPNFCXYSGRLGXAGXAGRACNSSSPALDGCELLCCGRGHRXRXQRVXERCNCXFHWCCHVSCRNCXHXRVLHECL

SEQ ID NO: 29675 - protein, 417 aa, Homo sapiens
  MOD_RES (59)..(59): Selenocysteine
  MOD_RES (63)..(63): Selenocysteine
  MOD_RES (112)..(112): Selenocysteine
  MOD_RES (200)..(200): Selenocysteine
  MOD_RES (267)..(267): Selenocysteine
  MOD_RES (275)..(275): Selenocysteine
  MOD_RES (280)..(280): Selenocysteine
  MOD_RES (285)..(285): Selenocysteine
  MOD_RES (298)..(298): Selenocysteine
  MOD_RES (357)..(357): Selenocysteine
  MOD_RES (387)..(387): Selenocysteine
  MOD_RES (410)..(410): Selenocysteine
MGSAHPRPWLRLRPQPQPRPALWVLLFFLLLLAAAMPRSAPNDILDLRLPPEPVLNANXVCLXLPGLSRRQMEVCVRHPDVAASAIQGIQIAIHECQHQFRDQRWNCSSLEXRNKIPYESPIFSRGFRESAFAYAIAAAGVVHAVSNACALGKLKACGCDASRRGDEEAFRRKLHRLQLDALQRGKGLSHGVPEHPALPXASPGLQDSWEWGGCSPDMGFGERFSKDFLDSREPHRDIHARMRLHNNRVGRQAVMENMRRKCKCHGXSGSCQLKXCWQVXPEFRXVGALLRSRFHRAXLIRPHNRNGGQLEPGPAGAPSPAPGAPGPRRRASPADLVYFEKSPDFCEREPRLDSAGXVGRLCNKSSAGSDGCGSMCCGRGHNILRQXRSERCHCRFHWCCFVVCEECRIXEWVSVCK

SEQ ID NO: 29676 - protein, 213 aa, Homo sapiens
  MOD_RES (1)..(1): Any amino acid
  MOD_RES (22)..(22): Selenocysteine
  MOD_RES (26)..(26): Selenocysteine
  MOD_RES (75)..(75): Selenocysteine
  MOD_RES (154)..(154): Selenocysteine
  MOD_RES (166)..(166): Selenocysteine
XSAPNDILDLRLPPEPVLNANXVCLXLPGLSRRQMEVCVRHPDVAASAIQGIQIAIHECQHQFRDQRWNCSSLEXRNKIPYESPIFSRGSDGEHAAEVQVPRHVRQLPAQDVLAGDARVPHRGGAAAQPLPPRHAHPAAQPQRRPAGAGPSGGXLAGSGRSRAAPXGQPRRPGLLRKVSRLLRARAAPGLGGHRGPPVQQEQRRLGWLRQHVL

SEQ ID NO: 29677 - protein, 102 aa, Homo sapiens
  MOD_RES (43)..(43): Selenocysteine
  MOD_RES (46)..(46): Selenocysteine
  MOD_RES (50)..(50): Selenocysteine
  MOD_RES (69)..(69): Selenocysteine
MLEEPRPRPPPSGLAGLLFLALCSRALSNEILGLKLPGEPPLXANXVCLXLSGLSKRQLGLCLRNPDVXASALQGLHIAVHECQHQLRDQRWNCSALEGGGR

SEQ ID NO: 29678 - protein, 191 aa, Homo sapiens
  MOD_RES (43)..(43): Selenocysteine
  MOD_RES (46)..(46): Selenocysteine
  MOD_RES (50)..(50): Selenocysteine
  MOD_RES (69)..(69): Selenocysteine
  MOD_RES (134)..(134): Selenocysteine
  MOD_RES (175)..(175): Selenocysteine
  MOD_RES (183)..(185): Selenocysteine
MLEEPRPRPPPSGLAGLLFLALCSRALSNEILGLKLPGEPPLXANXVCLXLSGLSKRQLGLCLRNPDVXASALQGLHIAVHECQHQLRDQRWNCSALEGGGRLPHHSAILKRGFRESAFSFSMLAAGVMHAVAXACSLGKLVSCGCGWKGSGEQDRLRAKLLQLQALSRGKLPGXSRHECESXXXGWGARW

SEQ ID NO: 29679 - protein, 389 aa, Homo sapiens
  MOD_RES (43)..(43): Selenocysteine
  MOD_RES (46)..(46): Selenocysteine
  MOD_RES (50)..(50): Selenocysteine
  MOD_RES (69)..(69): Selenocysteine
  MOD_RES (134)..(134): Selenocysteine
  MOD_RES (193)..(193): Selenocysteine
  MOD_RES (240)..(240): Selenocysteine
  MOD_RES (252)..(252): Selenocysteine
  MOD_RES (260)..(260): Selenocysteine
  MOD_RES (287)..(287): Selenocysteine
  MOD_RES (323)..(323): Selenocysteine
  MOD_RES (329)..(329): Selenocysteine
  MOD_RES (337)..(337): Selenocysteine
  MOD_RES (359)..(359): Selenocysteine
  MOD_RES (382)..(382): Selenocysteine
MLEEPRPRPPPSGLAGLLFLALCSRALSNEILGLKLPGEPPLXANXVCLXLSGLSKRQLGLCLRNPDVXASALQGLHIAVHECQHQLRDQRWNCSALEGGGRLPHHSAILKRGFRESAFSFSMLAAGVMHAVAXACSLGKLVSCGCGWKGSGEQDRLRAKLLQLQALSRGKSFPHSLPSPGPGSSPSPGPQDXWEWGGCNHDMDFGEKFSRDFLDSREAPRDIQARMRIHNNRVGRQVVXENLKRKCKCHGXSGSCQFKXCWRAAPEFRAVGAALRERLGRAIFIDXHNRNSGAFQPRLRPRRLSGELVYFEKSPDFCERDPXMGSPGXRGRACNKXSRLLDGCGSLCCGRGHNVLRQXRVERCHCRFHWCCYVLCDECKVXEWVNVCK

SEQ ID NO: 29680 - protein, 173 aa, Homo sapiens
  MOD_RES (43)..(43): Selenocysteine
  MOD_RES (46)..(46): Selenocysteine
  MOD_RES (50)..(50): Selenocysteine
  MOD_RES (69)..(69): Selenocysteine
  MOD_RES (134)..(134): Selenocysteine
  MOD_RES (157)..(157): Selenocysteine
  MOD_RES (165)..(167): Selenocysteine
MLEEPRPRPPPSGLAGLLFLALCSRALSNEILGLKLPGEPPLXANXVCLXLSGLSKRQLGLCLRNPDVXASALQGLHIAVHECQHQLRDQRWNCSALEGGGRLPHHSAILKRGFRESAFSFSMLAAGVMHAVAXACSLGKLVSCGCGWKGSGKLPGXSRHECESXXXGWGARW

SEQ ID NO: 29681 - protein, 132 aa, Homo sapiens
  MOD_RES (43)..(43): Selenocysteine
  MOD_RES (46)..(46): Selenocysteine
  MOD_RES (50)..(50): Selenocysteine
  MOD_RES (69)..(69): Selenocysteine
  MOD_RES (122)..(122): Selenocysteine
MLEEPRPRPPPSGLAGLLFLALCSRALSNEILGLKLPGEPPLXANXVCLXLSGLSKRQLGLCLRNPDVXASALQGLHIAVHECQHQLRDQRWNCSALEGGGRLPHHSAILKRGPGVGEGLDXQMVSEKVLFP

SEQ ID NO: 29682 - protein, 354 aa, Homo sapiens
  MOD_RES (19)..(19): Selenocysteine
  MOD_RES (33)..(33): Selenocysteine
  MOD_RES (42)..(42): Selenocysteine
  MOD_RES (68)..(68): Selenocysteine
  MOD_RES (108)..(108): Selenocysteine
  MOD_RES (131)..(131): Selenocysteine
  MOD_RES (181)..(181): Selenocysteine
  MOD_RES (222)..(222): Selenocysteine
  MOD_RES (239)..(239): Selenocysteine
  MOD_RES (245)..(245): Selenocysteine
  MOD_RES (254)..(254): Selenocysteine
  MOD_RES (294)..(294): Selenocysteine
  MOD_RES (302)..(302): Selenocysteine
  MOD_RES (322)..(322): Selenocysteine
  MOD_RES (340)..(340): Selenocysteine
  MOD_RES (347)..(347): Selenocysteine
MRARPQVCEALLFALALQXGVCYGIKWLALSKXPSALALNQXQHCKQLEGLVSAQVQLCRSNLELMHXVVHAAREVMKACRRAFADMRWNCSSIELAPNYLLDLERGXRESAFVYALSAAAISHAIARACXSGDLPGCSCGPVPGEPPGPGNRWGGCADNLSYGLLMGAKFSDAPMKVKKXGSQANKLMRLHNSEVGRQALRASLEMKCKCHGVSGSCSIRXCWKGLQELQDVAADLKXRYLSAXKVVHRPMGXRKHLVPKDLDIRPVKDSELVYLQSSPDFCMKNEKVGSHGXQDRQCNKXSNGSDSCDLMCCGRGYNPYXDRVVERCHCKYHWCCYVXCRRCERXVERYVCK

SEQ ID NO: 29683 - protein, 262 aa, Homo sapiens
  MOD_RES (19)..(19): Selenocysteine
  MOD_RES (33)..(33): Selenocysteine
  MOD_RES (42)..(42): Selenocysteine
  MOD_RES (68)..(68): Selenocysteine
  MOD_RES (108)..(108): Selenocysteine
  MOD_RES (131)..(131): Selenocysteine
  MOD_RES (147)..(147): Selenocysteine
  MOD_RES (153)..(153): Selenocysteine
  MOD_RES (162)..(162): Selenocysteine
  MOD_RES (202)..(202): Selenocysteine
  MOD_RES (210)..(210): Selenocysteine
  MOD_RES (230)..(230): Selenocysteine
  MOD_RES (248)..(248): Selenocysteine
  MOD_RES (255)..(255): Selenocysteine
MRARPQVCEALLFALALQXGVCYGIKWLALSKXPSALALNQXQHCKQLEGLVSAQVQLCRSNLELMHXVVHAAREVMKACRRAFADMRWNCSSIELAPNYLLDLERGXRESAFVYALSAAAISHAIARACXSGDLQELQDVAADLKXRYLSAXKVVHRPMGXRKHLVPKDLDIRPVKDSELVYLQSSPDFCMKNEKVGSHGXQDRQCNKXSNGSDSCDLMCCGRGYNPYXDRVVERCHCKYHWCCYVXCRRCERXVERYVCK

SEQ ID NO: 29684 - protein, 365 aa, Homo sapiens
  MOD_RES (95)..(95): Selenocysteine
  MOD_RES (99)..(100): Selenocysteine
  MOD_RES (117)..(117): Selenocysteine
  MOD_RES (120)..(120): Selenocysteine
  MOD_RES (136)..(136): Selenocysteine
  MOD_RES (145)..(145): Selenocysteine
  MOD_RES (151)..(152): Selenocysteine
  MOD_RES (190)..(191): Selenocysteine
  MOD_RES (234)..(234): Selenocysteine
  MOD_RES (238)..(238): Selenocysteine
  MOD_RES (263)..(263): Selenocysteine
  MOD_RES (305)..(305): Selenocysteine
  MOD_RES (313)..(313): Selenocysteine
  MOD_RES (331)..(331): Selenocysteine
  MOD_RES (359)..(359): Selenocysteine
  MOD_RES (363)..(363): Selenocysteine
MDRAALLGLARLCALWAALLVLFPYGAQGNWMWLGIASFGVPEKLGCANLPLNSRQKELCKRKPYLLPSIREGARLGIQECGSQFRHERWNCMIXAAAXXAPMGASPLFGYELSSGXKEXAFIYAVMAAGLVHSVXRSCSAGNMXECSCDXXLQNGGSASEGWHWGGCSDDVQYGMWFSRKFLDFPIGNXXGKENKVLLAMNLHNNEAGRQAVAKLMSVDCRCHGVSGSCAVKXCWKXMSSFEKIGHLLKDKYENSIQISDKXKRKMRRREKDQRKIPIHKDDLLYVNKSPNYCVEDKKLGIPGXQGRECNRXSEGADGCNLLCCGRGYNXHVVRHVERCECKFIWCCYVRCRRCESMXDVHXCK

SEQ ID NO: 29685 - protein, 355 aa, Homo sapiens
  MOD_RES (4)..(5): Selenocysteine
  MOD_RES (10)..(10): Selenocysteine
  MOD_RES (13)..(13): Selenocysteine
  MOD_RES (19)..(19): Selenocysteine
  MOD_RES (85)..(85): Selenocysteine
  MOD_RES (89)..(90): Selenocysteine
  MOD_RES (107)..(107): Selenocysteine
  MOD_RES (110)..(110): Selenocysteine
  MOD_RES (126)..(126): Selenocysteine
  MOD_RES (135)..(135): Selenocysteine
  MOD_RES (141)..(142): Selenocysteine
  MOD_RES (180)..(181): Selenocysteine
  MOD_RES (224)..(224): Selenocysteine
  MOD_RES (228)..(228): Selenocysteine
  MOD_RES (253)..(253): Selenocysteine
  MOD_RES (295)..(295): Selenocysteine
  MOD_RES (303)..(303): Selenocysteine
  MOD_RES (321)..(321): Selenocysteine
  MOD_RES (349)..(349): Selenocysteine
  MOD_RES (353)..(353): Selenocysteine
MQLXXCLREXLFXGASQKXSLWWLGIASFGVPEKLGCANLPLNSRQKELCKRKPYLLPSIREGARLGIQECGSQFRHERWNCMIXAAAXXAPMGASPLFGYELSSGXKEXAFIYAVMAAGLVHSVXRSCSAGNMXECSCDXXLQNGGSASEGWHWGGCSDDVQYGMWFSRKFLDFPIGNXXGKENKVLLAMNLHNNEAGRQAVAKLMSVDCRCHGVSGSCAVKXCWKXMSSFEKIGHLLKDKYENSIQISDKXKRKMRRREKDQRKIPIHKDDLLYVNKSPNYCVEDKKLGIPGXQGRECNRXSEGADGCNLLCCGRGYNXHVVRHVERCECKFIWCCYVRCRRCESMXDVHXCK

SEQ ID NO: 29686 - protein, 110 aa, Homo sapiens
  MOD_RES (17)..(17): Selenocysteine
  MOD_RES (20)..(20): Selenocysteine
  MOD_RES (33)..(33): Selenocysteine
  MOD_RES (73)..(73): Selenocysteine
  MOD_RES (89)..(89): Selenocysteine
MNAPLGGIWLWLPLLLXWLXPEVNSSWWYMRAXGGSSRVMCDNVPGLVSSQRQLCHRHPDVMRAISQGVAEWXAECQHQFRQHRWNCNXLDRDHSLFGRVLLRRPVAKEK

SEQ ID NO: 29687 - protein, 153 aa, Homo sapiens
  MOD_RES (17)..(17): Selenocysteine
  MOD_RES (20)..(20): Selenocysteine
  MOD_RES (33)..(33): Selenocysteine
  MOD_RES (73)..(73): Selenocysteine
  MOD_RES (89)..(89): Selenocysteine
  MOD_RES (111)..(111): Selenocysteine
MNAPLGGIWLWLPLLLXWLXPEVNSSWWYMRAXGGSSRVMCDNVPGLVSSQRQLCHRHPDVMRAISQGVAEWXAECQHQFRQHRWNCNXLDRDHSLFGRVLLRSCKAVLEXRVQVPRGERLMYSQDMLAGHGRLQENGRLSLEEVQWGHPGGH

SEQ ID NO: 29688 - protein, 360 aa, Homo sapiens
  MOD_RES (17)..(17): Selenocysteine
  MOD_RES (20)..(20): Selenocysteine
  MOD_RES (33)..(33): Selenocysteine
  MOD_RES (73)..(73): Selenocysteine
  MOD_RES (89)..(89): Selenocysteine
  MOD_RES (124)..(124): Selenocysteine
  MOD_RES (216)..(216): Selenocysteine
  MOD_RES (219)..(219): Selenocysteine
  MOD_RES (230)..(230): Selenocysteine
  MOD_RES (251)..(251): Selenocysteine
  MOD_RES (254)..(254): Selenocysteine
  MOD_RES (264)..(264): Selenocysteine
  MOD_RES (289)..(289): Selenocysteine
  MOD_RES (297)..(297): Selenocysteine
  MOD_RES (315)..(315): Selenocysteine
  MOD_RES (319)..(319): Selenocysteine
  MOD_RES (322)..(322): Selenocysteine
  MOD_RES (347)..(347): Selenocysteine
  MOD_RES (357)..(358): Selenocysteine
  MOD_RES (360)..(360): Selenocysteine
MNAPLGGIWLWLPLLLXWLXPEVNSSWWYMRAXGGSSRVMCDNVPGLVSSQRQLCHRHPDVMRAISQGVAEWXAECQHQFRQHRWNCNXLDRDHSLFGRVLLRSSRESAFVYAISSAGVVFAIXRACSQGEVKSCSCDPKKMGSAKDSKGIFDWGGCSDNIDYGIKFARAFVDAKERKGKDARALMNLHNNRAGRKAVKRFLKQECKCHGVSGSCXLRXCWLAMADFRKXGDYLWRKYNGAIQVVMNQDGXGFXVANERFKKPXKNDLVYFENSPDYCIRDREAGSLGXAGRVCNLXSRGMDSCEVMCCGRGYDXSHVXRMXKCGCKFHWCCAVRCQDCLEALDVHXCKAPKNADWXXAX

SEQ ID NO: 29689 - protein, 372 aa, Homo sapiens
  MOD_RES (19)..(19): Selenocysteine
  MOD_RES (25)..(25): Selenocysteine
  MOD_RES (32)..(32): Selenocysteine
  MOD_RES (100)..(101): Selenocysteine
  MOD_RES (107)..(107): Selenocysteine
  MOD_RES (136)..(136): Selenocysteine
  MOD_RES (153)..(153): Selenocysteine
  MOD_RES (208)..(208): Selenocysteine
  MOD_RES (228)..(228): Selenocysteine
  MOD_RES (231)..(231): Selenocysteine
  MOD_RES (242)..(242): Selenocysteine
  MOD_RES (259)..(259): Selenocysteine
  MOD_RES (266)..(266): Selenocysteine
  MOD_RES (276)..(276): Selenocysteine
  MOD_RES (278)..(278): Selenocysteine
  MOD_RES (301)..(301): Selenocysteine
  MOD_RES (309)..(309): Selenocysteine
  MOD_RES (313)..(313): Selenocysteine
  MOD_RES (327)..(328): Selenocysteine
  MOD_RES (331)..(331): Selenocysteine
  MOD_RES (334)..(334): Selenocysteine
  MOD_RES (354)..(354): Selenocysteine
  MOD_RES (359)..(359): Selenocysteine
  MOD_RES (372)..(372): Selenocysteine
MLDGLGVVAISIFGIQLKXEGSLRXAVPGIPXQSAFNKCLQRYIGALGARVICDNIPGLVSRQRQLCQRYPDIMRSVGEGAREWIRECQHQFRHHRWNCXXLDRDHXVFGRVMLRSSREAAFVYAISSAGVVHAIXRACSQGELSVCSCDPYXRGRHHDQRGDFDWGGCSDNIHYGVRFAKAFVDAKEKRLKDARALMNLHNNRCGRXAVRRFLKLECKCHGVSGSCXLRXCWRALSDFRRXGDYLRRRYDGAVQVMAXQDGANFXAARQGYRRAXRXDLVYFDNSPDYCVLDKAAGSLGXAGRVCSKXSKGXDGCEIMCCGRGYDXXRVXRVXQCECKFHWCCAVRCKECRNXVDVHXCKAPKKAEWLDQX

SEQ ID NO: 29690 - protein, 391 aa, Homo sapiens
  MOD_RES (51)..(51): Selenocysteine
  MOD_RES (58)..(58): Selenocysteine
  MOD_RES (119)..(120): Selenocysteine
  MOD_RES (126)..(126): Selenocysteine
  MOD_RES (155)..(155): Selenocysteine
  MOD_RES (172)..(172): Selenocysteine
  MOD_RES (227)..(227): Selenocysteine
  MOD_RES (247)..(247): Selenocysteine
  MOD_RES (250)..(250): Selenocysteine
  MOD_RES (261)..(261): Selenocysteine
  MOD_RES (278)..(278): Selenocysteine
  MOD_RES (285)..(285): Selenocysteine
  MOD_RES (295)..(295): Selenocysteine
  MOD_RES (297)..(297): Selenocysteine
  MOD_RES (320)..(320): Selenocysteine
  MOD_RES (328)..(328): Selenocysteine
  MOD_RES (332)..(332): Selenocysteine
  MOD_RES (346)..(347): Selenocysteine
  MOD_RES (350)..(350): Selenocysteine
  MOD_RES (353)..(353): Selenocysteine
  MOD_RES (373)..(373): Selenocysteine
  MOD_RES (378)..(378): Selenocysteine
  MOD_RES (391)..(391): Selenocysteine
MLRPGGAEEAAQLPLRRASAPVPVPSPAAPDGSRASARLGLACLLLLLLLXLPARVDXSWWYIGALGARVICDNIPGLVSRQRQLCQRYPDIMRSVGEGAREWIRECQHQFRHHRWNCXXLDRDHXVFGRVMLRSSREAAFVYAISSAGVVHAIXRACSQGELSVCSCDPYXRGRHHDQRGDFDWGGCSDNIHYGVRFAKAFVDAKEKRLKDARALMNLHNNRCGRXAVRRFLKLECKCHGVSGSCXLRXCWRALSDFRRXGDYLRRRYDGAVQVMAXQDGANFXAARQGYRRAXRXDLVYFDNSPDYCVLDKAAGSLGXAGRVCSKXSKGXDGCEIMCCGRGYDXXRVXRVXQCECKFHWCCAVRCKECRNXVDVHXCKAPKKAEWLDQX

SEQ ID NO: 29691 - protein, 299 aa, Homo sapiens
  MOD_RES (27)..(28): Selenocysteine
  MOD_RES (34)..(34): Selenocysteine
  MOD_RES (63)..(63): Selenocysteine
  MOD_RES (80)..(80): Selenocysteine
  MOD_RES (135)..(135): Selenocysteine
  MOD_RES (155)..(155): Selenocysteine
  MOD_RES (158)..(158): Selenocysteine
  MOD_RES (169)..(169): Selenocysteine
  MOD_RES (186)..(186): Selenocysteine
  MOD_RES (193)..(193): Selenocysteine
  MOD_RES (203)..(203): Selenocysteine
  MOD_RES (205)..(205): Selenocysteine
  MOD_RES (228)..(228): Selenocysteine
  MOD_RES (236)..(236): Selenocysteine
  MOD_RES (240)..(240): Selenocysteine
  MOD_RES (254)..(255): Selenocysteine
  MOD_RES (258)..(258): Selenocysteine
  MOD_RES (261)..(261): Selenocysteine
  MOD_RES (281)..(281): Selenocysteine
  MOD_RES (286)..(286): Selenocysteine
  MOD_RES (299)..(299): Selenocysteine
MRSVGEGAREWIRECQHQFRHHRWNCXXLDRDHXVFGRVMLRSSREAAFVYAISSAGVVHAIXRACSQGELSVCSCDPYXRGRHHDQRGDFDWGGCSDNIHYGVRFAKAFVDAKEKRLKDARALMNLHNNRCGRXAVRRFLKLECKCHGVSGSCXLRXCWRALSDFRRXGDYLRRRYDGAVQVMAXQDGANFXAARQGYRRAXRXDLVYFDNSPDYCVLDKAAGSLGXAGRVCSKXSKGXDGCEIMCCGRGYDXXRVXRVXQCECKFHWCCAVRCKECRNXVDVHXCKAPKKAEWLDQX

SEQ ID NO: 29692 - protein, 355 aa, Homo sapiens
  MOD_RES (17)..(17): Selenocysteine
  MOD_RES (36)..(36): Selenocysteine
  MOD_RES (92)..(93): Selenocysteine
  MOD_RES (109)..(109): Selenocysteine
  MOD_RES (128)..(128): Selenocysteine
  MOD_RES (135)..(135): Selenocysteine
  MOD_RES (137)..(137): Selenocysteine
  MOD_RES (196)..(197): Selenocysteine
  MOD_RES (219)..(219): Selenocysteine
  MOD_RES (258)..(258): Selenocysteine
  MOD_RES (270)..(270): Selenocysteine
  MOD_RES (290)..(290): Selenocysteine
  MOD_RES (295)..(295): Selenocysteine
  MOD_RES (299)..(299): Selenocysteine
  MOD_RES (303)..(303): Selenocysteine
  MOD_RES (321)..(321): Selenocysteine
  MOD_RES (323)..(323): Selenocysteine
  MOD_RES (353)..(353): Selenocysteine
MEPHLLGLLLGLLLGGXRVLAGYPIWWSLALGQQYXSLGSQPLLCGSIPGLVPKQLRFCRNYIEIMPSVAEGVKLGIQECQHQFRGRRWNCXXIDDSLAIFGPVLDKAXRESAFVHAIASAGVAFAVXRSCAEGXSXICGCDSHHKGPPGEGWKWGGCSEDADFGVLVSREFADARENRPDARSAMNKHNNEAGRXXILDHMHLKCKCHGLSGSCEVKXCWWAQPDFRAIGDFLKDKYDSASEMVVEKHRESRGWVEXLRAKYSLFKPPXERDLVYYENSPNFCEPNPEXGSFGXRDRXCNVXSHGIDGCDLLCCGRGHNXRXEKRKEKCHCIFHWCCYVSCQECIRIYDVHXCK

SEQ ID NO: 29693 - protein, 352 aa, Homo sapiens
  MOD_RES (89)..(90): Selenocysteine
  MOD_RES (106)..(106): Selenocysteine
  MOD_RES (125)..(125): Selenocysteine
  MOD_RES (132)..(132): Selenocysteine
  MOD_RES (216)..(216): Selenocysteine
  MOD_RES (255)..(255): Selenocysteine
  MOD_RES (261)..(261): Selenocysteine
  MOD_RES (267)..(267): Selenocysteine
  MOD_RES (287)..(287): Selenocysteine
  MOD_RES (292)..(292): Selenocysteine
  MOD_RES (296)..(296): Selenocysteine
  MOD_RES (343)..(343): Selenocysteine
  MOD_RES (350)..(350): Selenocysteine
MAPLGYFLLLCSLKQALGSYPIWWSLAVGPQYSSLGSQPILCASIPGLVPKQLRFCRNYVEIMPSVAEGIKIGIQECQHQFRGRRWNCXXVHDSLAIFGPVLDKAXRESAFVHAIASAGVAFAVXRSCAEGXAAICGCSSRHQGSPGKGWKWGGCSEDIEFGGMVSREFADARENRPDARSAMNRHNNEAGRQAIASHMHLKCKCHGLSGSCEVKXCWWSQPDFRAIGDFLKDKYDSASEMVVEKHRESRGWVEXLRPRYXYFKVPXERDLVYYEASPNFCEPNPEXGSFGXRDRXCNVSSHGIDGCDLLCCGRGHNARAERRREKCRCVFHWCCYVSCQECXRVYDVHXCK

SEQ ID NO: 29694 - protein, 52 aa, Homo sapiens
  MOD_RES (36)..(36): Selenocysteine
  MOD_RES (48)..(48): Selenocysteine
MCKRNLEVMDSVRRGAQLAIEECQYQFRNRRWNCSXLDSLPVFGKVVXQGGK

SEQ ID NO: 29695 - protein, 351 aa, Homo sapiens
  MOD_RES (42)..(42): Selenocysteine
  MOD_RES (91)..(91): Selenocysteine
  MOD_RES (103)..(103): Selenocysteine
  MOD_RES (106)..(106): Selenocysteine
  MOD_RES (125)..(125): Selenocysteine
  MOD_RES (141)..(141): Selenocysteine
  MOD_RES (200)..(200): Selenocysteine
  MOD_RES (219)..(219): Selenocysteine
  MOD_RES (242)..(242): Selenocysteine
  MOD_RES (266)..(266): Selenocysteine
  MOD_RES (291)..(291): Selenocysteine
  MOD_RES (295)..(295): Selenocysteine
  MOD_RES (299)..(299): Selenocysteine
  MOD_RES (317)..(317): Selenocysteine
  MOD_RES (349)..(349): Selenocysteine
MSPRSCLRSLRLLVFAVFSAAASNWLYLAKLSSVGSISEEEXCEKLKGLIQRQVQMCKRNLEVMDSVRRGAQLAIEECQYQFRNRRWNCSXLDSLPVFGKVVXQGXREAAFVYAISSAGVAFAVXRACSSGELEKCGCDRXVHGVSPQGFQWSGCSDNIAYGVAFSQSFVDVRERSKGASSSRALMNLHNNEAGRKAILXHMRVECKCHGVSGSCEVKXCWRAVPPFRQVGHALKEKFDGAXEVEPRRVGSSRALVPRNAQFKPHXDEDLVYLEPSPDFCEQDMRSGVLGXRGRXCNKXSKAIDGCELLCCGRGFHXAQVELAERCSCKFHWCCFVKCRQCQRLVELHXCR

SEQ ID NO: 29696 - protein, 150 aa, Homo sapiens
  MOD_RES (1)..(1): Any amino acid
  MOD_RES (17)..(17): Selenocysteine
  MOD_RES (66)..(66): Selenocysteine
  MOD_RES (78)..(78): Selenocysteine
  MOD_RES (95)..(95): Selenocysteine
  MOD_RES (103)..(103): Selenocysteine
  MOD_RES (123)..(123): Selenocysteine
  MOD_RES (141)..(141): Selenocysteine
  MOD_RES (143)..(143): Selenocysteine
XYLAKLSSVGSISEEEXCEKLKGLIQRQVQMCKRNLEVMDSVRRGAQLAIEECQYQFRNRRWNCSXLDSLPVFGKVVXQGGKAWHGGDSGCHLLXESRSGERXQRRKEGGSLGQCWPEAIVGXQDPMRSPPYLWGRNQGGXHXGSASEGH

SEQ ID NO: 29697 - protein, 129 aa, Homo sapiens
  MOD_RES (117)..(117): Selenocysteine
LQKSIGILSPGVALGMAGSAMSSKFFLVALAIFFSFAQVVIEANSWWSLGMNNPVQMSEDVGGHGWLRAHVLRPWLRPVQDRADGALPLQVPLVLLRQVQEVHGDRGPVCVQVVGAXQHSAPLPGPAYL

SEQ ID NO: 29698 - protein, 365 aa, Homo sapiens
  MOD_RES (84)..(84): Selenocysteine
  MOD_RES (102)..(102): Selenocysteine
  MOD_RES (106)..(106): Selenocysteine
  MOD_RES (120)..(120): Selenocysteine
  MOD_RES (123)..(123): Selenocysteine
  MOD_RES (146)..(146): Selenocysteine
  MOD_RES (214)..(214): Selenocysteine
  MOD_RES (236)..(236): Selenocysteine
  MOD_RES (280)..(281): Selenocysteine
  MOD_RES (300)..(300): Selenocysteine
  MOD_RES (305)..(305): Selenocysteine
  MOD_RES (313)..(313): Selenocysteine
  MOD_RES (334)..(334): Selenocysteine
  MOD_RES (337)..(337): Selenocysteine
  MOD_RES (356)..(356): Selenocysteine
MAGSAMSSKFFLVALAIFFSFAQVVIEANSWWSLGMNNPVQMSEVYIIGAQPLCSQLAGLSQGQKKLCHLYQDHMQYIGEGAKXGIKECQYQFRHRRWNCSXVDNXSVFGRVMQIGSREXAFXYAVSAAGVVNAMSRACREGELSXCGCSRAARPKDLPRDWLWGGCGDNIDYGYRFAKEFVDARERERIHAKGSYESARILMNLHNNEAGRRXVYNLADVACKCHGVSGSCSLKXCWLQLADFRKVGDALKEKYDSAAAMRLNSRGKLVQVNSRFNSPXXQDLVYIDPSPDYCVRNESXGSLGXQGRLCNKXSEGMDGCELMCCGRGYDQFKXVQXERCHCKFHWCCYVKCKKCXEIVDQFVCK

SEQ ID NO: 29699 - protein, 214 aa, Homo sapiens
  MOD_RES (84)..(84): Selenocysteine
  MOD_RES (102)..(102): Selenocysteine
  MOD_RES (106)..(106): Selenocysteine
  MOD_RES (120)..(120): Selenocysteine
  MOD_RES (123)..(123): Selenocysteine
  MOD_RES (146)..(146): Selenocysteine
MAGSAMSSKFFLVALAIFFSFAQVVIEANSWWSLGMNNPVQMSEVYIIGAQPLCSQLAGLSQGQKKLCHLYQDHMQYIGEGAKXGIKECQYQFRHRRWNCSXVDNXSVFGRVMQIGSREXAFXYAVSAAGVVNAMSRACREGELSXCGCSRAARPKDLPRDWLWGGCGDNIDYGYRFAKEFVDARERERIHAKGSYESARILMNLHNNEAGRRV

SEQ ID NO: 29700 - protein, 380 aa, Homo sapiens
  MOD_RES (99)..(99): Selenocysteine
  MOD_RES (117)..(117): Selenocysteine
  MOD_RES (121)..(121): Selenocysteine
  MOD_RES (135)..(135): Selenocysteine
  MOD_RES (138)..(138): Selenocysteine
  MOD_RES (161)..(161): Selenocysteine
  MOD_RES (229)..(229): Selenocysteine
  MOD_RES (251)..(251): Selenocysteine
  MOD_RES (295)..(296): Selenocysteine
  MOD_RES (315)..(315): Selenocysteine
  MOD_RES (320)..(320): Selenocysteine
  MOD_RES (328)..(328): Selenocysteine
  MOD_RES (349)..(349): Selenocysteine
  MOD_RES (352)..(352): Selenocysteine
  MOD_RES (371)..(371): Selenocysteine
MKKSIGILSPGVALGMAGSAMSSKFFLVALAIFFSFAQVVIEANSWWSLGMNNPVQMSEVYIIGAQPLCSQLAGLSQGQKKLCHLYQDHMQYIGEGAKXGIKECQYQFRHRRWNCSXVDNXSVFGRVMQIGSREXAFXYAVSAAGVVNAMSRACREGELSXCGCSRAARPKDLPRDWLWGGCGDNIDYGYRFAKEFVDARERERIHAKGSYESARILMNLHNNEAGRRXVYNLADVACKCHGVSGSCSLKXCWLQLADFRKVGDALKEKYDSAAAMRLNSRGKLVQVNSRFNSPXXQDLVYIDPSPDYCVRNESXGSLGXQGRLCNKXSEGMDGCELMCCGRGYDQFKXVQXERCHCKFHWCCYVKCKKCXEIVDQFVCK

SEQ ID NO: 29701 - protein, 112 aa, Homo sapiens
  MOD_RES (9)..(9): Selenocysteine
  MOD_RES (21)..(21): Selenocysteine
  MOD_RES (78)..(78): Selenocysteine
  MOD_RES (96)..(96): Selenocysteine
MPSLLLLFXAALLSSWAQLLXDANSWWSLALNPVQRPEMFIIGAQPVCSQLPGLSPGQRKLCQLYQEHMAYIGEGAKXGIKECQHQFRQRRWNCSXADNASVFGRVMQIGCV

SEQ ID NO: 29702 - protein, 118 aa, Homo sapiens
  MOD_RES (9)..(9): Selenocysteine
  MOD_RES (21)..(21): Selenocysteine
  MOD_RES (78)..(78): Selenocysteine
  MOD_RES (96)..(96): Selenocysteine
  MOD_RES (114)..(114): Selenocysteine
  MOD_RES (117)..(117): Selenocysteine
MPSLLLLFXAALLSSWAQLLXDANSWWSLALNPVQRPEMFIIGAQPVCSQLPGLSPGQRKLCQLYQEHMAYIGEGAKXGIKECQHQFRQRRWNCSXADNASVFGRVMQIGSREXAFXH

SEQ ID NO: 29703 - protein, 157 aa, Homo sapiens
  MOD_RES (9)..(9): Selenocysteine
  MOD_RES (21)..(21): Selenocysteine
  MOD_RES (78)..(78): Selenocysteine
  MOD_RES (96)..(96): Selenocysteine
  MOD_RES (114)..(114): Selenocysteine
  MOD_RES (117)..(117): Selenocysteine
  MOD_RES (140)..(140): Selenocysteine
  MOD_RES (146)..(146): Selenocysteine
MPSLLLLFXAALLSSWAQLLXDANSWWSLALNPVQRPEMFIIGAQPVCSQLPGLSPGQRKLCQLYQEHMAYIGEGAKXGIKECQHQFRQRRWNCSXADNASVFGRVMQIGSREXAFXHAVSAAGVVNAISRACREGELSXCGCSRXARPKDLPRDWL

SEQ ID NO: 29704 - protein, 254 aa, Homo sapiens
  MOD_RES (9)..(9): Selenocysteine
  MOD_RES (21)..(21): Selenocysteine
  MOD_RES (78)..(78): Selenocysteine
  MOD_RES (96)..(96): Selenocysteine
  MOD_RES (114)..(114): Selenocysteine
  MOD_RES (117)..(117): Selenocysteine
  MOD_RES (140)..(140): Selenocysteine
  MOD_RES (146)..(146): Selenocysteine
  MOD_RES (230)..(230): Selenocysteine
MPSLLLLFXAALLSSWAQLLXDANSWWSLALNPVQRPEMFIIGAQPVCSQLPGLSPGQRKLCQLYQEHMAYIGEGAKXGIKECQHQFRQRRWNCSXADNASVFGRVMQIGSREXAFXHAVSAAGVVNAISRACREGELSXCGCSRXARPKDLPRDWLWGGCGDNVEYGYRFAKEFVDAREREKNFAKGSEEQGRVLMNLQNNEAGRRAVYKMADVACKCHGVSGSCSLKXCWLQLAEFRKVGDRLKEKYDSAAA

SEQ ID NO: 29705 - protein, 359 aa, Homo sapiens
  MOD_RES (9)..(9): Selenocysteine
  MOD_RES (21)..(21): Selenocysteine
  MOD_RES (78)..(78): Selenocysteine
  MOD_RES (96)..(96): Selenocysteine
  MOD_RES (114)..(114): Selenocysteine
  MOD_RES (117)..(117): Selenocysteine
  MOD_RES (140)..(140): Selenocysteine
  MOD_RES (146)..(146): Selenocysteine
  MOD_RES (230)..(230): Selenocysteine
  MOD_RES (258)..(258): Selenocysteine
  MOD_RES (271)..(271): Selenocysteine
  MOD_RES (274)..(274): Selenocysteine
  MOD_RES (294)..(294): Selenocysteine
  MOD_RES (299)..(299): Selenocysteine
  MOD_RES (307)..(307): Selenocysteine
  MOD_RES (350)..(350): Selenocysteine
MPSLLLLFXAALLSSWAQLLXDANSWWSLALNPVQRPEMFIIGAQPVCSQLPGLSPGQRKLCQLYQEHMAYIGEGAKXGIKECQHQFRQRRWNCSXADNASVFGRVMQIGSREXAFXHAVSAAGVVNAISRACREGELSXCGCSRXARPKDLPRDWLWGGCGDNVEYGYRFAKEFVDAREREKNFAKGSEEQGRVLMNLQNNEAGRRAVYKMADVACKCHGVSGSCSLKXCWLQLAEFRKVGDRLKEKYDSAAAMRVXRKGRLELVNSRFXQPXPEDLVYVDPSPDYCLRNESXGSLGXQGRLCNKXSEGMDGCELMCCGRGYNQFKSVQVERCHCKFHWCCFVRCKKCXEIVDQYICK

SEQ ID NO: 29706 - protein, 365 aa, Homo sapiens
  MOD_RES (38)..(38): Selenocysteine
  MOD_RES (105)..(105): Selenocysteine
  MOD_RES (112)..(112): Selenocysteine
  MOD_RES (121)..(121): Selenocysteine
  MOD_RES (151)..(151): Selenocysteine
  MOD_RES (218)..(218): Selenocysteine
  MOD_RES (220)..(220): Selenocysteine
  MOD_RES (235)..(235): Selenocysteine
  MOD_RES (263)..(263): Selenocysteine
  MOD_RES (275)..(275): Selenocysteine
  MOD_RES (300)..(300): Selenocysteine
  MOD_RES (305)..(305): Selenocysteine
MLPPLPSRLGLLLLLLLCPAHVGGLWWAVGSPLVMDPXSICRKARRLAGRQAELCQAEPEVVAELARGARLGVRECQFQFRFRRWNCSSHSKAFGRILQQDIREXAFVFAIXAAGASHAVXQACSMGELLQCGCQAPRGRAPPRPSGLPGXPGPPGPAGSPEGSAAWEWGGCGDDVDFGDEKSRLFMDARHKRGRGDIRALVQLHNNEAGRLAVRSHXRXECKCHGLSGSCALRXCWQKLPPFREVGARLLERFHGASRVMGXNDGKALLPAVRXLKPPGRADLLYAADSPDFCAPNRRXGSPGXRGRACNSSAPDLSGCDLLCCGRGHRQESVQLEENCLCRFHWCCVVQCHRCRVRKELSLCL

SEQ ID NO: 29707 - protein, 349 aa, Homo sapiens
  MOD_RES (91)..(91): Selenocysteine
  MOD_RES (107)..(107): Selenocysteine
  MOD_RES (120)..(120): Selenocysteine
  MOD_RES (124)..(124): Selenocysteine
  MOD_RES (178)..(178): Selenocysteine
  MOD_RES (210)..(211): Selenocysteine
  MOD_RES (213)..(213): Selenocysteine
  MOD_RES (216)..(217): Selenocysteine
  MOD_RES (250)..(250): Selenocysteine
  MOD_RES (266)..(266): Selenocysteine
  MOD_RES (284)..(284): Selenocysteine
  MOD_RES (289)..(289): Selenocysteine
  MOD_RES (297)..(297): Selenocysteine
  MOD_RES (315)..(315): Selenocysteine
  MOD_RES (338)..(338): Selenocysteine
  MOD_RES (343)..(343): Selenocysteine
  MOD_RES (347)..(347): Selenocysteine
MNRKARRCLGHLFLSLGMVYLRIGGFSSVVALGASIICNKIPGLAPRQRAICQSRPDAIIVIGEGSQMGLDECQFQFRNGRWNCSALGERXVFGKELKVGSREAAFXYAIIAAGVAHAIXAACXQGNLSDCGCDKEKQGQYHRDEGWKWGGCSADIRYGIGFAKVFVDAREIKQNARXLMNLHNNEAGRKILEENMKLECKCHGVSGSCXXKXCWXXLPQFRELGYVLKDKYNEAVHVEPVRASRNKRPXFLKIKKPLSYRKPMDXDLVYIEKSPNYCEEDPVXGSVGXQGRACNKXAPQASGCDLMCCGRGYNXHQYARVWQCNCKFHWCCYVKCNXCSERXEMYXCK

SEQ ID NO: 29708 - protein, 57 aa, Homo sapiens
  MOD_RES (24)..(24): Selenocysteine
  MOD_RES (40)..(40): Selenocysteine
  MOD_RES (44)..(44): Selenocysteine
  MOD_RES (53)..(53): Selenocysteine
MGINECQYQFRFGRWNCSALGEKXVFGQELRVGSREAAFXYAIXAAGVAHAVXAACS

SEQ ID NO: 29709 - protein, 205 aa, Homo sapiens
  MOD_RES (91)..(91): Selenocysteine
  MOD_RES (107)..(107): Selenocysteine
  MOD_RES (111)..(111): Selenocysteine
  MOD_RES (120)..(120): Selenocysteine
  MOD_RES (199)..(199): Selenocysteine
MHRNFRKWIFYVFLCFGVLYVKLGALSSVVALGANIICNKIPGLAPRQRAICQSRPDAIIVIGEGAQMGINECQYQFRFGRWNCSALGEKXVFGQELRVGSREAAFXYAIXAAGVAHAVXAACSQGNLSNCGCDREKQGYYNQAEGWKWGGCSADVRYGIDFSRRFVDAREIKKNARRLMNLHNNEAGRKGLLGQPRVXSSPLFP

SEQ ID NO: 29710 - protein, 349 aa, Homo sapiens
  MOD_RES (91)..(91): Selenocysteine
  MOD_RES (107)..(107): Selenocysteine
  MOD_RES (111)..(111): Selenocysteine
  MOD_RES (120)..(120): Selenocysteine
  MOD_RES (210)..(211): Selenocysteine
  MOD_RES (213)..(213): Selenocysteine
  MOD_RES (216)..(217): Selenocysteine
  MOD_RES (250)..(250): Selenocysteine
  MOD_RES (266)..(266): Selenocysteine
  MOD_RES (284)..(284): Selenocysteine
  MOD_RES (289)..(289): Selenocysteine
  MOD_RES (297)..(297): Selenocysteine
  MOD_RES (306)..(306): Selenocysteine
  MOD_RES (315)..(315): Selenocysteine
  MOD_RES (319)..(319): Selenocysteine
  MOD_RES (338)..(338): Selenocysteine
  MOD_RES (343)..(343): Selenocysteine
  MOD_RES (347)..(347): Selenocysteine
MHRNFRKWIFYVFLCFGVLYVKLGALSSVVALGANIICNKIPGLAPRQRAICQSRPDAIIVIGEGAQMGINECQYQFRFGRWNCSALGEKXVFGQELRVGSREAAFXYAIXAAGVAHAVXAACSQGNLSNCGCDREKQGYYNQAEGWKWGGCSADVRYGIDFSRRFVDAREIKKNARRLMNLHNNEAGRKVLEDRMQLECKCHGVSGSCXXKXCWXXLPKFREVGHLLKEKYNAAVQVEVVRASRLRQPXFLRIKQLRSYQKPMEXDLVYIEKSPNYCEEDAAXGSVGXQGRLCNRXSPGADGCDXMCCGRGYNXHQYXKVWQCNCKFHWCCFVKCNXCSERXEVFXCK

SEQ ID NO: 29711 - protein, 353 aa, Homo sapiens
  MOD_RES (95)..(95): Selenocysteine
  MOD_RES (111)..(111): Selenocysteine
  MOD_RES (115)..(115): Selenocysteine
  MOD_RES (124)..(124): Selenocysteine
  MOD_RES (214)..(215): Selenocysteine
  MOD_RES (217)..(217): Selenocysteine
  MOD_RES (220)..(221): Selenocysteine
  MOD_RES (254)..(254): Selenocysteine
  MOD_RES (270)..(270): Selenocysteine
  MOD_RES (288)..(288): Selenocysteine
  MOD_RES (293)..(293): Selenocysteine
  MOD_RES (301)..(301): Selenocysteine
  MOD_RES (310)..(310): Selenocysteine
  MOD_RES (319)..(319): Selenocysteine
  MOD_RES (323)..(323): Selenocysteine
  MOD_RES (342)..(342): Selenocysteine
  MOD_RES (347)..(347): Selenocysteine
  MOD_RES (351)..(351): Selenocysteine
MLLLSPRSALVSVYCPQIFLLLSSGSYLALSSVVALGANIICNKIPGLAPRQRAICQSRPDAIIVIGEGAQMGINECQYQFRFGRWNCSALGEKXVFGQELRVGSREAAFXYAIXAAGVAHAVXAACSQGNLSNCGCDREKQGYYNQAEGWKWGGCSADVRYGIDFSRRFVDAREIKKNARRLMNLHNNEAGRKVLEDRMQLECKCHGVSGSCXXKXCWXXLPKFREVGHLLKEKYNAAVQVEVVRASRLRQPXFLRIKQLRSYQKPMEXDLVYIEKSPNYCEEDAAXGSVGXQGRLCNRXSPGADGCDXMCCGRGYNXHQYXKVWQCNCKFHWCCFVKCNXCSERXEVFXCK

SEQ ID NO: 29712 - protein, 333 aa, Homo sapiens
  MOD_RES (75)..(75): Selenocysteine
  MOD_RES (91)..(91): Selenocysteine
  MOD_RES (95)..(95): Selenocysteine
  MOD_RES (104)..(104): Selenocysteine
  MOD_RES (194)..(195): Selenocysteine
  MOD_RES (197)..(197): Selenocysteine
  MOD_RES (200)..(201): Selenocysteine
  MOD_RES (234)..(234): Selenocysteine
  MOD_RES (250)..(250): Selenocysteine
  MOD_RES (268)..(268): Selenocysteine
  MOD_RES (273)..(273): Selenocysteine
  MOD_RES (281)..(281): Selenocysteine
  MOD_RES (290)..(290): Selenocysteine
  MOD_RES (299)..(299): Selenocysteine
  MOD_RES (303)..(303): Selenocysteine
  MOD_RES (322)..(322): Selenocysteine
  MOD_RES (327)..(327): Selenocysteine
  MOD_RES (331)..(331): Selenocysteine
MSAPPFYRALSSVVALGANIICNKIPGLAPRQRAICQSRPDAIIVIGEGAQMGINECQYQFRFGRWNCSALGEKXVFGQELRVGSREAAFXYAIXAAGVAHAVXAACSQGNLSNCGCDREKQGYYNQAEGWKWGGCSADVRYGIDFSRRFVDAREIKKNARRLMNLHNNEAGRKVLEDRMQLECKCHGVSGSCXXKXCWXXLPKFREVGHLLKEKYNAAVQVEVVRASRLRQPXFLRIKQLRSYQKPMEXDLVYIEKSPNYCEEDAAXGSVGXQGRLCNRXSPGADGCDXMCCGRGYNXHQYXKVWQCNCKFHWCCFVKCNXCSERXEVFXCK

SEQ ID NO: 29713 - protein, 351 aa, Homo sapiens
  MOD_RES (31)..(31): Selenocysteine
  MOD_RES (38)..(38): Selenocysteine
  MOD_RES (40)..(41): Selenocysteine
  MOD_RES (74)..(74): Selenocysteine
  MOD_RES (82)..(82): Selenocysteine
  MOD_RES (85)..(85): Selenocysteine
  MOD_RES (101)..(101): Selenocysteine
  MOD_RES (122)..(122): Selenocysteine
  MOD_RES (175)..(175): Selenocysteine
  MOD_RES (179)..(179): Selenocysteine
  MOD_RES (193)..(193): Selenocysteine
  MOD_RES (260)..(260): Selenocysteine
  MOD_RES (270)..(270): Selenocysteine
  MOD_RES (282)..(282): Selenocysteine
  MOD_RES (295)..(295): Selenocysteine
  MOD_RES (306)..(306): Selenocysteine
  MOD_RES (321)..(321): Selenocysteine
MGNLFMLWAALGICCAAFSASAWSVNNFLIXGPKAYLXYXXSVALGAQSGIEECKFQFAWERWNCPENALQLSXHNRLRSAXREXSFIHAISSAGVMYIIXKNCSMGDFENCGCDGSNNGKXGGHGWIWGGCSDNVEFGERISKLFVDSLEKGKDARALMNLHNNRAGRLAVRAXMKRXCKCHGISGSCSIQXCWLQLAEFREMGDYLKAKYDQALKIEMDKRQLRAGNSAEGHWVPAEAFLPSAEAELIFLEESPDYCXCNSSLGIYGXEGRECLQNSHNXSRWERRSCGRLCXECGLQVEERKXEVISSCNCKFQWCCXVKCDQCRHVVSKYYCARSPGSAQSLGKGSA

SEQ ID NO: 29714 - protein, 355 aa, Homo sapiens
  MOD_RES (31)..(31): Selenocysteine
  MOD_RES (38)..(38): Selenocysteine
  MOD_RES (40)..(41): Selenocysteine
  MOD_RES (74)..(74): Selenocysteine
  MOD_RES (82)..(82): Selenocysteine
  MOD_RES (85)..(85): Selenocysteine
  MOD_RES (101)..(101): Selenocysteine
  MOD_RES (122)..(122): Selenocysteine
  MOD_RES (175)..(175): Selenocysteine
  MOD_RES (179)..(179): Selenocysteine
  MOD_RES (193)..(193): Selenocysteine
  MOD_RES (260)..(260): Selenocysteine
  MOD_RES (270)..(270): Selenocysteine
  MOD_RES (282)..(282): Selenocysteine
  MOD_RES (295)..(295): Selenocysteine
  MOD_RES (306)..(306): Selenocysteine
  MOD_RES (321)..(321): Selenocysteine
MGNLFMLWAALGICCAAFSASAWSVNNFLIXGPKAYLXYXXSVALGAQSGIEECKFQFAWERWNCPENALQLSXHNRLRSAXREXSFIHAISSAGVMYIIXKNCSMGDFENCGCDGSNNGKXGGHGWIWGGCSDNVEFGERISKLFVDSLEKGKDARALMNLHNNRAGRLAVRAXMKRXCKCHGISGSCSIQXCWLQLAEFREMGDYLKAKYDQALKIEMDKRQLRAGNSAEGHWVPAEAFLPSAEAELIFLEESPDYCXCNSSLGIYGXEGRECLQNSHNXSRWERRSCGRLCXECGLQVEERKXEVISSCNCKFQWCCXVKCDQCRHVVSKYYCARSPGSAQSLGRVWFGVYI

SEQ ID NO: 29715 - protein, 360 aa, Homo sapiens
  MOD_RES (16)..(16): Selenocysteine
  MOD_RES (18)..(18): Selenocysteine
  MOD_RES (35)..(35): Selenocysteine
  MOD_RES (49)..(49): Selenocysteine
  MOD_RES (56)..(56): Selenocysteine
  MOD_RES (58)..(59): Selenocysteine
  MOD_RES (92)..(92): Selenocysteine
  MOD_RES (100)..(100): Selenocysteine
  MOD_RES (103)..(103): Selenocysteine
  MOD_RES (119)..(119): Selenocysteine
  MOD_RES (140)..(140): Selenocysteine
  MOD_RES (193)..(193): Selenocysteine
  MOD_RES (197)..(197): Selenocysteine
  MOD_RES (211)..(211): Selenocysteine
  MOD_RES (278)..(278): Selenocysteine
  MOD_RES (288)..(288): Selenocysteine
  MOD_RES (300)..(300): Selenocysteine
  MOD_RES (313)..(313): Selenocysteine
  MOD_RES (324)..(324): Selenocysteine
  MOD_RES (339)..(339): Selenocysteine
  MOD_RES (349)..(349): Selenocysteine
MLCCIQCLCLVSPFPXLXPCQGGPHCLIPIHLCLXFSLFGRSVNNFLIXGPKAYLXYXXSVALGAQSGIEECKFQFAWERWNCPENALQLSXHNRLRSAXREXSFIHAISSAGVMYIIXKNCSMGDFENCGCDGSNNGKXGGHGWIWGGCSDNVEFGERISKLFVDSLEKGKDARALMNLHNNRAGRLAVRAXMKRXCKCHGISGSCSIQXCWLQLAEFREMGDYLKAKYDQALKIEMDKRQLRAGNSAEGHWVPAEAFLPSAEAELIFLEESPDYCXCNSSLGIYGXEGRECLQNSHNXSRWERRSCGRLCXECGLQVEERKXEVISSCNCKFQWCCXVKCDQCRHVXMSNPAVLLGIR

SEQ ID NO: 29716 - protein, 369 aa, Homo sapiens
  MOD_RES (16)..(16): Selenocysteine
  MOD_RES (18)..(18): Selenocysteine
  MOD_RES (35)..(35): Selenocysteine
  MOD_RES (49)..(49): Selenocysteine
  MOD_RES (56)..(56): Selenocysteine
  MOD_RES (58)..(59): Selenocysteine
  MOD_RES (92)..(92): Selenocysteine
  MOD_RES (100)..(100): Selenocysteine
  MOD_RES (103)..(103): Selenocysteine
  MOD_RES (119)..(119): Selenocysteine
  MOD_RES (140)..(140): Selenocysteine
  MOD_RES (193)..(193): Selenocysteine
  MOD_RES (197)..(197): Selenocysteine
  MOD_RES (211)..(211): Selenocysteine
  MOD_RES (278)..(278): Selenocysteine
  MOD_RES (288)..(288): Selenocysteine
  MOD_RES (300)..(300): Selenocysteine
  MOD_RES (313)..(313): Selenocysteine
  MOD_RES (324)..(324): Selenocysteine
  MOD_RES (339)..(339): Selenocysteine
MLCCIQCLCLVSPFPXLXPCQGGPHCLIPIHLCLXFSLFGRSVNNFLIXGPKAYLXYXXSVALGAQSGIEECKFQFAWERWNCPENALQLSXHNRLRSAXREXSFIHAISSAGVMYIIXKNCSMGDFENCGCDGSNNGKXGGHGWIWGGCSDNVEFGERISKLFVDSLEKGKDARALMNLHNNRAGRLAVRAXMKRXCKCHGISGSCSIQXCWLQLAEFREMGDYLKAKYDQALKIEMDKRQLRAGNSAEGHWVPAEAFLPSAEAELIFLEESPDYCXCNSSLGIYGXEGRECLQNSHNXSRWERRSCGRLCXECGLQVEERKXEVISSCNCKFQWCCXVKCDQCRHVVSKYYCARSPGSAQSLGKGSA

SEQ ID NO: 29717 - protein, 351 aa, Homo sapiens
  MOD_RES (14)..(14): Selenocysteine
  MOD_RES (31)..(31): Selenocysteine
  MOD_RES (85)..(85): Selenocysteine
  MOD_RES (99)..(99): Selenocysteine
  MOD_RES (101)..(101): Selenocysteine
  MOD_RES (152)..(152): Selenocysteine
  MOD_RES (175)..(175): Selenocysteine
  MOD_RES (179)..(179): Selenocysteine
  MOD_RES (190)..(191): Selenocysteine
  MOD_RES (193)..(193): Selenocysteine
  MOD_RES (237)..(237): Selenocysteine
  MOD_RES (243)..(243): Selenocysteine
  MOD_RES (261)..(261): Selenocysteine
  MOD_RES (267)..(267): Selenocysteine
  MOD_RES (305)..(305): Selenocysteine
  MOD_RES (329)..(329): Selenocysteine
MFLSKPSVYICLFXCVLQLSHSWSVNNFLMXGPKAYLIYSSSVAAGAQSGIEECKYQFAWDRWNCPERALQLSSHGGLRSANREXAFVHAISSAGVMYXLXRNCSLGDFDNCGCDDSRNGQLGGQGWLWGGCSDNVGFGEAISKQFVDALEXGQDARAAMNLHNNEAGRKAVKGXMKRXCKCHGVSGSCXXQXCWLQLPEFREVGAHLKEKYHAALKVDLLQGAGNSAAGRGAIADXFRSISXRELVHLEDSPDYCLENKXLGLLGXEGRECLRRGRALGRWERRSCRRLCGDCGLAVEERRAEXVSSCNCKFHWCCAVRCEQCRRRVXKYFCSRAERPRGGAAHKPGRKP

SEQ ID NO: 29718 - protein, 365 aa, Homo sapiens
  MOD_RES (18)..(18): Selenocysteine
  MOD_RES (34)..(34): Selenocysteine
  MOD_RES (40)..(40): Selenocysteine
  MOD_RES (45)..(45): Selenocysteine
  MOD_RES (81)..(81): Selenocysteine
  MOD_RES (105)..(105): Selenocysteine
  MOD_RES (122)..(122): Selenocysteine
  MOD_RES (134)..(134): Selenocysteine
  MOD_RES (150)..(150): Selenocysteine
  MOD_RES (213)..(214): Selenocysteine
  MOD_RES (225)..(225): Selenocysteine
  MOD_RES (228)..(228): Selenocysteine
  MOD_RES (249)..(249): Selenocysteine
  MOD_RES (256)..(257): Selenocysteine
  MOD_RES (286)..(286): Selenocysteine
  MOD_RES (308)..(308): Selenocysteine
  MOD_RES (330)..(330): Selenocysteine
  MOD_RES (336)..(336): Selenocysteine
  MOD_RES (355)..(355): Selenocysteine
  MOD_RES (362)..(362): Selenocysteine
MLDGSPLARWLAAAFGLXLLLAALRPSAAYFGLXGSEPLXILPLXLEPEAAAQAHYKACDRLKLERKQRRMCRRDPGVAEXLVEAVSMSALECQFQFRFERWNCXLEGRYRASLLKRGFKEXAFLYAISSAGLXHALAKACSAGRMERCXCDEAPDLENREAWQWGGCGDNLKYSSKFVKEFLGRRSSKDLRARVDFHNNLVGVKVIKAGVEXXCKCHGVSGSCXVRXCWRQLAPFHEVGKHLKHKYEXALKVGSXXNEAAGEAGAISPPRGRASGAGGSDPLPRXPELVHLDDSPSFCLAGRFSPGXAGRRCHREKNCESICCGRGHNXQSRVVXRPCQCQVRWCCYVECRQCXQREEVYXCKG

SEQ ID NO: 29719 - protein, 133 aa, Homo sapiens
  MOD_RES (24)..(24): Selenocysteine
  MOD_RES (34)..(34): Selenocysteine
  MOD_RES (40)..(40): Selenocysteine
  MOD_RES (47)..(47): Selenocysteine
  MOD_RES (83)..(83): Selenocysteine
  MOD_RES (122)..(122): Selenocysteine
MKGRAVSFDPLACQGLNASPGSLXSPLRRIRSLXGREVLXPFPGLGXAAAPAQGGAHLKQCDLLKLSRRQKQLCRREPGLAEXLRDAAHLGLLECQFQFRHERWNCSLEGRMGLLKRGFKEXAFLYAVSSAAL

SEQ ID NO: 29720 - protein, 329 aa, Homo sapiens
  MOD_RES (28)..(28): Selenocysteine
  MOD_RES (34)..(34): Selenocysteine
  MOD_RES (41)..(41): Selenocysteine
  MOD_RES (77)..(77): Selenocysteine
  MOD_RES (116)..(116): Selenocysteine
  MOD_RES (128)..(128): Selenocysteine
  MOD_RES (130)..(130): Selenocysteine
  MOD_RES (144)..(144): Selenocysteine
  MOD_RES (170)..(170): Selenocysteine
  MOD_RES (195)..(195): Selenocysteine
  MOD_RES (208)..(209): Selenocysteine
  MOD_RES (223)..(223): Selenocysteine
  MOD_RES (234)..(234): Selenocysteine
  MOD_RES (252)..(252): Selenocysteine
  MOD_RES (271)..(271): Selenocysteine
  MOD_RES (300)..(300): Selenocysteine
  MOD_RES (313)..(314): Selenocysteine
  MOD_RES (316)..(316): Selenocysteine
MRPPPALALAGLCLLALPAAAASYFGLXGREVLXPFPGLGXAAAPAQGGAHLKQCDLLKLSRRQKQLCRREPGLAEXLRDAAHLGLLECQFQFRHERWNCSLEGRMGLLKRGFKEXAFLYAVSSAALXHXLARACSAGRMERCXCDDSPGLESRQAWQWGVCGDNLKYSXKFLSNFLGSKRGNKDLRARADAHNXHVGIKAVKSGLRXXCKCHGVSGSCAVRXCWKQLSPFREXGQVLKLRYDSAVKVSSAXNEALGRLELWAPARQGSLXKGLAPRSGDLVYMEDSPSFCRPSKYSPGXAGWSAVARSQLIXXSXSRIQAILPSQLPE

SEQ ID NO: 29721 - protein, 357 aa, Homo sapiens
  MOD_RES (28)..(28): Selenocysteine
  MOD_RES (34)..(34): Selenocysteine
  MOD_RES (41)..(41): Selenocysteine
  MOD_RES (77)..(77): Selenocysteine
  MOD_RES (116)..(116): Selenocysteine
  MOD_RES (128)..(128): Selenocysteine
  MOD_RES (130)..(130): Selenocysteine
  MOD_RES (144)..(144): Selenocysteine
  MOD_RES (170)..(170): Selenocysteine
  MOD_RES (195)..(195): Selenocysteine
  MOD_RES (208)..(209): Selenocysteine
  MOD_RES (223)..(223): Selenocysteine
  MOD_RES (234)..(234): Selenocysteine
  MOD_RES (252)..(252): Selenocysteine
  MOD_RES (271)..(271): Selenocysteine
  MOD_RES (300)..(300): Selenocysteine
  MOD_RES (322)..(322): Selenocysteine
  MOD_RES (354)..(354): Selenocysteine
MRPPPALALAGLCLLALPAAAASYFGLXGREVLXPFPGLGXAAAPAQGGAHLKQCDLLKLSRRQKQLCRREPGLAEXLRDAAHLGLLECQFQFRHERWNCSLEGRMGLLKRGFKEXAFLYAVSSAALXHXLARACSAGRMERCXCDDSPGLESRQAWQWGVCGDNLKYSXKFLSNFLGSKRGNKDLRARADAHNXHVGIKAVKSGLRXXCKCHGVSGSCAVRXCWKQLSPFREXGQVLKLRYDSAVKVSSAXNEALGRLELWAPARQGSLXKGLAPRSGDLVYMEDSPSFCRPSKYSPGXAGRVCSREASCSSLCCGRGYDXQSRLVAFSCHCQVQWCCYVECQQCVQEELVYXCKH

SEQ ID NO: 29722 - protein, 1432 aa, Homo sapiens
  MOD_RES (8)..(9): Selenocysteine
  MOD_RES (50)..(50): Selenocysteine
  MOD_RES (162)..(162): Selenocysteine
  MOD_RES (172)..(172): Selenocysteine
  MOD_RES (174)..(174): Selenocysteine
  MOD_RES (206)..(206): Selenocysteine
  MOD_RES (215)..(215): Selenocysteine
  MOD_RES (233)..(233): Selenocysteine
  MOD_RES (255)..(255): Selenocysteine
  MOD_RES (303)..(303): Selenocysteine
  MOD_RES (307)..(307): Selenocysteine
  MOD_RES (324)..(325): Selenocysteine
  MOD_RES (346)..(346): Selenocysteine
  MOD_RES (350)..(350): Selenocysteine
  MOD_RES (398)..(398): Selenocysteine
  MOD_RES (422)..(422): Selenocysteine
  MOD_RES (434)..(434): Selenocysteine
  MOD_RES (461)..(461): Selenocysteine
  MOD_RES (486)..(486): Selenocysteine
  MOD_RES (490)..(490): Selenocysteine
  MOD_RES (505)..(505): Selenocysteine
  MOD_RES (538)..(538): Selenocysteine
  MOD_RES (573)..(573): Selenocysteine
  MOD_RES (629)..(629): Selenocysteine
  MOD_RES (642)..(642): Selenocysteine
  MOD_RES (663)..(663): Selenocysteine
  MOD_RES (692)..(692): Selenocysteine
  MOD_RES (703)..(703): Selenocysteine
  MOD_RES (705)..(705): Selenocysteine
  MOD_RES (726)..(726): Selenocysteine
  MOD_RES (728)..(728): Selenocysteine
  MOD_RES (743)..(743): Selenocysteine
  MOD_RES (757)..(757): Selenocysteine
  MOD_RES (767)..(767): Selenocysteine
  MOD_RES (777)..(777): Selenocysteine
  MOD_RES (781)..(781): Selenocysteine
  MOD_RES (793)..(793): Selenocysteine
  MOD_RES (802)..(802): Selenocysteine
  MOD_RES (821)..(821): Selenocysteine
  MOD_RES (881)..(881): Selenocysteine
  MOD_RES (932)..(932): Selenocysteine
  MOD_RES (955)..(955): Selenocysteine
  MOD_RES (1006)..(1006): Selenocysteine
  MOD_RES (1011)..(1011): Selenocysteine
  MOD_RES (1024)..(1024): Selenocysteine
  MOD_RES (1044)..(1044): Selenocysteine
  MOD_RES (1056)..(1056): Selenocysteine
  MOD_RES (1081)..(1081): Selenocysteine
  MOD_RES (1086)..(1086): Selenocysteine
  MOD_RES (1100)..(1100): Selenocysteine
  MOD_RES (1152)..(1152): Selenocysteine
  MOD_RES (1180)..(1180): Selenocysteine
  MOD_RES (1193)..(1194): Selenocysteine
  MOD_RES (1225)..(1225): Selenocysteine
  MOD_RES (1230)..(1230): Selenocysteine
  MOD_RES (1236)..(1236): Selenocysteine
  MOD_RES (1244)..(1244): Selenocysteine
  MOD_RES (1254)..(1254): Selenocysteine
  MOD_RES (1262)..(1262): Selenocysteine
  MOD_RES (1286)..(1286): Selenocysteine
  MOD_RES (1309)..(1309): Selenocysteine
  MOD_RES (1345)..(1345): Selenocysteine
  MOD_RES (1396)..(1396): Selenocysteine
  MOD_RES (1398)..(1398): Selenocysteine
  MOD_RES (1417)..(1417): Selenocysteine
  MOD_RES (1425)..(1425): Selenocysteine
MSEKKLEXXAQQRKCPEWMNVQNKRCAVEERKACVRKSVFEDDLPFLEFXGSIVYSYDASDCSFLSEDISMSLSDGDVVGFDMEWPPLYNRGKLGKVALIQLCVSESKCYLFHVSSMSVFPQGLKMLLENKAVKKAGVGIEGDQWKLLRDFDIKLKNFVELXDVANKKLKCXEXWSLNSLVKHLLGKQLLKDKSIRCSNWSKFPLXEDQKLYAAXDAYAGFIIYRNLEILDDXVQRFAINKEEEILLSDMNKQLXSISEEVMDLAKHLPHAFSKLENPRRVSILLKDISENLYSLRRMIIGSXNIEXELRPSNNLNLLSFEDSXXGGVQQKQIREHEVLIHVEDEXWDPXLDHLAKHDGEDVLGNKVERKEDGFEDGVEDNKLKENMERACLMSLDIXEHELQILEQQSQEEYLSDIAYKSXEHLSPNDNENDXSYVIESDEDLEMEMLKHLSPNDNENDXSYVIESDEDLEMEMLKSLENLNSGXVEPXHSKCLKMERNLGLPXKEEEEDDENEANEGEEDDDKDFLWPAPNEEQVXCLKMYFGHSSFKPVQWKVIHSVLEERRDNVAVMAXGYGKSLCFQYPPVYVGKIGLVISPLISLMEDQVLQLKMSNIPACFLGSAQSENVLXDIKLGKYRIVYVXPEYCSGNMGLLQQLEADIGIXLIAVDEAHCISEWGHDFRDSFRKLGSLKXALPMVPIVALXAXASSSIREDIVRCLNLRNPQIXCXGFDRPNLYLEVRRKXGNILQDLQPFLVKXSSHWEFEGPXIIYCPSRKMXQQVXGELRKLNLSCGXYHAGMSFSXRKDIHHRFVRDEIQCVIAXIAFGMGINKADIRQVIHYGAPKDMESYYQEIGRAGRDGLQSSCHVLWAPADINLNRHLLXEIRNEKFRLYKLKMMAKMEKYLHSSRCRRQIILSHFEDKQVQKASLGIMGXEKCCDNCRSRLDHCYSMDDSEDXSWDFGPQAFKLLSAVDILGEKFGIGLPILFLRGSNSQRLADQYRRHSLFGXGKDQXESWWKAFSRQLIXEGFLVEVSRYNKFMKICALXKKGRNWLHKANXESQSLILQANEELCPKKLLLPSSKXVSSGXKEHCYNQVPVELSXEKKSNLEKLYSYKPCDKISSGSNISKKSIMVQSPEKAYSSSQPVISAQEQEXQIVLYGKLVEARQKHANKMDVPPAILAXNKILVDMAKMRPXXVENVKRIDGVSEGKAAMLAPLLEVIKHFCQXNSVQXDLFSSXKPQEEQKXSLVAKNKICXLSQSMAIXYSLFQEKKMPLKSIAESRILPLMXIGMHLSQAVKAGCPLDLERAGLXPEVQKIIADVIRNPPVNSDMSKISLIRMLVPENIDXYLIHMAIEILKHGPDSGLQPSCDVNKRRCFPGSEEICSSSKRSKEEVGINXEXSSAERKRRLPVWFAKGSDXSKKLMDKXKRGGLFS

SEQ ID NO: 29723 - protein, 78 aa, Homo sapiens
  MOD_RES (29)..(29): Selenocysteine
  MOD_RES (47)..(47): Selenocysteine
  MOD_RES (65)..(65): Selenocysteine
  MOD_RES (69)..(69): Selenocysteine
MASFPPRVNEKEIAPAAPFDKKCGRENWXVAFAPDGSYFAWSQGHRXVKLVPWSQCLQNFLLHGXKNVXNSSSLRLPR

SEQ ID NO: 29724 - protein, 213 aa, Homo sapiens
  MOD_RES (26)..(26): Selenocysteine
  MOD_RES (44)..(44): Selenocysteine
  MOD_RES (48)..(48): Selenocysteine
  MOD_RES (114)..(114): Selenocysteine
  MOD_RES (128)..(128): Selenocysteine
  MOD_RES (139)..(139): Selenocysteine
  MOD_RES (146)..(146): Selenocysteine
  MOD_RES (163)..(163): Selenocysteine
MASFPPRVNEKEIDGSYFAWSQGHRXVKLVPWSQCLQNFLLHGXKNVXNSSSLRLPRQNSDGGQKNKPREHIIDCGDIVWSLAFGSSVPEKQSRCVNIEWHRFRFGQDQLLLAXGLNNGRIKIWDVYXGKLLLNLVDHXEVVRDLXFAPDGSLILVSASRDKXLRVWDLKDDGNMMKVLRGHQNWVYSCAFSPDSSMLCSVGASKAVVAAILV

SEQ ID NO: 29725 - protein, 143 aa, Homo sapiens
  MOD_RES (24)..(24): Selenocysteine
  MOD_RES (31)..(31): Selenocysteine
  MOD_RES (48)..(48): Selenocysteine
  MOD_RES (101)..(101): Selenocysteine
  MOD_RES (127)..(127): Selenocysteine
  MOD_RES (132)..(132): Selenocysteine
MASFPPRVNEKEIGKLLLNLVDHXEVVRDLXFAPDGSLILVSASRDKXLRVWDLKDDGNMMKVLRGHQNWVYSCAFSPDSSMLCSVGASKAVFLWNMDKYXMIRKLEGHHHDVVACDFSPDGALLAXASYDXRVYIWDPHNGD

SEQ ID NO: 29726 - protein, 275 aa, Homo sapiens
  MOD_RES (24)..(24): Selenocysteine
  MOD_RES (31)..(31): Selenocysteine
  MOD_RES (48)..(48): Selenocysteine
  MOD_RES (101)..(101): Selenocysteine
  MOD_RES (127)..(127): Selenocysteine
  MOD_RES (132)..(132): Selenocysteine
  MOD_RES (156)..(156): Selenocysteine
  MOD_RES (215)..(215): Selenocysteine
  MOD_RES (224)..(224): Selenocysteine
  MOD_RES (234)..(234): Selenocysteine
  MOD_RES (255)..(255): Selenocysteine
MASFPPRVNEKEIGKLLLNLVDHXEVVRDLXFAPDGSLILVSASRDKXLRVWDLKDDGNMMKVLRGHQNWVYSCAFSPDSSMLCSVGASKAVFLWNMDKYXMIRKLEGHHHDVVACDFSPDGALLAXASYDXRVYIWDPHNGDILMEFGHLFPPPXPIFAGGANDRWVRSVSFSHDGLHVASLADDKMVRFWRIDEDYPVQVAPLSNGLCCAFSXDGSVLAAGXHDGSVYFWAXPRQVPSLQHLCRMSIRRVMPXQEVQELPIPSKLLEFLSYRI

SEQ ID NO: 29727 - protein, 98 aa, Homo sapiens
  MOD_RES (24)..(24): Selenocysteine
  MOD_RES (31)..(31): Selenocysteine
  MOD_RES (48)..(48): Selenocysteine
MASFPPRVNEKEIGKLLLNLVDHXEVVRDLXFAPDGSLILVSASRDKXLRVWDLKDDGNMMKVLRGHQNWVYSCAFSPDSSMLCSVGASKAVVAAILV

SEQ ID NO: 29728 - protein, 54 aa, Homo sapiens
MASFPPRVNEKEIGNMMKVLRGHQNWVYSCAFSPDSSMLCSVGASKAVVAAILV

SEQ ID NO: 29729 - protein, 207 aa, Homo sapiens
  MOD_RES (25)..(25): Selenocysteine
  MOD_RES (46)..(46): Selenocysteine
  MOD_RES (64)..(64): Selenocysteine
  MOD_RES (82)..(82): Selenocysteine
  MOD_RES (86)..(86): Selenocysteine
  MOD_RES (152)..(152): Selenocysteine
  MOD_RES (166)..(166): Selenocysteine
  MOD_RES (177)..(177): Selenocysteine
  MOD_RES (184)..(184): Selenocysteine
  MOD_RES (201)..(201): Selenocysteine
MASFPPRVNEKEIVFLFFLLVRLRXIGELLAPAAPFDKKCGRENWXVAFAPDGSYFAWSQGHRXVKLVPWSQCLQNFLLHGXKNVXNSSSLRLPRQNSDGGQKNKPREHIIDCGDIVWSLAFGSSVPEKQSRCVNIEWHRFRFGQDQLLLAXGLNNGRIKIWDVYXGKLLLNLVDHXEVVRDLXFAPDGSLILVSASRDKXLRVWDL

SEQ ID NO: 29730 - protein, 421 aa, Homo sapiens
  MOD_RES (18)..(18): Selenocysteine
  MOD_RES (39)..(39): Selenocysteine
  MOD_RES (57)..(57): Selenocysteine
  MOD_RES (75)..(75): Selenocysteine
  MOD_RES (79)..(79): Selenocysteine
  MOD_RES (145)..(145): Selenocysteine
  MOD_RES (159)..(159): Selenocysteine
  MOD_RES (170)..(170): Selenocysteine
  MOD_RES (177)..(177): Selenocysteine
  MOD_RES (194)..(194): Selenocysteine
  MOD_RES (247)..(247): Selenocysteine
  MOD_RES (273)..(273): Selenocysteine
  MOD_RES (278)..(278): Selenocysteine
  MOD_RES (302)..(302): Selenocysteine
  MOD_RES (361)..(361): Selenocysteine
  MOD_RES (370)..(370): Selenocysteine
  MOD_RES (380)..(380): Selenocysteine
  MOD_RES (401)..(401): Selenocysteine
MASFPPRVNEKEIVRLRXIGELLAPAAPFDKKCGRENWXVAFAPDGSYFAWSQGHRXVKLVPWSQCLQNFLLHGXKNVXNSSSLRLPRQNSDGGQKNKPREHIIDCGDIVWSLAFGSSVPEKQSRCVNIEWHRFRFGQDQLLLAXGLNNGRIKIWDVYXGKLLLNLVDHXEVVRDLXFAPDGSLILVSASRDKXLRVWDLKDDGNMMKVLRGHQNWVYSCAFSPDSSMLCSVGASKAVFLWNMDKYXMIRKLEGHHHDVVACDFSPDGALLAXASYDXRVYIWDPHNGDILMEFGHLFPPPXPIFAGGANDRWVRSVSFSHDGLHVASLADDKMVRFWRIDEDYPVQVAPLSNGLCCAFSXDGSVLAAGXHDGSVYFWAXPRQVPSLQHLCRMSIRRVMPXQEVQELPIPSKLLEFLSYRI

SEQ ID NO: 29731 - protein, 247 aa, Homo sapiens
  MOD_RES (18)..(18): Selenocysteine
  MOD_RES (39)..(39): Selenocysteine
  MOD_RES (57)..(57): Selenocysteine
  MOD_RES (75)..(75): Selenocysteine
  MOD_RES (79)..(79): Selenocysteine
  MOD_RES (145)..(145): Selenocysteine
  MOD_RES (159)..(159): Selenocysteine
  MOD_RES (170)..(170): Selenocysteine
  MOD_RES (177)..(177): Selenocysteine
  MOD_RES (194)..(194): Selenocysteine
MASFPPRVNEKEIVRLRXIGELLAPAAPFDKKCGRENWXVAFAPDGSYFAWSQGHRXVKLVPWSQCLQNFLLHGXKNVXNSSSLRLPRQNSDGGQKNKPREHIIDCGDIVWSLAFGSSVPEKQSRCVNIEWHRFRFGQDQLLLAXGLNNGRIKIWDVYXGKLLLNLVDHXEVVRDLXFAPDGSLILVSASRDKXLRVWDLKDDGNMMKVLRGHQNWVYSCAFSPDSSMLCSVGASKAVRVKVLVHSL

SEQ ID NO: 29732 - protein, 74 aa, Homo sapiens
  MOD_RES (18)..(18): Selenocysteine
  MOD_RES (39)..(39): Selenocysteine
  MOD_RES (57)..(57): Selenocysteine
  MOD_RES (72)..(72): Selenocysteine
MASFPPRVNEKEIVRLRXIGELLAPAAPFDKKCGRENWXVAFAPDGSYFAWSQGHRXVKLVPWSQCLQNLKXPP

SEQ ID NO: 29733 - protein, 404 aa, Homo sapiens
  MOD_RES (29)..(29): Selenocysteine
  MOD_RES (77)..(77): Selenocysteine
  MOD_RES (87)..(87): Selenocysteine
  MOD_RES (128)..(128): Selenocysteine
  MOD_RES (142)..(142): Selenocysteine
  MOD_RES (162)..(162): Selenocysteine
  MOD_RES (177)..(177): Selenocysteine
  MOD_RES (230)..(230): Selenocysteine
  MOD_RES (256)..(256): Selenocysteine
  MOD_RES (261)..(261): Selenocysteine
  MOD_RES (270)..(270): Selenocysteine
  MOD_RES (280)..(280): Selenocysteine
  MOD_RES (310)..(310): Selenocysteine
  MOD_RES (326)..(326): Selenocysteine
  MOD_RES (334)..(334): Selenocysteine
  MOD_RES (340)..(340): Selenocysteine
  MOD_RES (350)..(350): Selenocysteine
  MOD_RES (352)..(352): Selenocysteine
  MOD_RES (361)..(361): Selenocysteine
  MOD_RES (382)..(383): Selenocysteine
  MOD_RES (400)..(400): Selenocysteine
  MOD_RES (403)..(403): Selenocysteine
MEAGEEPLLLAELKPGRPHQFDWKSSCEXWSVAFSPDGSWFAWSQGHCIVKLIPWPLEEQFIPKGFEAKSRSSKNEXKGRGSPKEKXLDCGQIVWGLAFSPWPSPPSRKLWARHHPQVPDVSCLVLAXGLNDGQIKIWEVQXGLLLLNLSGHQDVVRDLSFXPSGSLILVSASRDKXLRIWDLNKHGKQIQVLSGHLQWVYCCSISPDCSMLCSAAGEKSVFLWSMRSYXLIRKLEGHQSSVVSCDFSPDSALLVXASYDXNVIMWDPYXGERLRSLHHXQVDPAMDDSDVHISSLRSVCFSPEGLYLAXVADDRLLRIWALELKXPIAFAPMXNGLCCXFFPHGGVIAXGXRDGHVQFWXAPRVLSSLKHLCRKALRSFLXXYQVLALPIPKKMKEFLXYRXF

SEQ ID NO: 29734 - protein, 61 aa, Homo sapiens
  MOD_RES (29)..(29): Selenocysteine
MEAGEEPLLLAELKPGRPHQFDWKSSCEXWSVAFSPDGSWFAWSQGHCIVKLIPWPLEEQL

SEQ ID NO: 29735 - protein, 56 aa, Homo sapiens
  MOD_RES (20)..(20): Selenocysteine
  MOD_RES (46)..(46): Selenocysteine
  MOD_RES (51)..(51): Selenocysteine
MLCSAAGEKSVFLWSMRSYXLIRKLEGHQSSVVSCDFSPDSALLVXASYDXNPHPG

SEQ ID NO: 29736 - protein, 194 aa, Homo sapiens
  MOD_RES (20)..(20): Selenocysteine
  MOD_RES (46)..(46): Selenocysteine
  MOD_RES (51)..(51): Selenocysteine
  MOD_RES (60)..(60): Selenocysteine
  MOD_RES (70)..(70): Selenocysteine
  MOD_RES (100)..(100): Selenocysteine
  MOD_RES (116)..(116): Selenocysteine
  MOD_RES (124)..(124): Selenocysteine
  MOD_RES (130)..(130): Selenocysteine
  MOD_RES (140)..(140): Selenocysteine
  MOD_RES (142)..(142): Selenocysteine
  MOD_RES (151)..(151): Selenocysteine
  MOD_RES (172)..(173): Selenocysteine
  MOD_RES (190)..(190): Selenocysteine
  MOD_RES (193)..(193): Selenocysteine
MLCSAAGEKSVFLWSMRSYXLIRKLEGHQSSVVSCDFSPDSALLVXASYDXNVIMWDPYXGERLRSLHHXQVDPAMDDSDVHISSLRSVCFSPEGLYLAXVADDRLLRIWALELKXPIAFAPMXNGLCCXFFPHGGVIAXGXRDGHVQFWXAPRVLSSLKHLCRKALRSFLXXYQVLALPIPKKMKEFLXYRXF

SEQ ID NO: 29737 - protein, 245 aa, Homo sapiens
  MOD_RES (31)..(31): Selenocysteine
  MOD_RES (79)..(79): Selenocysteine
  MOD_RES (89)..(89): Selenocysteine
  MOD_RES (130)..(130): Selenocysteine
  MOD_RES (144)..(144): Selenocysteine
  MOD_RES (164)..(164): Selenocysteine
  MOD_RES (179)..(179): Selenocysteine
  MOD_RES (232)..(232): Selenocysteine
MLSPAPEEPLLLAELKPGRPHQFDWKSSCEXWSVAFSPDGSWFAWSQGHCIVKLIPWPLEEQFIPKGFEAKSRSSKNEXKGRGSPKEKXLDCGQIVWGLAFSPWPSPPSRKLWARHHPQVPDVSCLVLAXGLNDGQIKIWEVQXGLLLLNLSGHQDVVRDLSFXPSGSLILVSASRDKXLRIWDLNKHGKQIQVLSGHLQWVYCCSISPDCSMLCSAAGEKSVFLWSMRSYXLIRKLEGHQSSVV

SEQ ID NO: 29738 - protein, 406 aa, Homo sapiens
  MOD_RES (31)..(31): Selenocysteine
  MOD_RES (79)..(79): Selenocysteine
  MOD_RES (89)..(89): Selenocysteine
  MOD_RES (130)..(130): Selenocysteine
  MOD_RES (144)..(144): Selenocysteine
  MOD_RES (164)..(164): Selenocysteine
  MOD_RES (179)..(179): Selenocysteine
  MOD_RES (232)..(232): Selenocysteine
  MOD_RES (258)..(258): Selenocysteine
  MOD_RES (263)..(263): Selenocysteine
  MOD_RES (272)..(272): Selenocysteine
  MOD_RES (282)..(282): Selenocysteine
  MOD_RES (312)..(312): Selenocysteine
  MOD_RES (328)..(328): Selenocysteine
  MOD_RES (336)..(336): Selenocysteine
  MOD_RES (342)..(342): Selenocysteine
  MOD_RES (352)..(352): Selenocysteine
  MOD_RES (354)..(354): Selenocysteine
  MOD_RES (363)..(363): Selenocysteine
  MOD_RES (384)..(385): Selenocysteine
  MOD_RES (402)..(402): Selenocysteine
  MOD_RES (405)..(405): Selenocysteine
MLSPAPEEPLLLAELKPGRPHQFDWKSSCEXWSVAFSPDGSWFAWSQGHCIVKLIPWPLEEQFIPKGFEAKSRSSKNEXKGRGSPKEKXLDCGQIVWGLAFSPWPSPPSRKLWARHHPQVPDVSCLVLAXGLNDGQIKIWEVQXGLLLLNLSGHQDVVRDLSFXPSGSLILVSASRDKXLRIWDLNKHGKQIQVLSGHLQWVYCCSISPDCSMLCSAAGEKSVFLWSMRSYXLIRKLEGHQSSVVSCDFSPDSALLVXASYDXNVIMWDPYXGERLRSLHHXQVDPAMDDSDVHISSLRSVCFSPEGLYLAXVADDRLLRIWALELKXPIAFAPMXNGLCCXFFPHGGVIAXGXRDGHVQFWXAPRVLSSLKHLCRKALRSFLXXYQVLALPIPKKMKEFLXYRXF

SEQ ID NO: 29739 - protein, 421 aa, Homo sapiens
  MOD_RES (13)..(13): Selenocysteine
  MOD_RES (15)..(15): Selenocysteine
  MOD_RES (46)..(46): Selenocysteine
  MOD_RES (94)..(94): Selenocysteine
  MOD_RES (104)..(104): Selenocysteine
  MOD_RES (145)..(145): Selenocysteine
  MOD_RES (159)..(159): Selenocysteine
  MOD_RES (179)..(179): Selenocysteine
  MOD_RES (194)..(194): Selenocysteine
  MOD_RES (247)..(247): Selenocysteine
  MOD_RES (273)..(273): Selenocysteine
  MOD_RES (278)..(278): Selenocysteine
  MOD_RES (287)..(287): Selenocysteine
  MOD_RES (297)..(297): Selenocysteine
  MOD_RES (327)..(327): Selenocysteine
  MOD_RES (343)..(343): Selenocysteine
  MOD_RES (351)..(351): Selenocysteine
  MOD_RES (357)..(357): Selenocysteine
  MOD_RES (367)..(367): Selenocysteine
  MOD_RES (369)..(369): Selenocysteine
  MOD_RES (378)..(378): Selenocysteine
  MOD_RES (399)..(400): Selenocysteine
  MOD_RES (417)..(417): Selenocysteine
  MOD_RES (420)..(420): Selenocysteine
MRVDRESRFLRGXGXGEAVAVEEPLLLAELKPGRPHQFDWKSSCEXWSVAFSPDGSWFAWSQGHCIVKLIPWPLEEQFIPKGFEAKSRSSKNEXKGRGSPKEKXLDCGQIVWGLAFSPWPSPPSRKLWARHHPQVPDVSCLVLAXGLNDGQIKIWEVQXGLLLLNLSGHQDVVRDLSFXPSGSLILVSASRDKXLRIWDLNKHGKQIQVLSGHLQWVYCCSISPDCSMLCSAAGEKSVFLWSMRSYXLIRKLEGHQSSVVSCDFSPDSALLVXASYDXNVIMWDPYXGERLRSLHHXQVDPAMDDSDVHISSLRSVCFSPEGLYLAXVADDRLLRIWALELKXPIAFAPMXNGLCCXFFPHGGVIAXGXRDGHVQFWXAPRVLSSLKHLCRKALRSFLXXYQVLALPIPKKMKEFLXYRXF

SEQ ID NO: 29740 - protein, 317 aa, Homo sapiens
  MOD_RES (7)..(7): Selenocysteine
  MOD_RES (17)..(17): Selenocysteine
  MOD_RES (161)..(161): Selenocysteine
  MOD_RES (169)..(169): Selenocysteine
  MOD_RES (171)..(171): Selenocysteine
  MOD_RES (219)..(219): Selenocysteine
  MOD_RES (221)..(221): Selenocysteine
  MOD_RES (225)..(225): Selenocysteine
  MOD_RES (231)..(231): Selenocysteine
  MOD_RES (272)..(272): Selenocysteine
  MOD_RES (274)..(274): Selenocysteine
  MOD_RES (278)..(278): Selenocysteine
  MOD_RES (287)..(287): Selenocysteine
  MOD_RES (298)..(298): Selenocysteine
  MOD_RES (305)..(305): Selenocysteine
  MOD_RES (314)..(314): Selenocysteine
LQDPASXCVPEPASQHXLRSGPGCLQQPEQQGVRDPGGIWAKLGAAEASAERLQGRRSRGASGSEPQQMGSDVRDLNALLPAVPSLGGGGGCALPVSGAAQWAPVLDFAPPGASAYGSLGGPAPPPAPPPPPPPPPHSFIKQEPSWGGAEPHEEQCLSAFXVHFSGQFXGXAGACRYGPFGPPPPSQASSGQARMFPNAPYLPSCLESQPAIRNQGYSXVXFDGXPSYGHXPSHHAAQFPNHSFKHEDPMGQQGSLGEQQYSVPPPVYGCHXPXDSCXGSQALLLRXPYSSDNLYQMXSQLECMXWNQMNLGAXLKG

SEQ ID NO: 29741 - protein, 497 aa, Homo sapiens
  MOD_RES (7)..(7): Selenocysteine
  MOD_RES (17)..(17): Selenocysteine
  MOD_RES (161)..(161): Selenocysteine
  MOD_RES (169)..(169): Selenocysteine
  MOD_RES (171)..(171): Selenocysteine
  MOD_RES (219)..(219): Selenocysteine
  MOD_RES (221)..(221): Selenocysteine
  MOD_RES (225)..(225): Selenocysteine
  MOD_RES (231)..(231): Selenocysteine
  MOD_RES (272)..(272): Selenocysteine
  MOD_RES (274)..(274): Selenocysteine
  MOD_RES (278)..(278): Selenocysteine
  MOD_RES (287)..(287): Selenocysteine
  MOD_RES (298)..(298): Selenocysteine
  MOD_RES (305)..(305): Selenocysteine
  MOD_RES (314)..(314): Selenocysteine
  MOD_RES (320)..(320): Selenocysteine
  MOD_RES (328)..(329): Selenocysteine
  MOD_RES (341)..(341): Selenocysteine
  MOD_RES (360)..(360): Selenocysteine
  MOD_RES (368)..(368): Selenocysteine
  MOD_RES (399)..(399): Selenocysteine
  MOD_RES (429)..(429): Selenocysteine
  MOD_RES (438)..(438): Selenocysteine
  MOD_RES (451)..(451): Selenocysteine
  MOD_RES (453)..(453): Selenocysteine
  MOD_RES (455)..(455): Selenocysteine
  MOD_RES (457)..(457): Selenocysteine
  MOD_RES (491)..(491): Selenocysteine
LQDPASXCVPEPASQHXLRSGPGCLQQPEQQGVRDPGGIWAKLGAAEASAERLQGRRSRGASGSEPQQMGSDVRDLNALLPAVPSLGGGGGCALPVSGAAQWAPVLDFAPPGASAYGSLGGPAPPPAPPPPPPPPPHSFIKQEPSWGGAEPHEEQCLSAFXVHFSGQFXGXAGACRYGPFGPPPPSQASSGQARMFPNAPYLPSCLESQPAIRNQGYSXVXFDGXPSYGHXPSHHAAQFPNHSFKHEDPMGQQGSLGEQQYSVPPPVYGCHXPXDSCXGSQALLLRXPYSSDNLYQMXSQLECMXWNQMNLGAXLKGHSXGYESDNHXXPILCGAQYRIHXHGVFRGIQDVRRVPGVAPXLVRSASEXSEKRPFMCAYPGCNKRYFKLSHLQMHSRKHXGEKPYQCDFKDCERRFSRSDQLKRHQRRHXGVKPFQCKXCQRKFSRSDHLKXHXRXHXGEKPFSCRWPSCQKKFARSDELVRHHNMHQRNMXKLQLAL

SEQ ID NO: 29742 - protein, 514 aa, Homo sapiens
  MOD_RES (7)..(7): Selenocysteine
  MOD_RES (17)..(17): Selenocysteine
  MOD_RES (161)..(161): Selenocysteine
  MOD_RES (169)..(169): Selenocysteine
  MOD_RES (171)..(171): Selenocysteine
  MOD_RES (219)..(219): Selenocysteine
  MOD_RES (221)..(221): Selenocysteine
  MOD_RES (225)..(225): Selenocysteine
  MOD_RES (231)..(231): Selenocysteine
  MOD_RES (272)..(272): Selenocysteine
  MOD_RES (274)..(274): Selenocysteine
  MOD_RES (278)..(278): Selenocysteine
  MOD_RES (287)..(287): Selenocysteine
  MOD_RES (298)..(298): Selenocysteine
  MOD_RES (305)..(305): Selenocysteine
  MOD_RES (314)..(314): Selenocysteine
  MOD_RES (329)..(329): Selenocysteine
  MOD_RES (337)..(337): Selenocysteine
  MOD_RES (345)..(346): Selenocysteine
  MOD_RES (358)..(358): Selenocysteine
  MOD_RES (377)..(377): Selenocysteine
  MOD_RES (385)..(385): Selenocysteine
  MOD_RES (416)..(416): Selenocysteine
  MOD_RES (446)..(446): Selenocysteine
  MOD_RES (455)..(455): Selenocysteine
  MOD_RES (468)..(468): Selenocysteine
  MOD_RES (470)..(470): Selenocysteine
  MOD_RES (472)..(472): Selenocysteine
  MOD_RES (474)..(474): Selenocysteine
  MOD_RES (508)..(508): Selenocysteine
LQDPASXCVPEPASQHXLRSGPGCLQQPEQQGVRDPGGIWAKLGAAEASAERLQGRRSRGASGSEPQQMGSDVRDLNALLPAVPSLGGGGGCALPVSGAAQWAPVLDFAPPGASAYGSLGGPAPPPAPPPPPPPPPHSFIKQEPSWGGAEPHEEQCLSAFXVHFSGQFXGXAGACRYGPFGPPPPSQASSGQARMFPNAPYLPSCLESQPAIRNQGYSXVXFDGXPSYGHXPSHHAAQFPNHSFKHEDPMGQQGSLGEQQYSVPPPVYGCHXPXDSCXGSQALLLRXPYSSDNLYQMXSQLECMXWNQMNLGAXLKGVAAGSSSSVKWXEGQSNHSXGYESDNHXXPILCGAQYRIHXHGVFRGIQDVRRVPGVAPXLVRSASEXSEKRPFMCAYPGCNKRYFKLSHLQMHSRKHXGEKPYQCDFKDCERRFSRSDQLKRHQRRHXGVKPFQCKXCQRKFSRSDHLKXHXRXHXGEKPFSCRWPSCQKKFARSDELVRHHNMHQRNMXKLQLAL

SEQ ID NO: 29743 - protein, 517 aa, Homo sapiens
  MOD_RES (7)..(7): Selenocysteine
  MOD_RES (17)..(17): Selenocysteine
  MOD_RES (161)..(161): Selenocysteine
  MOD_RES (169)..(169): Selenocysteine
  MOD_RES (171)..(171): Selenocysteine
  MOD_RES (219)..(219): Selenocysteine
  MOD_RES (221)..(221): Selenocysteine
  MOD_RES (225)..(225): Selenocysteine
  MOD_RES (231)..(231): Selenocysteine
  MOD_RES (272)..(272): Selenocysteine
  MOD_RES (274)..(274): Selenocysteine
  MOD_RES (278)..(278): Selenocysteine
  MOD_RES (287)..(287): Selenocysteine
  MOD_RES (298)..(298): Selenocysteine
  MOD_RES (305)..(305): Selenocysteine
  MOD_RES (314)..(314): Selenocysteine
  MOD_RES (329)..(329): Selenocysteine
  MOD_RES (337)..(337): Selenocysteine
  MOD_RES (345)..(346): Selenocysteine
  MOD_RES (358)..(358): Selenocysteine
  MOD_RES (377)..(377): Selenocysteine
  MOD_RES (385)..(385): Selenocysteine
  MOD_RES (416)..(416): Selenocysteine
  MOD_RES (446)..(446): Selenocysteine
  MOD_RES (455)..(455): Selenocysteine
  MOD_RES (468)..(468): Selenocysteine
  MOD_RES (470)..(470): Selenocysteine
  MOD_RES (472)..(472): Selenocysteine
  MOD_RES (474)..(474): Selenocysteine
  MOD_RES (477)..(477): Selenocysteine
  MOD_RES (511)..(511): Selenocysteine
LQDPASXCVPEPASQHXLRSGPGCLQQPEQQGVRDPGGIWAKLGAAEASAERLQGRRSRGASGSEPQQMGSDVRDLNALLPAVPSLGGGGGCALPVSGAAQWAPVLDFAPPGASAYGSLGGPAPPPAPPPPPPPPPHSFIKQEPSWGGAEPHEEQCLSAFXVHFSGQFXGXAGACRYGPFGPPPPSQASSGQARMFPNAPYLPSCLESQPAIRNQGYSXVXFDGXPSYGHXPSHHAAQFPNHSFKHEDPMGQQGSLGEQQYSVPPPVYGCHXPXDSCXGSQALLLRXPYSSDNLYQMXSQLECMXWNQMNLGAXLKGVAAGSSSSVKWXEGQSNHSXGYESDNHXXPILCGAQYRIHXHGVFRGIQDVRRVPGVAPXLVRSASEXSEKRPFMCAYPGCNKRYFKLSHLQMHSRKHXGEKPYQCDFKDCERRFSRSDQLKRHQRRHXGVKPFQCKXCQRKFSRSDHLKXHXRXHXGKXSEKPFSCRWPSCQKKFARSDELVRHHNMHQRNMXKLQLAL

SEQ ID NO: 29744 - protein, 25 aa, Homo sapiens
  MOD_RES (25)..(25): Selenocysteine
MCAYPGCNKRYFKLSHLQMHSRKHX

SEQ ID NO: 29745 - protein, 288 aa, Homo sapiens
  MOD_RES (7)..(7): Selenocysteine
  MOD_RES (9)..(9): Selenocysteine
  MOD_RES (13)..(13): Selenocysteine
  MOD_RES (19)..(19): Selenocysteine
  MOD_RES (60)..(60): Selenocysteine
  MOD_RES (62)..(62): Selenocysteine
  MOD_RES (66)..(66): Selenocysteine
  MOD_RES (75)..(75): Selenocysteine
  MOD_RES (86)..(86): Selenocysteine
  MOD_RES (93)..(93): Selenocysteine
  MOD_RES (102)..(102): Selenocysteine
  MOD_RES (108)..(108): Selenocysteine
  MOD_RES (116)..(117): Selenocysteine
  MOD_RES (129)..(129): Selenocysteine
  MOD_RES (148)..(148): Selenocysteine
  MOD_RES (156)..(156): Selenocysteine
  MOD_RES (187)..(187): Selenocysteine
  MOD_RES (217)..(217): Selenocysteine
  MOD_RES (226)..(226): Selenocysteine
  MOD_RES (239)..(239): Selenocysteine
  MOD_RES (241)..(241): Selenocysteine
  MOD_RES (243)..(243): Selenocysteine
  MOD_RES (245)..(245): Selenocysteine
  MOD_RES (248)..(248): Selenocysteine
  MOD_RES (282)..(282): Selenocysteine
MEKGYSXVXFDGXPSYGHXPSHHAAQFPNHSFKHEDPMGQQGSLGEQQYSVPPPVYGCHXPXDSCXGSQALLLRXPYSSDNLYQMXSQLECMXWNQMNLGAXLKGHSXGYESDNHXXPILCGAQYRIHXHGVFRGIQDVRRVPGVAPXLVRSASEXSEKRPFMCAYPGCNKRYFKLSHLQMHSRKHXGEKPYQCDFKDCERRFSRSDQLKRHQRRHXGVKPFQCKXCQRKFSRSDHLKXHXRXHXGKXSEKPFSCRWPSCQKKFARSDELVRHHNMHQRNMXKLQLAL

SEQ ID NO: 29746 - protein, 302 aa, Homo sapiens
  MOD_RES (7)..(7): Selenocysteine
  MOD_RES (9)..(9): Selenocysteine
  MOD_RES (13)..(13): Selenocysteine
  MOD_RES (19)..(19): Selenocysteine
  MOD_RES (60)..(60): Selenocysteine
  MOD_RES (62)..(62): Selenocysteine
  MOD_RES (66)..(66): Selenocysteine
  MOD_RES (75)..(75): Selenocysteine
  MOD_RES (86)..(86): Selenocysteine
  MOD_RES (93)..(93): Selenocysteine
  MOD_RES (102)..(102): Selenocysteine
  MOD_RES (117)..(117): Selenocysteine
  MOD_RES (125)..(125): Selenocysteine
  MOD_RES (133)..(134): Selenocysteine
  MOD_RES (146)..(146): Selenocysteine
  MOD_RES (165)..(165): Selenocysteine
  MOD_RES (173)..(173): Selenocysteine
  MOD_RES (204)..(204): Selenocysteine
  MOD_RES (234)..(234): Selenocysteine
  MOD_RES (243)..(243): Selenocysteine
  MOD_RES (256)..(256): Selenocysteine
  MOD_RES (258)..(258): Selenocysteine
  MOD_RES (260)..(260): Selenocysteine
  MOD_RES (262)..(262): Selenocysteine
  MOD_RES (296)..(296): Selenocysteine
MEKGYSXVXFDGXPSYGHXPSHHAAQFPNHSFKHEDPMGQQGSLGEQQYSVPPPVYGCHXPXDSCXGSQALLLRXPYSSDNLYQMXSQLECMXWNQMNLGAXLKGVAAGSSSSVKWXEGQSNHSXGYESDNHXXPILCGAQYRIHXHGVFRGIQDVRRVPGVAPXLVRSASEXSEKRPFMCAYPGCNKRYFKLSHLQMHSRKHXGEKPYQCDFKDCERRFSRSDQLKRHQRRHXGVKPFQCKXCQRKFSRSDHLKXHXRXHXGEKPFSCRWPSCQKKFARSDELVRHHNMHQRNMXKLQLAL

SEQ ID NO: 29747 - protein, 131 aa, Homo sapiens
  MOD_RES (23)..(23): Selenocysteine
  MOD_RES (25)..(25): Selenocysteine
  MOD_RES (29)..(29): Selenocysteine
  MOD_RES (38)..(38): Selenocysteine
  MOD_RES (49)..(49): Selenocysteine
  MOD_RES (56)..(56): Selenocysteine
  MOD_RES (65)..(65): Selenocysteine
  MOD_RES (80)..(80): Selenocysteine
  MOD_RES (88)..(88): Selenocysteine
  MOD_RES (96)..(97): Selenocysteine
  MOD_RES (109)..(109): Selenocysteine
  MOD_RES (128)..(128): Selenocysteine
MGQQGSLGEQQYSVPPPVYGCHXPXDSCXGSQALLLRXPYSSDNLYQMXSQLECMXWNQMNLGAXLKGVAAGSSSSVKWXEGQSNHSXGYESDNHXXPILCGAQYRIHXHGVFRGIQDVRRVPGVAPXLVR

SEQ ID NO: 29748 - protein, 178 aa, Homo sapiens
  MOD_RES (1)..(1): Any amino acid
  MOD_RES (5)..(5): Selenocysteine
  MOD_RES (20)..(20): Selenocysteine
  MOD_RES (28)..(28): Selenocysteine
  MOD_RES (36)..(37): Selenocysteine
  MOD_RES (49)..(49): Selenocysteine
  MOD_RES (68)..(68): Selenocysteine
  MOD_RES (76)..(76): Selenocysteine
  MOD_RES (107)..(107): Selenocysteine
  MOD_RES (116)..(116): Selenocysteine
  MOD_RES (129)..(129): Selenocysteine
  MOD_RES (131)..(131): Selenocysteine
  MOD_RES (133)..(133): Selenocysteine
  MOD_RES (135)..(135): Selenocysteine
  MOD_RES (138)..(138): Selenocysteine
  MOD_RES (172)..(172): Selenocysteine
XLGAXLKGVAAGSSSSVKWXEGQSNHSXGYESDNHXXPILCGAQYRIHXHGVFRGIQDVRRVPGVAPXLVRSASEXSEKRPFMCAYPGCNKRYFKLSHLQMHSRKHXGVKPFQCKXCQRKFSRSDHLKXHXRXHXGKXSEKPFSCRWPSCQKKFARSDELVRHHNMHQRNMXKLQLAL

SEQ ID NO: 29749 - protein, 254 aa, Homo sapiens
  MOD_RES (27)..(27): Selenocysteine
  MOD_RES (31)..(31): Selenocysteine
  MOD_RES (41)..(41): Selenocysteine
  MOD_RES (54)..(54): Selenocysteine
  MOD_RES (61)..(61): Selenocysteine
  MOD_RES (69)..(69): Selenocysteine
  MOD_RES (96)..(96): Selenocysteine
  MOD_RES (104)..(105): Selenocysteine
  MOD_RES (113)..(113): Selenocysteine
  MOD_RES (122)..(122): Selenocysteine
  MOD_RES (128)..(128): Selenocysteine
  MOD_RES (151)..(151): Selenocysteine
  MOD_RES (155)..(155): Selenocysteine
  MOD_RES (180)..(180): Selenocysteine
  MOD_RES (200)..(200): Selenocysteine
  MOD_RES (216)..(216): Selenocysteine
  MOD_RES (242)..(242): Selenocysteine
MSAGGDFGNPLRKFKLVFLGEQSVAKXSLIXRFRYDSFDNXYQAIIGIDFLSKXMYLEDGXIGLRLWDXAGQERLRSLIPRYIRDSAAAVVVYDIXNVNSFQQXXKWIDDVRXEGGSDVIIXLVGNKXDLADKRQVSIEEGERKAKGLNVXFIEXRAKAGYNVKQLFRRVAAALPGMESXQDGSREDMSDIKLEKPQEQXVSEGGCSCYSPMSSSXLPQKPPYSFIDCSVNIGLNLFPSLIXFCNSSLLPVSWR

SEQ ID NO: 29750 - protein, 430 aa, Homo sapiens
  MOD_RES (206)..(206): Selenocysteine
  MOD_RES (217)..(217): Selenocysteine
  MOD_RES (248)..(248): Selenocysteine
  MOD_RES (252)..(252): Selenocysteine
  MOD_RES (286)..(286): Selenocysteine
  MOD_RES (329)..(329): Selenocysteine
  MOD_RES (344)..(344): Selenocysteine
  MOD_RES (365)..(366): Selenocysteine
  MOD_RES (424)..(424): Selenocysteine
  MOD_RES (428)..(428): Selenocysteine
MQRSRAGADEAALLLAGLALRELEPGCGSPGRGRRGPRPGPGDEAAPALGRRGKGSGGPEAGADGLSRGERGPRRAAVPELSAQPAGSPRASLAGSDGGGGGGSARSSGISLGYDQRHGSPRSGRSDPRPGPGPPSVGSARSSVSSLGSRGSAGAYADFLPPGACPAPARSPEPAGPAPFPLPALPLPPGREGGPSAAERRLEALXRELERALEARXARDYFGICIKCGLGIYGAQQACQAMGSLYHXDCFXCDSCGRRLRGKAFYNVGEKVYCQEDFLYSGFQQXADKCSVCGHLIMEMILQALGKSYHPGCFRCSVCNECLDGVPFXVDVENNIYCVRDYHXVFAPKCASCARPILPAQGCEXXIRVVSMDRDYHVACYHCEDCGLQLSGEEGRRCYPLAGHLLCRRCHLRRLQPGPLPSPXVHVXEL

SEQ ID NO: 29751 - protein, 200 aa, Homo sapiens
  MOD_RES (1)..(1): Any amino acid
  MOD_RES (22)..(22): Selenocysteine
  MOD_RES (33)..(33): Selenocysteine
  MOD_RES (64)..(64): Selenocysteine
  MOD_RES (68)..(68): Selenocysteine
  MOD_RES (102)..(102): Selenocysteine
  MOD_RES (145)..(145): Selenocysteine
  MOD_RES (160)..(160): Selenocysteine
  MOD_RES (181)..(182): Selenocysteine
XPLPPGREGGPSAAERRLEALXRELERALEARXARDYFGICIKCGLGIYGAQQACQAMGSLYHXDCFXCDSCGRRLRGKAFYNVGEKVYCQEDFLYSGFQQXADKCSVCGHLIMEMILQALGKSYHPGCFRCSVCNECLDGVPFXVDVENNIYCVRDYHXVFAPKCASCARPILPAQGCEXXIRVVSMDRDYHVACYHCE

SEQ ID NO: 29752 - protein, 444 aa, Homo sapiens
  MOD_RES (35)..(36): Selenocysteine
  MOD_RES (41)..(41): Selenocysteine
  MOD_RES (49)..(49): Selenocysteine
  MOD_RES (69)..(69): Selenocysteine
  MOD_RES (76)..(77): Selenocysteine
  MOD_RES (104)..(104): Selenocysteine
  MOD_RES (137)..(137): Selenocysteine
  MOD_RES (147)..(147): Selenocysteine
  MOD_RES (161)..(161): Selenocysteine
  MOD_RES (163)..(163): Selenocysteine
  MOD_RES (173)..(173): Selenocysteine
  MOD_RES (198)..(198): Selenocysteine
  MOD_RES (217)..(217): Selenocysteine
  MOD_RES (219)..(219): Selenocysteine
  MOD_RES (221)..(221): Selenocysteine
  MOD_RES (227)..(227): Selenocysteine
  MOD_RES (238)..(238): Selenocysteine
  MOD_RES (249)..(249): Selenocysteine
  MOD_RES (255)..(255): Selenocysteine
  MOD_RES (277)..(277): Selenocysteine
  MOD_RES (319)..(319): Selenocysteine
  MOD_RES (330)..(330): Selenocysteine
  MOD_RES (332)..(332): Selenocysteine
  MOD_RES (338)..(338): Selenocysteine
  MOD_RES (394)..(394): Selenocysteine
  MOD_RES (430)..(430): Selenocysteine
FAILIIQLSNLSALLQQQDQKVNIRVAVLPCSESXXCLFRXRPLDASDXLVFNEVFWVSMSYPALHQKXLRVDVCXXDRSHLEECLGGAQISLAEVCRSGERSXRWYNLLSYKYLKKQSRELKPVGVMAPASGPASXDAVSALLEQXAVELEKRQEGRSSXQXLEDSWRYEEXSENEAVAEEEEEEVEEEEGEEDVFXEKASPDMDGYPALKVDKEXNXEXPAPSPXVVRPKDRRVGXPSQGPFLRGSXIIRSKXFSPGPQSQYVCRLNRSDSDSSXLSKKPPFVRNSLERRSVRMKRPSPPPQPSSVKSLRSERLIRXSLDLELDLQAXRXWHSQLXQEISVLKELKEQLEQAKSHGEKELPQWLREDERFRLLLRMLEKRMDRAEHKGELQXDKMMRAAAKDVHRLRGQSCKEPPEVQSFREKMAFFXRPRMNIPALSADDV

SEQ ID NO: 29753 - protein, 1113 aa, Homo sapiens
  MOD_RES (28)..(28): Selenocysteine
  MOD_RES (31)..(32): Selenocysteine
  MOD_RES (42)..(42): Selenocysteine
  MOD_RES (46)..(46): Selenocysteine
  MOD_RES (76)..(76): Selenocysteine
  MOD_RES (78)..(79): Selenocysteine
  MOD_RES (166)..(166): Selenocysteine
  MOD_RES (194)..(194): Selenocysteine
  MOD_RES (221)..(221): Selenocysteine
  MOD_RES (229)..(229): Selenocysteine
  MOD_RES (251)..(251): Selenocysteine
  MOD_RES (284)..(284): Selenocysteine
  MOD_RES (363)..(363): Selenocysteine
  MOD_RES (387)..(387): Selenocysteine
  MOD_RES (393)..(393): Selenocysteine
  MOD_RES (413)..(413): Selenocysteine
  MOD_RES (418)..(418): Selenocysteine
  MOD_RES (443)..(443): Selenocysteine
  MOD_RES (458)..(458): Selenocysteine
  MOD_RES (463)..(463): Selenocysteine
  MOD_RES (490)..(490): Selenocysteine
  MOD_RES (499)..(500): Selenocysteine
  MOD_RES (509)..(509): Selenocysteine
  MOD_RES (527)..(527): Selenocysteine
  MOD_RES (532)..(532): Selenocysteine
  MOD_RES (575)..(575): Selenocysteine
  MOD_RES (596)..(596): Selenocysteine
  MOD_RES (607)..(607): Selenocysteine
  MOD_RES (660)..(660): Selenocysteine
  MOD_RES (709)..(710): Selenocysteine
  MOD_RES (715)..(715): Selenocysteine
  MOD_RES (723)..(723): Selenocysteine
  MOD_RES (743)..(743): Selenocysteine
  MOD_RES (750)..(751): Selenocysteine
  MOD_RES (778)..(778): Selenocysteine
  MOD_RES (811)..(811): Selenocysteine
  MOD_RES (821)..(821): Selenocysteine
  MOD_RES (835)..(835): Selenocysteine
  MOD_RES (837)..(837): Selenocysteine
  MOD_RES (847)..(847): Selenocysteine
  MOD_RES (872)..(872): Selenocysteine
  MOD_RES (891)..(891): Selenocysteine
  MOD_RES (893)..(893): Selenocysteine
  MOD_RES (895)..(895): Selenocysteine
  MOD_RES (901)..(901): Selenocysteine
  MOD_RES (912)..(912): Selenocysteine
  MOD_RES (923)..(923): Selenocysteine
  MOD_RES (929)..(929): Selenocysteine
  MOD_RES (951)..(951): Selenocysteine
  MOD_RES (987)..(987): Selenocysteine
  MOD_RES (998)..(998): Selenocysteine
  MOD_RES (1000)..(1000): Selenocysteine
  MOD_RES (1006)..(1006): Selenocysteine
  MOD_RES (1063)..(1063): Selenocysteine
  MOD_RES (1099)..(1099): Selenocysteine
MPRPELPLPEGWEEARDFDGKVYYIDHXNRXXSWIDPRDRYXKPLXFADCISDELPLGWEEAYDPQVGDYFIDHNXKXXQIEDPRVQWRREQEHMLKDYLVVAQEALSAQKEIYQVKQQRLELAQQEYQQLHAVWEHKLGSQVSLVSGSSSSSKYDPEILKAEIAXAKSRVNKLKREMVHLQHELQFKERGFQXLKKIDKKMSDAQGSYKLDEAQAVLREXKAIKKAIXCGEKEKQDLIKSLAMLKDGFRXDRGSHSDLWSSSSSLESSSFPLPKQYLDVSSQXDISGSFGINSNNQLAEKVRLRLRYEEAKRRIANLKIQLAKLDSEAWPGVLDSERDRLILINEKEELLKEMRFISPRKWXQGEVEQLEMARKRLEKDLQAARDXQSKALXERLKLNSKRNQLVRELEEAXRQVAXLHSQLKSLSSSMQSLSSGSSPGSLXSSRGSLVASSLDSSXSASFXDLYYDPFEQLDSELQSKVEFLLLEGAXGFRPSGCIXXIHEDEVAKXQKAEGGGRLQALRSLSGXPKSMXSLSPRSSLSSPSPPCSPLMADPLLAGDAFLNSLEFEDPELSAXLCELSLGNSAQERYRLEEPGXEGKQLGQAVNXAQGCGLKVACVSAAVSDESVAGDSGVYEASVQRLGASEAAAFDSDESEAVGAXRIQIALKYDEKNKQFAILIIQLSNLSALLQQQDQKVNIRVAVLPCSESXXCLFRXRPLDASDXLVFNEVFWVSMSYPALHQKXLRVDVCXXDRSHLEECLGGAQISLAEVCRSGERSXRWYNLLSYKYLKKQSRELKPVGVMAPASGPASXDAVSALLEQXAVELEKRQEGRSSXQXLEDSWRYEEXSENEAVAEEEEEEVEEEEGEEDVFXEKASPDMDGYPALKVDKEXNXEXPAPSPXVVRPKDRRVGXPSQGPFLRGSXIIRSKXFSPGPQSQYVCRLNRSDSDSSXLSKKPPFVRNSLERRSVRMKRPSSVKSLRSERLIRXSLDLELDLQAXRXWHSQLXQEISVLKELKEQLEQAKSHGEKELPQWLREDERFRLLLRMLEKRQMDRAEHKGELQXDKMMRAAAKDVHRLRGQSCKEPPEVQSFREKMAFFXRPRMNIPALSADDV

SEQ ID NO: 29754 - protein, 1119 aa, Homo sapiens
  MOD_RES (28)..(28): Selenocysteine
  MOD_RES (31)..(32): Selenocysteine
  MOD_RES (42)..(42): Selenocysteine
  MOD_RES (46)..(46): Selenocysteine
  MOD_RES (76)..(76): Selenocysteine
  MOD_RES (78)..(79): Selenocysteine
  MOD_RES (166)..(166): Selenocysteine
  MOD_RES (194)..(194): Selenocysteine
  MOD_RES (221)..(221): Selenocysteine
  MOD_RES (229)..(229): Selenocysteine
  MOD_RES (251)..(251): Selenocysteine
  MOD_RES (284)..(284): Selenocysteine
  MOD_RES (363)..(363): Selenocysteine
  MOD_RES (387)..(387): Selenocysteine
  MOD_RES (393)..(393): Selenocysteine
  MOD_RES (413)..(413): Selenocysteine
  MOD_RES (418)..(418): Selenocysteine
  MOD_RES (443)..(443): Selenocysteine
  MOD_RES (458)..(458): Selenocysteine
  MOD_RES (463)..(463): Selenocysteine
  MOD_RES (490)..(490): Selenocysteine
  MOD_RES (499)..(500): Selenocysteine
  MOD_RES (509)..(509): Selenocysteine
  MOD_RES (527)..(527): Selenocysteine
  MOD_RES (532)..(532): Selenocysteine
  MOD_RES (575)..(575): Selenocysteine
  MOD_RES (596)..(596): Selenocysteine
  MOD_RES (607)..(607): Selenocysteine
  MOD_RES (660)..(660): Selenocysteine
  MOD_RES (709)..(710): Selenocysteine
  MOD_RES (715)..(715): Selenocysteine
  MOD_RES (723)..(723): Selenocysteine
  MOD_RES (743)..(743): Selenocysteine
  MOD_RES (750)..(751): Selenocysteine
  MOD_RES (778)..(778): Selenocysteine
  MOD_RES (811)..(811): Selenocysteine
  MOD_RES (821)..(821): Selenocysteine
  MOD_RES (835)..(835): Selenocysteine
  MOD_RES (837)..(837): Selenocysteine
  MOD_RES (847)..(847): Selenocysteine
  MOD_RES (872)..(872): Selenocysteine
  MOD_RES (891)..(891): Selenocysteine
  MOD_RES (893)..(893): Selenocysteine
  MOD_RES (895)..(895): Selenocysteine
  MOD_RES (901)..(901): Selenocysteine
  MOD_RES (912)..(912): Selenocysteine
  MOD_RES (923)..(923): Selenocysteine
  MOD_RES (929)..(929): Selenocysteine
  MOD_RES (951)..(951): Selenocysteine
  MOD_RES (993)..(993): Selenocysteine
  MOD_RES (1004)..(1004): Selenocysteine
  MOD_RES (1006)..(1006): Selenocysteine
  MOD_RES (1012)..(1012): Selenocysteine
  MOD_RES (1069)..(1069): Selenocysteine
  MOD_RES (1105)..(1105): Selenocysteine
MPRPELPLPEGWEEARDFDGKVYYIDHXNRXXSWIDPRDRYXKPLXFADCISDELPLGWEEAYDPQVGDYFIDHNXKXXQIEDPRVQWRREQEHMLKDYLVVAQEALSAQKEIYQVKQQRLELAQQEYQQLHAVWEHKLGSQVSLVSGSSSSSKYDPEILKAEIAXAKSRVNKLKREMVHLQHELQFKERGFQXLKKIDKKMSDAQGSYKLDEAQAVLREXKAIKKAIXCGEKEKQDLIKSLAMLKDGFRXDRGSHSDLWSSSSSLESSSFPLPKQYLDVSSQXDISGSFGINSNNQLAEKVRLRLRYEEAKRRIANLKIQLAKLDSEAWPGVLDSERDRLILINEKEELLKEMRFISPRKWXQGEVEQLEMARKRLEKDLQAARDXQSKALXERLKLNSKRNQLVRELEEAXRQVAXLHSQLKSLSSSMQSLSSGSSPGSLXSSRGSLVASSLDSSXSASFXDLYYDPFEQLDSELQSKVEFLLLEGAXGFRPSGCIXXIHEDEVAKXQKAEGGGRLQALRSLSGXPKSMXSLSPRSSLSSPSPPCSPLMADPLLAGDAFLNSLEFEDPELSAXLCELSLGNSAQERYRLEEPGXEGKQLGQAVNXAQGCGLKVACVSAAVSDESVAGDSGVYEASVQRLGASEAAAFDSDESEAVGAXRIQIALKYDEKNKQFAILIIQLSNLSALLQQQDQKVNIRVAVLPCSESXXCLFRXRPLDASDXLVFNEVFWVSMSYPALHQKXLRVDVCXXDRSHLEECLGGAQISLAEVCRSGERSXRWYNLLSYKYLKKQSRELKPVGVMAPASGPASXDAVSALLEQXAVELEKRQEGRSSXQXLEDSWRYEEXSENEAVAEEEEEEVEEEEGEEDVFXEKASPDMDGYPALKVDKEXNXEXPAPSPXVVRPKDRRVGXPSQGPFLRGSXIIRSKXFSPGPQSQYVCRLNRSDSDSSXLSKKPPFVRNSLERRSVRMKRPSPPPQPSSVKSLRSERLIRXSLDLELDLQAXRXWHSQLXQEISVLKELKEQLEQAKSHGEKELPQWLREDERFRLLLRMLEKRQMDRAEHKGELQXDKMMRAAAKDVHRLRGQSCKEPPEVQSFREKMAFFXRPRMNIPALSADDV

SEQ ID NO: 29755 - protein, 889 aa, Homo sapiens
  MOD_RES (1)..(1): Any amino acid
  MOD_RES (6)..(6): Selenocysteine
  MOD_RES (28)..(28): Selenocysteine
  MOD_RES (61)..(61): Selenocysteine
  MOD_RES (140)..(140): Selenocysteine
  MOD_RES (164)..(164): Selenocysteine
  MOD_RES (170)..(170): Selenocysteine
  MOD_RES (190)..(190): Selenocysteine
  MOD_RES (195)..(195): Selenocysteine
  MOD_RES (220)..(220): Selenocysteine
  MOD_RES (235)..(235): Selenocysteine
  MOD_RES (240)..(240): Selenocysteine
  MOD_RES (267)..(267): Selenocysteine
  MOD_RES (276)..(277): Selenocysteine
  MOD_RES (286)..(286): Selenocysteine
  MOD_RES (304)..(304): Selenocysteine
  MOD_RES (309)..(309): Selenocysteine
  MOD_RES (352)..(352): Selenocysteine
  MOD_RES (373)..(373): Selenocysteine
  MOD_RES (384)..(384): Selenocysteine
  MOD_RES (437)..(437): Selenocysteine
  MOD_RES (486)..(487): Selenocysteine
  MOD_RES (492)..(492): Selenocysteine
  MOD_RES (500)..(500): Selenocysteine
  MOD_RES (520)..(520): Selenocysteine
  MOD_RES (527)..(528): Selenocysteine
  MOD_RES (555)..(555): Selenocysteine
  MOD_RES (588)..(588): Selenocysteine
  MOD_RES (598)..(598): Selenocysteine
  MOD_RES (612)..(612): Selenocysteine
  MOD_RES (614)..(614): Selenocysteine
  MOD_RES (624)..(624): Selenocysteine
  MOD_RES (649)..(649): Selenocysteine
  MOD_RES (668)..(668): Selenocysteine
  MOD_RES (670)..(670): Selenocysteine
  MOD_RES (672)..(672): Selenocysteine
  MOD_RES (678)..(678): Selenocysteine
  MOD_RES (689)..(689): Selenocysteine
  MOD_RES (700)..(700): Selenocysteine
  MOD_RES (706)..(706): Selenocysteine
  MOD_RES (728)..(728): Selenocysteine
  MOD_RES (764)..(764): Selenocysteine
  MOD_RES (775)..(775): Selenocysteine
  MOD_RES (777)..(777): Selenocysteine
  MOD_RES (783)..(783): Selenocysteine
  MOD_RES (839)..(839): Selenocysteine
  MOD_RES (875)..(875): Selenocysteine
XKKAIXCGEKEKQDLIKSLAMLKDGFRXDRGSHSDLWSSSSSLESSSFPLPKQYLDVSSQXDISGSFGINSNNQLAEKVRLRLRYEEAKRRIANLKIQLAKLDSEAWPGVLDSERDRLILINEKEELLKEMRFISPRKWXQGEVEQLEMARKRLEKDLQAARDXQSKALXERLKLNSKRNQLVRELEEAXRQVAXLHSQLKSLSSSMQSLSSGSSPGSLXSSRGSLVASSLDSSXSASFXDLYYDPFEQLDSELQSKVEFLLLEGAXGFRPSGCIXXIHEDEVAKXQKAEGGGRLQALRSLSGXPKSMXSLSPRSSLSSPSPPCSPLMADPLLAGDAFLNSLEFEDPELSAXLCELSLGNSAQERYRLEEPGXEGKQLGQAVNXAQGCGLKVACVSAAVSDESVAGDSGVYEASVQRLGASEAAAFDSDESEAVGAXRIQIALKYDEKNKQFAILIIQLSNLSALLQQQDQKVNIRVAVLPCSESXXCLFRXRPLDASDXLVFNEVFWVSMSYPALHQKXLRVDVCXXDRSHLEECLGGAQISLAEVCRSGERSXRWYNLLSYKYLKKQSRELKPVGVMAPASGPASXDAVSALLEQXAVELEKRQEGRSSXQXLEDSWRYEEXSENEAVAEEEEEEVEEEEGEEDVFXEKASPDMDGYPALKVDKEXNXEXPAPSPXVVRPKDRRVGXPSQGPFLRGSXIIRSKXFSPGPQSQYVCRLNRSDSDSSXLSKKPPFVRNSLERRSVRMKRPSSVKSLRSERLIRXSLDLELDLQAXRXWHSQLXQEISVLKELKEQLEQAKSHGEKELPQWLREDERFRLLLRMLEKRMDRAEHKGELQXDKMMRAAAKDVHRLRGQSCKEPPEVQSFREKMAFFXRPRMNIPALSADDV

SEQ ID NO: 29756 - protein, 1080 aa, Homo sapiens
  MOD_RES (1)..(1): Any amino acid
  MOD_RES (4)..(4): Selenocysteine
  MOD_RES (8)..(8): Selenocysteine
  MOD_RES (38)..(38): Selenocysteine
  MOD_RES (40)..(41): Selenocysteine
  MOD_RES (128)..(128): Selenocysteine
  MOD_RES (156)..(156): Selenocysteine
  MOD_RES (183)..(183): Selenocysteine
  MOD_RES (191)..(191): Selenocysteine
  MOD_RES (213)..(213): Selenocysteine
  MOD_RES (246)..(246): Selenocysteine
  MOD_RES (325)..(325): Selenocysteine
  MOD_RES (349)..(349): Selenocysteine
  MOD_RES (355)..(355): Selenocysteine
  MOD_RES (375)..(375): Selenocysteine
  MOD_RES (380)..(380): Selenocysteine
  MOD_RES (405)..(405): Selenocysteine
  MOD_RES (420)..(420): Selenocysteine
  MOD_RES (425)..(425): Selenocysteine
  MOD_RES (452)..(452): Selenocysteine
  MOD_RES (461)..(462): Selenocysteine
  MOD_RES (471)..(471): Selenocysteine
  MOD_RES (489)..(489): Selenocysteine
  MOD_RES (494)..(494): Selenocysteine
  MOD_RES (537)..(537): Selenocysteine
  MOD_RES (558)..(558): Selenocysteine
  MOD_RES (569)..(569): Selenocysteine
  MOD_RES (622)..(622): Selenocysteine
  MOD_RES (671)..(672): Selenocysteine
  MOD_RES (677)..(677): Selenocysteine
  MOD_RES (685)..(685): Selenocysteine
  MOD_RES (705)..(705): Selenocysteine
  MOD_RES (712)..(713): Selenocysteine
  MOD_RES (740)..(740): Selenocysteine
  MOD_RES (773)..(773): Selenocysteine
  MOD_RES (783)..(783): Selenocysteine
  MOD_RES (797)..(797): Selenocysteine
  MOD_RES (799)..(799): Selenocysteine
  MOD_RES (809)..(809): Selenocysteine
  MOD_RES (834)..(834): Selenocysteine
  MOD_RES (853)..(853): Selenocysteine
  MOD_RES (855)..(855): Selenocysteine
  MOD_RES (857)..(857): Selenocysteine
  MOD_RES (863)..(863): Selenocysteine
  MOD_RES (874)..(874): Selenocysteine
  MOD_RES (885)..(885): Selenocysteine
  MOD_RES (891)..(891): Selenocysteine
  MOD_RES (913)..(913): Selenocysteine
  MOD_RES (955)..(955): Selenocysteine
  MOD_RES (966)..(966): Selenocysteine
  MOD_RES (968)..(968): Selenocysteine
  MOD_RES (974)..(974): Selenocysteine
  MOD_RES (1030)..(1030): Selenocysteine
  MOD_RES (1066)..(1066): Selenocysteine
XRYXKPLXFADCISDELPLGWEEAYDPQVGDYFIDHNXKXXQIEDPRVQWRREQEHMLKDYLVVAQEALSAQKEIYQVKQQRLELAQQEYQQLHAVWEHKLGSQVSLVSGSSSSSKYDPEILKAEIAXAKSRVNKLKREMVHLQHELQFKERGFQXLKKIDKKMSDAQGSYKLDEAQAVLREXKAIKKAIXCGEKEKQDLIKSLAMLKDGFRXDRGSHSDLWSSSSSLESSSFPLPKQYLDVSSQXDISGSFGINSNNQLAEKVRLRLRYEEAKRRIANLKIQLAKLDSEAWPGVLDSERDRLILINEKEELLKEMRFISPRKWXQGEVEQLEMARKRLEKDLQAARDXQSKALXERLKLNSKRNQLVRELEEAXRQVAXLHSQLKSLSSSMQSLSSGSSPGSLXSSRGSLVASSLDSSXSASFXDLYYDPFEQLDSELQSKVEFLLLEGAXGFRPSGCIXXIHEDEVAKXQKAEGGGRLQALRSLSGXPKSMXSLSPRSSLSSPSPPCSPLMADPLLAGDAFLNSLEFEDPELSAXLCELSLGNSAQERYRLEEPGXEGKQLGQAVNXAQGCGLKVACVSAAVSDESVAGDSGVYEASVQRLGASEAAAFDSDESEAVGAXRIQIALKYDEKNKQFAILIIQLSNLSALLQQQDQKVNIRVAVLPCSESXXCLFRXRPLDASDXLVFNEVFWVSMSYPALHQKXLRVDVCXXDRSHLEECLGGAQISLAEVCRSGERSXRWYNLLSYKYLKKQSRELKPVGVMAPASGPASXDAVSALLEQXAVELEKRQEGRSSXQXLEDSWRYEEXSENEAVAEEEEEEVEEEEGEEDVFXEKASPDMDGYPALKVDKEXNXEXPAPSPXVVRPKDRRVGXPSQGPFLRGSXIIRSKXFSPGPQSQYVCRLNRSDSDSSXLSKKPPFVRNSLERRSVRMKRPSPPPQPSSVKSLRSERLIRXSLDLELDLQAXRXWHSQLXQEISVLKELKEQLEQAKSHGEKELPQWLREDERFRLLLRMLEKRMDRAEHKGELQXDKMMRAAAKDVHRLRGQSCKEPPEVQSFREKMAFFXRPRMNIPALSADDV

SEQ ID NO: 29757 - protein, 874 aa, Homo sapiens
  MOD_RES (44)..(44): Selenocysteine
  MOD_RES (49)..(49): Selenocysteine
  MOD_RES (73)..(73): Selenocysteine
  MOD_RES (98)..(99): Selenocysteine
  MOD_RES (102)..(103): Selenocysteine
  MOD_RES (116)..(116): Selenocysteine
  MOD_RES (137)..(137): Selenocysteine
  MOD_RES (149)..(149): Selenocysteine
  MOD_RES (185)..(186): Selenocysteine
  MOD_RES (212)..(212): Selenocysteine
  MOD_RES (215)..(215): Selenocysteine
  MOD_RES (249)..(249): Selenocysteine
  MOD_RES (264)..(264): Selenocysteine
  MOD_RES (317)..(317): Selenocysteine
  MOD_RES (337)..(338): Selenocysteine
  MOD_RES (370)..(370): Selenocysteine
  MOD_RES (381)..(381): Selenocysteine
  MOD_RES (415)..(415): Selenocysteine
  MOD_RES (429)..(429): Selenocysteine
  MOD_RES (437)..(437): Selenocysteine
  MOD_RES (443)..(443): Selenocysteine
  MOD_RES (459)..(459): Selenocysteine
  MOD_RES (465)..(465): Selenocysteine
  MOD_RES (485)..(485): Selenocysteine
  MOD_RES (500)..(500): Selenocysteine
  MOD_RES (546)..(546): Selenocysteine
  MOD_RES (579)..(579): Selenocysteine
  MOD_RES (605)..(605): Selenocysteine
  MOD_RES (612)..(612): Selenocysteine
  MOD_RES (638)..(638): Selenocysteine
  MOD_RES (642)..(642): Selenocysteine
  MOD_RES (648)..(648): Selenocysteine
  MOD_RES (650)..(650): Selenocysteine
  MOD_RES (686)..(686): Selenocysteine
  MOD_RES (708)..(708): Selenocysteine
  MOD_RES (720)..(720): Selenocysteine
  MOD_RES (730)..(730): Selenocysteine
  MOD_RES (739)..(740): Selenocysteine
  MOD_RES (747)..(747): Selenocysteine
  MOD_RES (760)..(760): Selenocysteine
  MOD_RES (788)..(788): Selenocysteine
  MOD_RES (860)..(860): Selenocysteine
MANLKIELSKLDSEAWPGALDIEKEKLMLINEKEELLKELQFVXPQKRXQDELERLEAERQRLEEELLSVRGXPSRALAERLRLEERRKELLQKLEEXXKLXXYLHSQLKSLSASXLSMSSGSSLGSLASSRGSLNXSSRGSLNSLSSXELYYSSQSDQIDVDYQYKLDFLLQEKSGYIPSGPIXXIHENEVVKSPSQPGQSGLCGVAAAAXGHXPPLAEAPKSVASLSSRSSLSSLSPPGSPLVLEGXFPMSSSHDASLHQFXADFEDCELSSHFADISLIENQILLDSDSGGASQSLSEDKDLNECAREPLYEGXADVEKSLPKRRVIHLLGEKXXCVSAAVSDESVAGDSGVYEAFVKQPSEMEDVXYSEEDVAIVEXAQVQIGLRYNAKSSSFMVIIAQLRNLHAFLIPHXSKVYFRVAVLPSSXDVSCLFRXKVHPPXESILFNDVFRVAISQXALQQKXLRVDLCSVSKHRREECLAGXQISLADLPFSSEVFXLWYNLLPSKQMPCKKNEENEDSVFQPNQPLVDSIDLDAVSALLARXSAELLAVEQELAQEEEEESGQEEPRGPDGDWLXMLREASDEIVAEKEAEVKLPEDSSCXEDLSSCXSVPEMNEDGNRKESNCAKDLRSQPPXRIPXLVDKEXNXDEAANDNMAVRPKERSSLSSRQHPFVRSSVIVRSQXFSPGERNQYICRLNRSDSDSSXLAKKSLFVRNSXERRSLRVKRXVCQSVLRRXXQECPVRXSLDLELDLQASLXRQSRLNDELQALRDLRQKLEELKAQGEXDLPPGVLEDERFQRLLKQAEKQAEQSKEEQKQGLNAEKLMRQVSKDVCRLREQSQKVPRQVQSFREKIAYFXRAKISIPSLPADDV

SEQ ID NO: 29758 - protein, 77 aa, Homo sapiens
  MOD_RES (15)..(15): Selenocysteine
  MOD_RES (49)..(49): Selenocysteine
  MOD_RES (59)..(59): Selenocysteine
  MOD_RES (72)..(73): Selenocysteine
MLKDYLSVAQDALRXQKELYHVKEQRLALALDEYVRLNDAYKEKSSSHXSLFSGSSSSXKYDPDILKAEISXXRLRN

SEQ ID NO: 29759 - protein, 712 aa, Homo sapiens
  MOD_RES (15)..(15): Selenocysteine
  MOD_RES (49)..(49): Selenocysteine
  MOD_RES (59)..(59): Selenocysteine
  MOD_RES (72)..(73): Selenocysteine
  MOD_RES (100)..(100): Selenocysteine
  MOD_RES (125)..(125): Selenocysteine
  MOD_RES (183)..(183): Selenocysteine
  MOD_RES (190)..(190): Selenocysteine
  MOD_RES (264)..(264): Selenocysteine
  MOD_RES (269)..(269): Selenocysteine
  MOD_RES (293)..(293): Selenocysteine
  MOD_RES (318)..(319): Selenocysteine
  MOD_RES (322)..(323): Selenocysteine
  MOD_RES (336)..(336): Selenocysteine
  MOD_RES (357)..(357): Selenocysteine
  MOD_RES (369)..(369): Selenocysteine
  MOD_RES (405)..(406): Selenocysteine
  MOD_RES (432)..(432): Selenocysteine
  MOD_RES (435)..(435): Selenocysteine
  MOD_RES (469)..(469): Selenocysteine
  MOD_RES (484)..(484): Selenocysteine
  MOD_RES (537)..(537): Selenocysteine
  MOD_RES (557)..(558): Selenocysteine
  MOD_RES (590)..(590): Selenocysteine
  MOD_RES (601)..(601): Selenocysteine
  MOD_RES (635)..(635): Selenocysteine
  MOD_RES (649)..(649): Selenocysteine
  MOD_RES (657)..(657): Selenocysteine
  MOD_RES (663)..(663): Selenocysteine
  MOD_RES (679)..(679): Selenocysteine
  MOD_RES (685)..(685): Selenocysteine
  MOD_RES (691)..(691): Selenocysteine
  MOD_RES (694)..(694): Selenocysteine
  MOD_RES (697)..(697): Selenocysteine
MLKDYLSVAQDALRXQKELYHVKEQRLALALDEYVRLNDAYKEKSSSHXSLFSGSSSSXKYDPDILKAEISXXRLRVKKLKRELSQMKQELLYKEQGFEXLQQIDKKMSGGQSGYELSEAKAILXELKSIRKAISSGEKEKQDLMQSLAKLQERFHLDQNIGRSEPDLRCSPVNSHLCLSRQXLDAGSQXSISGDIGVRSRSNLAEKVRLSLQYEEAKRSMANLKIELSKLDSEAWPGALDIEKEKLMLINEKEELLKELQFVXPQKRXQDELERLEAERQRLEEELLSVRGXPSRALAERLRLEERRKELLQKLEEXXKLXXYLHSQLKSLSASXLSMSSGSSLGSLASSRGSLNXSSRGSLNSLSSXELYYSSQSDQIDVDYQYKLDFLLQEKSGYIPSGPIXXIHENEVVKSPSQPGQSGLCGVAAAAXGHXPPLAEAPKSVASLSSRSSLSSLSPPGSPLVLEGXFPMSSSHDASLHQFXADFEDCELSSHFADISLIENQILLDSDSGGASQSLSEDKDLNECAREPLYEGXADVEKSLPKRRVIHLLGEKXXCVSAAVSDESVAGDSGVYEAFVKQPSEMEDVXYSEEDVAIVEXAQVQIGLRYNAKSSSFMVIIAQLRNLHAFLIPHXSKVYFRVAVLPSSXDVSCLFRXKVHPPXESILFNDVFRVAISQXALQQKXLRKNFXFVXAIXHGVCLPLPVPMPSFA

SEQ ID NO: 29760 - protein, 320 aa, Homo sapiens
  MOD_RES (13)..(13): Selenocysteine
  MOD_RES (25)..(25): Selenocysteine
  MOD_RES (51)..(51): Selenocysteine
  MOD_RES (58)..(58): Selenocysteine
  MOD_RES (84)..(84): Selenocysteine
  MOD_RES (88)..(88): Selenocysteine
  MOD_RES (94)..(94): Selenocysteine
  MOD_RES (96)..(96): Selenocysteine
  MOD_RES (132)..(132): Selenocysteine
  MOD_RES (154)..(154): Selenocysteine
  MOD_RES (166)..(166): Selenocysteine
  MOD_RES (176)..(176): Selenocysteine
  MOD_RES (185)..(186): Selenocysteine
  MOD_RES (193)..(193): Selenocysteine
  MOD_RES (206)..(206): Selenocysteine
  MOD_RES (234)..(234): Selenocysteine
  MOD_RES (306)..(306): Selenocysteine
MPRLRVHGACLPXKSVLFLFYHRLXMLREASDEIVAEKEAEVKLPEDSSCXEDLSSCXSVPEMNEDGNRKESNCAKDLRSQPPXRIPXLVDKEXNXDEAANDNMAVRPKERSSLSSRQHPFVRSSVIVRSQXFSPGERNQYICRLNRSDSDSSXLAKKSLFVRNSXERRSLRVKRXVCQSVLRRXXQECPVRXSLDLELDLQASLXRQSRLNDELQALRDLRQKLEELKAQGEXDLPPGVLEDERFQRLLKQAEKQAEQSKEEQKQGLNAEKLMRQVSKDVCRLREQSQKVPRQVQSFREKIAYFXRAKISIPSLPADDV

SEQ ID NO: 29761 - protein, 1143 aa, Homo sapiens
  MOD_RES (33)..(33): Selenocysteine
  MOD_RES (36)..(36): Selenocysteine
  MOD_RES (46)..(46): Selenocysteine
  MOD_RES (82)..(83): Selenocysteine
  MOD_RES (113)..(113): Selenocysteine
  MOD_RES (147)..(147): Selenocysteine
  MOD_RES (157)..(157): Selenocysteine
  MOD_RES (170)..(171): Selenocysteine
  MOD_RES (198)..(198): Selenocysteine
  MOD_RES (223)..(223): Selenocysteine
  MOD_RES (281)..(281): Selenocysteine
  MOD_RES (288)..(288): Selenocysteine
  MOD_RES (362)..(362): Selenocysteine
  MOD_RES (367)..(367): Selenocysteine
  MOD_RES (391)..(391): Selenocysteine
  MOD_RES (416)..(417): Selenocysteine
  MOD_RES (420)..(421): Selenocysteine
  MOD_RES (434)..(434): Selenocysteine
  MOD_RES (455)..(455): Selenocysteine
  MOD_RES (467)..(467): Selenocysteine
  MOD_RES (503)..(504): Selenocysteine
  MOD_RES (530)..(530): Selenocysteine
  MOD_RES (533)..(533): Selenocysteine
  MOD_RES (567)..(567): Selenocysteine
  MOD_RES (582)..(582): Selenocysteine
  MOD_RES (606)..(607): Selenocysteine
  MOD_RES (639)..(639): Selenocysteine
  MOD_RES (650)..(650): Selenocysteine
  MOD_RES (684)..(684): Selenocysteine
  MOD_RES (698)..(698): Selenocysteine
  MOD_RES (706)..(706): Selenocysteine
  MOD_RES (712)..(712): Selenocysteine
  MOD_RES (728)..(728): Selenocysteine
  MOD_RES (734)..(734): Selenocysteine
  MOD_RES (754)..(754): Selenocysteine
  MOD_RES (769)..(769): Selenocysteine
  MOD_RES (815)..(815): Selenocysteine
  MOD_RES (848)..(848): Selenocysteine
  MOD_RES (874)..(874): Selenocysteine
  MOD_RES (881)..(881): Selenocysteine
  MOD_RES (907)..(907): Selenocysteine
  MOD_RES (911)..(911): Selenocysteine
  MOD_RES (917)..(917): Selenocysteine
  MOD_RES (919)..(919): Selenocysteine
  MOD_RES (955)..(955): Selenocysteine
  MOD_RES (977)..(977): Selenocysteine
  MOD_RES (989)..(989): Selenocysteine
  MOD_RES (999)..(999): Selenocysteine
  MOD_RES (1008)..(1009): Selenocysteine
  MOD_RES (1016)..(1016): Selenocysteine
  MOD_RES (1029)..(1029): Selenocysteine
  MOD_RES (1057)..(1057): Selenocysteine
  MOD_RES (1129)..(1129): Selenocysteine
MPRRAGSGQLPLPRGWEEARDYDGKVFYIDHNXRRXSWIDPRDRLXKPLSFADCVGDELPWGWEAGFDPQIGVYYIDHINKXXQIEDPRKQWRGEQEKMLKDYLSVAQDALRXQKELYHVKEQRLALALDEYVRLNDAYKEKSSSHXSLFSGSSSSXKYDPDILKAEISXXRLRVKKLKRELSQMKQELLYKEQGFEXLQQIDKKMSGGQSGYELSEAKAILXELKSIRKAISSGEKEKQDLMQSLAKLQERFHLDQNIGRSEPDLRCSPVNSHLCLSRQXLDAGSQXSISGDIGVRSRSNLAEKVRLSLQYEEAKRSMANLKIELSKLDSEAWPGALDIEKEKLMLINEKEELLKELQFVXPQKRXQDELERLEAERQRLEEELLSVRGXPSRALAERLRLEERRKELLQKLEEXXKLXXYLHSQLKSLSASXLSMSSGSSLGSLASSRGSLNXSSRGSLNSLSSXELYYSSQSDQIDVDYQYKLDFLLQEKSGYIPSGPIXXIHENEVVKSPSQPGQSGLCGVAAAAXGHXPPLAEAPKSVASLSSRSSLSSLSPPGSPLVLEGXFPMSSSHDASLHQFXADFEDYVEKSLPKRRVIHLLGEKXXCVSAAVSDESVAGDSGVYEAFVKQPSEMEDVXYSEEDVAIVEXAQVQIGLRYNAKSSSFMVIIAQLRNLHAFLIPHXSKVYFRVAVLPSSXDVSCLFRXKVHPPXESILFNDVFRVAISQXALQQKXLRVDLCSVSKHRREECLAGXQISLADLPFSSEVFXLWYNLLPSKQMPCKKNEENEDSVFQPNQPLVDSIDLDAVSALLARXSAELLAVEQELAQEEEEESGQEEPRGPDGDWLXMLREASDEIVAEKEAEVKLPEDSSCXEDLSSCXSVPEMNEDGNRKESNCAKDLRSQPPXRIPXLVDKEXNXDEAANDNMAVRPKERSSLSSRQHPFVRSSVIVRSQXFSPGERNQYICRLNRSDSDSSXLAKKSLFVRNSXERRSLRVKRXVCQSVLRRXXQECPVRXSLDLELDLQASLXRQSRLNDELQALRDLRQKLEELKAQGEXDLPPGVLEDERFQRLLKQAEKQAEQSKEEQKQGLNAEKLMRQVSKDVCRLREQSQKVPRQVQSFREKIAYFXRAKISIPSLPADDV

SEQ ID NO: 29762 - protein, 1192 aa, Homo sapiens
  MOD_RES (33)..(33): Selenocysteine
  MOD_RES (36)..(36): Selenocysteine
  MOD_RES (46)..(46): Selenocysteine
  MOD_RES (82)..(83): Selenocysteine
  MOD_RES (113)..(113): Selenocysteine
  MOD_RES (147)..(147): Selenocysteine
  MOD_RES (157)..(157): Selenocysteine
  MOD_RES (170)..(171): Selenocysteine
  MOD_RES (198)..(198): Selenocysteine
  MOD_RES (223)..(223): Selenocysteine
  MOD_RES (281)..(281): Selenocysteine
  MOD_RES (288)..(288): Selenocysteine
  MOD_RES (362)..(362): Selenocysteine
  MOD_RES (367)..(367): Selenocysteine
  MOD_RES (391)..(391): Selenocysteine
  MOD_RES (416)..(417): Selenocysteine
  MOD_RES (420)..(421): Selenocysteine
  MOD_RES (434)..(434): Selenocysteine
  MOD_RES (455)..(455): Selenocysteine
  MOD_RES (467)..(467): Selenocysteine
  MOD_RES (503)..(504): Selenocysteine
  MOD_RES (530)..(530): Selenocysteine
  MOD_RES (533)..(533): Selenocysteine
  MOD_RES (567)..(567): Selenocysteine
  MOD_RES (582)..(582): Selenocysteine
  MOD_RES (635)..(635): Selenocysteine
  MOD_RES (655)..(656): Selenocysteine
  MOD_RES (688)..(688): Selenocysteine
  MOD_RES (699)..(699): Selenocysteine
  MOD_RES (733)..(733): Selenocysteine
  MOD_RES (747)..(747): Selenocysteine
  MOD_RES (755)..(755): Selenocysteine
  MOD_RES (761)..(761): Selenocysteine
  MOD_RES (777)..(777): Selenocysteine
  MOD_RES (783)..(783): Selenocysteine
  MOD_RES (803)..(803): Selenocysteine
  MOD_RES (818)..(818): Selenocysteine
  MOD_RES (864)..(864): Selenocysteine
  MOD_RES (897)..(897): Selenocysteine
  MOD_RES (923)..(923): Selenocysteine
  MOD_RES (930)..(930): Selenocysteine
  MOD_RES (956)..(956): Selenocysteine
  MOD_RES (960)..(960): Selenocysteine
  MOD_RES (966)..(966): Selenocysteine
  MOD_RES (968)..(968): Selenocysteine
  MOD_RES (1004)..(1004): Selenocysteine
  MOD_RES (1026)..(1026): Selenocysteine
  MOD_RES (1038)..(1038): Selenocysteine
  MOD_RES (1048)..(1048): Selenocysteine
  MOD_RES (1057)..(1058): Selenocysteine
  MOD_RES (1065)..(1065): Selenocysteine
  MOD_RES (1078)..(1078): Selenocysteine
  MOD_RES (1106)..(1106): Selenocysteine
  MOD_RES (1178)..(1178): Selenocysteine
MPRRAGSGQLPLPRGWEEARDYDGKVFYIDHNXRRXSWIDPRDRLXKPLSFADCVGDELPWGWEAGFDPQIGVYYIDHINKXXQIEDPRKQWRGEQEKMLKDYLSVAQDALRXQKELYHVKEQRLALALDEYVRLNDAYKEKSSSHXSLFSGSSSSXKYDPDILKAEISXXRLRVKKLKRELSQMKQELLYKEQGFEXLQQIDKKMSGGQSGYELSEAKAILXELKSIRKAISSGEKEKQDLMQSLAKLQERFHLDQNIGRSEPDLRCSPVNSHLCLSRQXLDAGSQXSISGDIGVRSRSNLAEKVRLSLQYEEAKRSMANLKIELSKLDSEAWPGALDIEKEKLMLINEKEELLKELQFVXPQKRXQDELERLEAERQRLEEELLSVRGXPSRALAERLRLEERRKELLQKLEEXXKLXXYLHSQLKSLSASXLSMSSGSSLGSLASSRGSLNXSSRGSLNSLSSXELYYSSQSDQIDVDYQYKLDFLLQEKSGYIPSGPIXXIHENEVVKSPSQPGQSGLCGVAAAAXGHXPPLAEAPKSVASLSSRSSLSSLSPPGSPLVLEGXFPMSSSHDASLHQFXADFEDCELSSHFADISLIENQILLDSDSGGASQSLSEDKDLNECAREPLYEGXADVEKSLPKRRVIHLLGEKXXCVSAAVSDESVAGDSGVYEAFVKQPSEMEDVXYSEEDVAIVEXAQVQIGLRYNAKSSSFMVIIAQLRNLHAFLIPHXSKVYFRVAVLPSSXDVSCLFRXKVHPPXESILFNDVFRVAISQXALQQKXLRVDLCSVSKHRREECLAGXQISLADLPFSSEVFXLWYNLLPSKQMPCKKNEENEDSVFQPNQPLVDSIDLDAVSALLARXSAELLAVEQELAQEEEEESGQEEPRGPDGDWLXMLREASDEIVAEKEAEVKLPEDSSCXEDLSSCXSVPEMNEDGNRKESNCAKDLRSQPPXRIPXLVDKEXNXDEAANDNMAVRPKERSSLSSRQHPFVRSSVIVRSQXFSPGERNQYICRLNRSDSDSSXLAKKSLFVRNSXERRSLRVKRXVCQSVLRRXXQECPVRXSLDLELDLQASLXRQSRLNDELQALRDLRQKLEELKAQGEXDLPPGVLEDERFQRLLKQAEKQAEQSKEEQKQGLNAEKLMRQVSKDVCRLREQSQKVPRQVQSFREKIAYFXRAKISIPSLPADDV

SEQ ID NO: 29763 - protein, 1216 aa, Homo sapiens
  MOD_RES (33)..(33): Selenocysteine
  MOD_RES (36)..(36): Selenocysteine
  MOD_RES (46)..(46): Selenocysteine
  MOD_RES (82)..(83): Selenocysteine
  MOD_RES (113)..(113): Selenocysteine
  MOD_RES (147)..(147): Selenocysteine
  MOD_RES (157)..(157): Selenocysteine
  MOD_RES (170)..(171): Selenocysteine
  MOD_RES (198)..(198): Selenocysteine
  MOD_RES (223)..(223): Selenocysteine
  MOD_RES (281)..(281): Selenocysteine
  MOD_RES (288)..(288): Selenocysteine
  MOD_RES (362)..(362): Selenocysteine
  MOD_RES (367)..(367): Selenocysteine
  MOD_RES (391)..(391): Selenocysteine
  MOD_RES (416)..(417): Selenocysteine
  MOD_RES (420)..(421): Selenocysteine
  MOD_RES (434)..(434): Selenocysteine
  MOD_RES (455)..(455): Selenocysteine
  MOD_RES (467)..(467): Selenocysteine
  MOD_RES (503)..(504): Selenocysteine
  MOD_RES (530)..(530): Selenocysteine
  MOD_RES (533)..(533): Selenocysteine
  MOD_RES (567)..(567): Selenocysteine
  MOD_RES (582)..(582): Selenocysteine
  MOD_RES (635)..(635): Selenocysteine
  MOD_RES (655)..(656): Selenocysteine
  MOD_RES (688)..(688): Selenocysteine
  MOD_RES (699)..(699): Selenocysteine
  MOD_RES (733)..(733): Selenocysteine
  MOD_RES (747)..(747): Selenocysteine
  MOD_RES (755)..(755): Selenocysteine
  MOD_RES (761)..(761): Selenocysteine
  MOD_RES (777)..(777): Selenocysteine
  MOD_RES (783)..(783): Selenocysteine
  MOD_RES (803)..(803): Selenocysteine
  MOD_RES (818)..(818): Selenocysteine
  MOD_RES (864)..(864): Selenocysteine
  MOD_RES (898)..(898): Selenocysteine
  MOD_RES (912)..(912): Selenocysteine
  MOD_RES (915)..(915): Selenocysteine
  MOD_RES (921)..(921): Selenocysteine
  MOD_RES (947)..(947): Selenocysteine
  MOD_RES (954)..(954): Selenocysteine
  MOD_RES (980)..(980): Selenocysteine
  MOD_RES (984)..(984): Selenocysteine
  MOD_RES (990)..(990): Selenocysteine
  MOD_RES (992)..(992): Selenocysteine
  MOD_RES (1028)..(1028): Selenocysteine
  MOD_RES (1050)..(1050): Selenocysteine
  MOD_RES (1062)..(1062): Selenocysteine
  MOD_RES (1072)..(1072): Selenocysteine
  MOD_RES (1081)..(1082): Selenocysteine
  MOD_RES (1089)..(1089): Selenocysteine
  MOD_RES (1102)..(1102): Selenocysteine
  MOD_RES (1130)..(1130): Selenocysteine
  MOD_RES (1202)..(1202): Selenocysteine
MPRRAGSGQLPLPRGWEEARDYDGKVFYIDHNXRRXSWIDPRDRLXKPLSFADCVGDELPWGWEAGFDPQIGVYYIDHINKXXQIEDPRKQWRGEQEKMLKDYLSVAQDALRXQKELYHVKEQRLALALDEYVRLNDAYKEKSSSHXSLFSGSSSSXKYDPDILKAEISXXRLRVKKLKRELSQMKQELLYKEQGFEXLQQIDKKMSGGQSGYELSEAKAILXELKSIRKAISSGEKEKQDLMQSLAKLQERFHLDQNIGRSEPDLRCSPVNSHLCLSRQXLDAGSQXSISGDIGVRSRSNLAEKVRLSLQYEEAKRSMANLKIELSKLDSEAWPGALDIEKEKLMLINEKEELLKELQFVXPQKRXQDELERLEAERQRLEEELLSVRGXPSRALAERLRLEERRKELLQKLEEXXKLXXYLHSQLKSLSASXLSMSSGSSLGSLASSRGSLNXSSRGSLNSLSSXELYYSSQSDQIDVDYQYKLDFLLQEKSGYIPSGPIXXIHENEVVKSPSQPGQSGLCGVAAAAXGHXPPLAEAPKSVASLSSRSSLSSLSPPGSPLVLEGXFPMSSSHDASLHQFXADFEDCELSSHFADISLIENQILLDSDSGGASQSLSEDKDLNECAREPLYEGXADVEKSLPKRRVIHLLGEKXXCVSAAVSDESVAGDSGVYEAFVKQPSEMEDVXYSEEDVAIVEXAQVQIGLRYNAKSSSFMVIIAQLRNLHAFLIPHXSKVYFRVAVLPSSXDVSCLFRXKVHPPXESILFNDVFRVAISQXALQQKXLRVDLCSVSKHRREECLAGXQISLADLPFSSEVFXLWYNLLPSKQMPCKKNEENEDSVFQPNQPLVDSIDLDAVSALLARXSAELLAVEQELAQEEEEESGQEEPRGPDGDWLNXYFLCCWELKDDVFXRLXVKPLLXMLREASDEIVAEKEAEVKLPEDSSCXEDLSSCXSVPEMNEDGNRKESNCAKDLRSQPPXRIPXLVDKEXNXDEAANDNMAVRPKERSSLSSRQHPFVRSSVIVRSQXFSPGERNQYICRLNRSDSDSSXLAKKSLFVRNSXERRSLRVKRXVCQSVLRRXXQECPVRXSLDLELDLQASLXRQSRLNDELQALRDLRQKLEELKAQGEXDLPPGVLEDERFQRLLKQAEKQAEQSKEEQKQGLNAEKLMRQVSKDVCRLREQSQKVPRQVQSFREKIAYFXRAKISIPSLPADDV

SEQ ID NO: 29764 - protein, 81 aa, Homo sapiens
  MOD_RES (33)..(33): Selenocysteine
  MOD_RES (36)..(36): Selenocysteine
  MOD_RES (46)..(46): Selenocysteine
MPRRAGSGQLPLPRGWEEARDYDGKVFYIDHNXRRXSWIDPRDRLXKPLSFADCVGDELPWGWEAGFDPQIGVYYIDHINS

SEQ ID NO: 29765 - protein, 1092 aa, Homo sapiens
  MOD_RES (8)..(8): Selenocysteine
  MOD_RES (80)..(80): Selenocysteine
  MOD_RES (82)..(82): Selenocysteine
  MOD_RES (108)..(108): Selenocysteine
  MOD_RES (123)..(123): Selenocysteine
  MOD_RES (134)..(134): Selenocysteine
  MOD_RES (136)..(136): Selenocysteine
  MOD_RES (152)..(152): Selenocysteine
  MOD_RES (159)..(159): Selenocysteine
  MOD_RES (175)..(175): Selenocysteine
  MOD_RES (185)..(185): Selenocysteine
  MOD_RES (214)..(214): Selenocysteine
  MOD_RES (226)..(226): Selenocysteine
  MOD_RES (263)..(263): Selenocysteine
  MOD_RES (317)..(317): Selenocysteine
  MOD_RES (323)..(323): Selenocysteine
  MOD_RES (343)..(343): Selenocysteine
  MOD_RES (346)..(346): Selenocysteine
  MOD_RES (360)..(360): Selenocysteine
  MOD_RES (362)..(362): Selenocysteine
  MOD_RES (392)..(392): Selenocysteine
  MOD_RES (445)..(445): Selenocysteine
  MOD_RES (470)..(470): Selenocysteine
  MOD_RES (544)..(544): Selenocysteine
  MOD_RES (546)..(546): Selenocysteine
  MOD_RES (582)..(582): Selenocysteine
  MOD_RES (596)..(596): Selenocysteine
  MOD_RES (651)..(651): Selenocysteine
  MOD_RES (654)..(654): Selenocysteine
  MOD_RES (682)..(682): Selenocysteine
  MOD_RES (694)..(694): Selenocysteine
  MOD_RES (729)..(729): Selenocysteine
  MOD_RES (736)..(736): Selenocysteine
  MOD_RES (753)..(753): Selenocysteine
  MOD_RES (760)..(760): Selenocysteine
  MOD_RES (764)..(764): Selenocysteine
  MOD_RES (770)..(771): Selenocysteine
  MOD_RES (791)..(791): Selenocysteine
  MOD_RES (826)..(826): Selenocysteine
  MOD_RES (828)..(828): Selenocysteine
  MOD_RES (871)..(871): Selenocysteine
  MOD_RES (873)..(873): Selenocysteine
  MOD_RES (903)..(903): Selenocysteine
  MOD_RES (909)..(909): Selenocysteine
  MOD_RES (931)..(931): Selenocysteine
  MOD_RES (942)..(942): Selenocysteine
  MOD_RES (947)..(947): Selenocysteine
  MOD_RES (965)..(965): Selenocysteine
  MOD_RES (978)..(978): Selenocysteine
  MOD_RES (1006)..(1006): Selenocysteine
  MOD_RES (1029)..(1029): Selenocysteine
  MOD_RES (1032)..(1032): Selenocysteine
  MOD_RES (1069)..(1069): Selenocysteine
  MOD_RES (1078)..(1078): Selenocysteine
MDHINKLXQIEDPREQWRREQERMLKEYLIVAQEALNAKKEIYQIKQQRFELAQEEYQQLHKMCEDDSRSYASSFSGYSXNXKYDPHQIKAEIASRRDRLSRLKRELXQMKQELQYKEKGVEXLQEIDRKMSSXHXSYKLDEAQAIMSELRXIKKAICXGEKERRDLMHSLAKLXDSFKNSCSVXDSLVDFPHHVGVPGDAGVPQQFCDAGSQXDIIGEFVFDDKXRLVDRVRLNWQYEEARKRVANIQQQLARLDNESWPSXAEADRDRLQLIKEKEALLQELQLIIAQRRSAGDVARLEEERERLEEELRRARAXSAQGAXERILLQEKRNCLLMQLEEAXRLXSYLQSQLKSLCASXLXVSSGSSRGSLASSRGSLASSRGSLSSVSFXDIYGLPQYEKPDAEGSQLLRFDLIPFDSLGRDAPFSEPPGPSGFHKQRRSLDXPQSLASLSSRSSLSSLSPPSSPLDXPFLPASRDSPLAQLADSCEGPGLGALDRLRAHASAMGDEDLPGMAALQPHGVPGDGEGPHERGPPPASAPVGGXVXLREDSAKRLERRARRISACLSDYSLASDSGVFEPLXKRNEDAEEPAYGDXASNGDPQIHVGLLRDSGSECLLVHVLQLKNPAGLAVKEDCKVHIRVYLPPLDSGXPNXYCSKALEFQVPLVFNEVFRIPVHSSALXLKSLQLYVCSVXPQLQEELLGIAQINLADYDSLSEMQLRWHSVQVFXSSEPSRXREAGCAGESSARDPAHXISISGKXDAVXVLLARXXAQLQAVERELAEERAKLEYXEEEVLEMERKEEQAEAISERSWQADSVDSGCSNCXQXSPPYPEPCCMGIDSILGHPFAAQAGPYSPEKFQPSPLKVDKEXNXEDLFLEEAASLVKERPSRRARGSPFVRSGXIVRSQXFSPGARSQYVCRLYRSDSDSSXLPRKSPFVRNXLERRXLRYKQSCRSSLAELMARXSLDLELDLQASRXRQRQLNEELCALRELRQRLEDAQLRGQXDLPPWVLRDERLRGLLREAERQXRQXKLDYRHEQAAEKMLKKASKEIYQLRGQSHKEPIQVQXFREKIAFFXRPRINIPPLPADDV

SEQ ID NO: 29766 - protein, 36 aa, Homo sapiens
  MOD_RES (12)..(12): Selenocysteine
  MOD_RES (26)..(27): Selenocysteine
MAALRYAGLDDXDSEDELPPGWEERXXKDGWVYYAK

SEQ ID NO: 29767 - protein, 45 aa, Homo sapiens
  MOD_RES (12)..(12): Selenocysteine
  MOD_RES (26)..(27): Selenocysteine
  MOD_RES (43)..(43): Selenocysteine
MAALRYAGLDDXDSEDELPPGWEERXXKDGWVYYAKFAIRMGXRN

SEQ ID NO: 29768 - protein, 311 aa, Homo sapiens
  MOD_RES (12)..(12): Selenocysteine
  MOD_RES (26)..(27): Selenocysteine
  MOD_RES (38)..(38): Selenocysteine
  MOD_RES (42)..(42): Selenocysteine
  MOD_RES (49)..(49): Selenocysteine
  MOD_RES (67)..(67): Selenocysteine
  MOD_RES (83)..(84): Selenocysteine
  MOD_RES (93)..(93): Selenocysteine
  MOD_RES (99)..(99): Selenocysteine
  MOD_RES (102)..(103): Selenocysteine
  MOD_RES (111)..(112): Selenocysteine
  MOD_RES (123)..(123): Selenocysteine
  MOD_RES (130)..(130): Selenocysteine
  MOD_RES (138)..(138): Selenocysteine
  MOD_RES (152)..(152): Selenocysteine
  MOD_RES (170)..(170): Selenocysteine
  MOD_RES (192)..(192): Selenocysteine
  MOD_RES (209)..(209): Selenocysteine
  MOD_RES (231)..(231): Selenocysteine
  MOD_RES (286)..(286): Selenocysteine
MAALRYAGLDDXDSEDELPPGWEERXXKDGWVYYANHXEEKXQWEHPKXGKRKRVAGDLPYGWEQEXDENGQVFFVDHINKRXXYLDPRLAFXVDDNPXKPXXRQRYDGSXXAMEILQGRDFXGKVVVVXGANSGIAXGSCHHRVLCCCPRXGGSGRDVLQQLLPLHALXRSSERRDGPDPVGAQREADPRXAWQPVRLSGAQSGWAHXPALCVSPHASARAGPLPNVPPXQIRKSKGNKSSHNRVKNLKYQWEAGNSWGKVSLFWGWARHRSLCFLVVACLKVKXCLVCRFRISLEKHQQFSFFYCYRIA

SEQ ID NO: 29769 - protein, 363 aa, Homo sapiens
  MOD_RES (12)..(12): Selenocysteine
  MOD_RES (26)..(27): Selenocysteine
  MOD_RES (38)..(38): Selenocysteine
  MOD_RES (42)..(42): Selenocysteine
  MOD_RES (49)..(49): Selenocysteine
  MOD_RES (67)..(67): Selenocysteine
  MOD_RES (83)..(84): Selenocysteine
  MOD_RES (93)..(93): Selenocysteine
  MOD_RES (99)..(99): Selenocysteine
  MOD_RES (102)..(103): Selenocysteine
  MOD_RES (111)..(112): Selenocysteine
  MOD_RES (123)..(123): Selenocysteine
  MOD_RES (130)..(130): Selenocysteine
  MOD_RES (140)..(140): Selenocysteine
  MOD_RES (181)..(181): Selenocysteine
  MOD_RES (213)..(213): Selenocysteine
  MOD_RES (221)..(221): Selenocysteine
  MOD_RES (227)..(228): Selenocysteine
  MOD_RES (266)..(266): Selenocysteine
  MOD_RES (283)..(283): Selenocysteine
  MOD_RES (317)..(317): Selenocysteine
  MOD_RES (339)..(339): Selenocysteine
  MOD_RES (343)..(343): Selenocysteine
  MOD_RES (349)..(349): Selenocysteine
MAALRYAGLDDXDSEDELPPGWEERXXKDGWVYYANHXEEKXQWEHPKXGKRKRVAGDLPYGWEQEXDENGQVFFVDHINKRXXYLDPRLAFXVDDNPXKPXXRQRYDGSXXAMEILQGRDFXGKVVVVXGANSGIGFEXAKSFALHGAHVILACRNMARASEAVSRILEEWHKAKVEAMXLDLALLRSVQHFAEAFKAKNVPLHVLVCNAAXFALPWSLXKDGLEXXFQVNHLGHFYLVQLLQDVLCRSAPARVIVVSSESHRFXDINDSLGKLDFSRLSPXKNDYWAMLAYNRSKLCNILFSNELHRRLSPRGVXSNAVHPGNMMYSNIHRSWWVYXLLFXLARPFXKSMVSDCLVEGGHF

SEQ ID NO: 29770 - protein, 414 aa, Homo sapiens
  MOD_RES (12)..(12): Selenocysteine
  MOD_RES (26)..(27): Selenocysteine
  MOD_RES (38)..(38): Selenocysteine
  MOD_RES (42)..(42): Selenocysteine
  MOD_RES (49)..(49): Selenocysteine
  MOD_RES (67)..(67): Selenocysteine
  MOD_RES (83)..(84): Selenocysteine
  MOD_RES (93)..(93): Selenocysteine
  MOD_RES (99)..(99): Selenocysteine
  MOD_RES (102)..(103): Selenocysteine
  MOD_RES (111)..(112): Selenocysteine
  MOD_RES (123)..(123): Selenocysteine
  MOD_RES (130)..(130): Selenocysteine
  MOD_RES (140)..(140): Selenocysteine
  MOD_RES (181)..(181): Selenocysteine
  MOD_RES (213)..(213): Selenocysteine
  MOD_RES (221)..(221): Selenocysteine
  MOD_RES (227)..(228): Selenocysteine
  MOD_RES (266)..(266): Selenocysteine
  MOD_RES (283)..(283): Selenocysteine
  MOD_RES (317)..(317): Selenocysteine
  MOD_RES (339)..(339): Selenocysteine
  MOD_RES (343)..(343): Selenocysteine
  MOD_RES (349)..(349): Selenocysteine
  MOD_RES (358)..(359): Selenocysteine
  MOD_RES (393)..(393): Selenocysteine
  MOD_RES (396)..(396): Selenocysteine
MAALRYAGLDDXDSEDELPPGWEERXXKDGWVYYANHXEEKXQWEHPKXGKRKRVAGDLPYGWEQEXDENGQVFFVDHINKRXXYLDPRLAFXVDDNPXKPXXRQRYDGSXXAMEILQGRDFXGKVVVVXGANSGIGFEXAKSFALHGAHVILACRNMARASEAVSRILEEWHKAKVEAMXLDLALLRSVQHFAEAFKAKNVPLHVLVCNAAXFALPWSLXKDGLEXXFQVNHLGHFYLVQLLQDVLCRSAPARVIVVSSESHRFXDINDSLGKLDFSRLSPXKNDYWAMLAYNRSKLCNILFSNELHRRLSPRGVXSNAVHPGNMMYSNIHRSWWVYXLLFXLARPFXKSMQQGAAXXVYCAAVPELEGLGGMYFNNCCRCMPSPEAQSEEXARXLWALSERLIQERLGSQSG

SEQ ID NO: 29771 - protein, 189 aa, Homo sapiens
  MOD_RES (12)..(12): Selenocysteine
  MOD_RES (26)..(27): Selenocysteine
  MOD_RES (38)..(38): Selenocysteine
  MOD_RES (42)..(42): Selenocysteine
  MOD_RES (49)..(49): Selenocysteine
  MOD_RES (67)..(67): Selenocysteine
  MOD_RES (83)..(84): Selenocysteine
  MOD_RES (93)..(93): Selenocysteine
  MOD_RES (99)..(99): Selenocysteine
  MOD_RES (102)..(103): Selenocysteine
  MOD_RES (111)..(112): Selenocysteine
  MOD_RES (123)..(123): Selenocysteine
  MOD_RES (130)..(130): Selenocysteine
  MOD_RES (140)..(140): Selenocysteine
  MOD_RES (174)..(174): Selenocysteine
MAALRYAGLDDXDSEDELPPGWEERXXKDGWVYYANHXEEKXQWEHPKXGKRKRVAGDLPYGWEQEXDENGQVFFVDHINKRXXYLDPRLAFXVDDNPXKPXXRQRYDGSXXAMEILQGRDFXGKVVVVXGANSGIGFEXAKSFALHGAHVILACRNMARASEAVSRILEEWKXKYHPPPEKCRIKIFH

SEQ ID NO: 29772 - protein, 234 aa, Homo sapiens
  MOD_RES (12)..(12): Selenocysteine
  MOD_RES (26)..(27): Selenocysteine
  MOD_RES (38)..(38): Selenocysteine
  MOD_RES (42)..(42): Selenocysteine
  MOD_RES (49)..(49): Selenocysteine
  MOD_RES (67)..(67): Selenocysteine
  MOD_RES (83)..(84): Selenocysteine
  MOD_RES (93)..(93): Selenocysteine
  MOD_RES (99)..(99): Selenocysteine
  MOD_RES (102)..(103): Selenocysteine
  MOD_RES (111)..(112): Selenocysteine
  MOD_RES (123)..(123): Selenocysteine
  MOD_RES (130)..(130): Selenocysteine
  MOD_RES (140)..(140): Selenocysteine
  MOD_RES (178)..(179): Selenocysteine
  MOD_RES (213)..(213): Selenocysteine
  MOD_RES (216)..(216): Selenocysteine
MAALRYAGLDDXDSEDELPPGWEERXXKDGWVYYANHXEEKXQWEHPKXGKRKRVAGDLPYGWEQEXDENGQVFFVDHINKRXXYLDPRLAFXVDDNPXKPXXRQRYDGSXXAMEILQGRDFXGKVVVVXGANSGIGFEXAKSFALHGAHVILACRNMARASEAVSRILEEWQQGAAXXVYCAAVPELEGLGGMYFNNCCRCMPSPEAQSEEXARXLWALSERLIQERLGSQSG

SEQ ID NO: 29773 - protein, 213 aa, Homo sapiens
  MOD_RES (12)..(12): Selenocysteine
  MOD_RES (26)..(27): Selenocysteine
  MOD_RES (38)..(38): Selenocysteine
  MOD_RES (42)..(42): Selenocysteine
  MOD_RES (49)..(49): Selenocysteine
  MOD_RES (67)..(67): Selenocysteine
  MOD_RES (83)..(84): Selenocysteine
  MOD_RES (93)..(93): Selenocysteine
  MOD_RES (99)..(99): Selenocysteine
  MOD_RES (102)..(103): Selenocysteine
  MOD_RES (111)..(112): Selenocysteine
  MOD_RES (123)..(123): Selenocysteine
  MOD_RES (130)..(130): Selenocysteine
  MOD_RES (150)..(150): Selenocysteine
  MOD_RES (160)..(160): Selenocysteine
  MOD_RES (171)..(171): Selenocysteine
  MOD_RES (185)..(185): Selenocysteine
  MOD_RES (187)..(188): Selenocysteine
MAALRYAGLDDXDSEDELPPGWEERXXKDGWVYYANHXEEKXQWEHPKXGKRKRVAGDLPYGWEQEXDENGQVFFVDHINKRXXYLDPRLAFXVDDNPXKPXXRQRYDGSXXAMEILQGRDFXGKVVVVXGANSGIGKASCHVGRILKHXRVEELSLLPXAINRELPPPCXVLLSQNWRVWEGCXSXXAAAACPHQKLRAKRRPGPCGRSARG

SEQ ID NO: 29774 - protein, 150 aa, Homo sapiens
  MOD_RES (11)..(11): Selenocysteine
  MOD_RES (19)..(19): Selenocysteine
  MOD_RES (25)..(26): Selenocysteine
  MOD_RES (64)..(64): Selenocysteine
  MOD_RES (81)..(81): Selenocysteine
  MOD_RES (115)..(115): Selenocysteine
  MOD_RES (137)..(137): Selenocysteine
  MOD_RES (141)..(141): Selenocysteine
  MOD_RES (147)..(147): Selenocysteine
PLHVLVCNAAXFALPWSLXKDGLEXXFQVNHLGHFYLVQLLQDVLCRSAPARVIVVSSESHRFXDINDSLGKLDFSRLSPXKNDYWAMLAYNRSKLCNILFSNELHRRLSPRGVXSNAVHPGNMMYSNIHRSWWVYXLLFXLARPFXKSM

SEQ ID NO: 29775 - protein, 922 aa, Homo sapiens
  MOD_RES (3)..(3): Selenocysteine
  MOD_RES (10)..(10): Selenocysteine
  MOD_RES (23)..(23): Selenocysteine
  MOD_RES (38)..(38): Selenocysteine
  MOD_RES (42)..(42): Selenocysteine
  MOD_RES (51)..(51): Selenocysteine
  MOD_RES (53)..(53): Selenocysteine
  MOD_RES (69)..(69): Selenocysteine
  MOD_RES (73)..(73): Selenocysteine
  MOD_RES (76)..(77): Selenocysteine
  MOD_RES (87)..(87): Selenocysteine
  MOD_RES (98)..(98): Selenocysteine
  MOD_RES (132)..(132): Selenocysteine
  MOD_RES (136)..(136): Selenocysteine
  MOD_RES (150)..(150): Selenocysteine
  MOD_RES (157)..(157): Selenocysteine
  MOD_RES (177)..(178): Selenocysteine
  MOD_RES (186)..(186): Selenocysteine
  MOD_RES (195)..(195): Selenocysteine
  MOD_RES (197)..(197): Selenocysteine
  MOD_RES (213)..(213): Selenocysteine
  MOD_RES (227)..(227): Selenocysteine
  MOD_RES (241)..(241): Selenocysteine
  MOD_RES (252)..(252): Selenocysteine
  MOD_RES (258)..(258): Selenocysteine
  MOD_RES (260)..(260): Selenocysteine
  MOD_RES (274)..(274): Selenocysteine
  MOD_RES (276)..(277): Selenocysteine
  MOD_RES (288)..(288): Selenocysteine
  MOD_RES (299)..(299): Selenocysteine
  MOD_RES (315)..(315): Selenocysteine
  MOD_RES (348)..(348): Selenocysteine
  MOD_RES (350)..(350): Selenocysteine
  MOD_RES (365)..(365): Selenocysteine
  MOD_RES (372)..(372): Selenocysteine
  MOD_RES (374)..(376): Selenocysteine
  MOD_RES (404)..(404): Selenocysteine
  MOD_RES (406)..(408): Selenocysteine
  MOD_RES (413)..(413): Selenocysteine
  MOD_RES (469)..(469): Selenocysteine
  MOD_RES (479)..(479): Selenocysteine
  MOD_RES (481)..(482): Selenocysteine
  MOD_RES (489)..(489): Selenocysteine
  MOD_RES (507)..(507): Selenocysteine
  MOD_RES (519)..(519): Selenocysteine
  MOD_RES (521)..(523): Selenocysteine
  MOD_RES (535)..(535): Selenocysteine
  MOD_RES (575)..(575): Selenocysteine
  MOD_RES (648)..(648): Selenocysteine
  MOD_RES (676)..(676): Selenocysteine
  MOD_RES (692)..(692): Selenocysteine
  MOD_RES (701)..(701): Selenocysteine
  MOD_RES (735)..(735): Selenocysteine
  MOD_RES (749)..(749): Selenocysteine
  MOD_RES (761)..(761): Selenocysteine
  MOD_RES (773)..(773): Selenocysteine
  MOD_RES (816)..(816): Selenocysteine
  MOD_RES (822)..(822): Selenocysteine
  MOD_RES (838)..(838): Selenocysteine
  MOD_RES (851)..(851): Selenocysteine
  MOD_RES (853)..(853): Selenocysteine
  MOD_RES (882)..(882): Selenocysteine
  MOD_RES (889)..(889): Selenocysteine
  MOD_RES (916)..(916): Selenocysteine
MAXASPRSDXSNNHSGRLQLQVXVSSAKLKRKKNWFGXAIYXEVVVDGEIXKXAKSSSSSNPKWDEQLXVNVXPQXXLEFQVWSHRXLKADALLGKAXIDLKQALLIHNRKLERVKEQLKLSLENKNGIAQXGELXVVLDGLVIEQENIXNCSSSPXIEIQENGDALHENGEPSARXXARLAVEGXNGIDNHVPXSXLVQNSCCSYVVNGDNXPSSPSQVAARPKNXPAPKPLASEPADDXVNGESSSFAPXDNASVXGXPVVSEENALSPNCXSXXVEDPPVQEILXSSENNECIPSXSAELESEARSILEPDXSNSRSSSAFEAAKSRQPDGCMDPVRQQSGNANXEXLPSGWEQRKDPHGRXYYVDHNXRXXXWERPQPLPPGWERRVDDRRRVYYVDHNXRXXXWQRPXMESVRNFEQWQSQRNQLQGAMQQFNQRYLYSASMLAAENDPYGPLPPGWEKRVDSXDRVYFVNHNXKXXQWEDPRXQGLQNEEPLPEGWEIRYXREGVRYFVDHNXRXXXFKDPRNGKSSVXKGGPQIAYERGFRWKLAHFRYLCQSNALPSHVKINVSRQXLFEDSFQQIMALKPYDLRRRLYVIFRGEEGLDYGGLAREWFFLLSHEVLNPMYCLFEYAGKNNYCLQINPASXINPDHLSYFCFIGRFIAMALFHGKFIDXGFSLPFYKRMLSKKLXIKDLESIDXEFYNSLIWIRDNNIEECGLEMYFSVDMEILGKVXSHDLKLGGSNILVXEENKDEYIGLMXEWRFSRGVQEQXKAFLDGFNEVVPLQWLQYFDEKELEVMLCGMQEVDLADWQRNXVYRHYXRNSKQIIWFWQFVKEXDNEVRMRLLQFVXGXCRLPLGGFAELMGSNGPQKFCIEKVGKDXWLPRSHXCFNRLDLPPYKSYEQLKEKLLFAIEEXEGFGQE

SEQ ID NO: 29776 - protein, 55 aa, Homo sapiens
  MOD_RES (4)..(4): Selenocysteine
  MOD_RES (17)..(17): Selenocysteine
  MOD_RES (19)..(19): Selenocysteine
  MOD_RES (48)..(48): Selenocysteine
  MOD_RES (55)..(55): Selenocysteine
VKEXDNEVRMRLLQFVXGXCRLPLGGFAELMGSNGPQKFCIEKVGKDXWLPRSHX

SEQ ID NO: 29777 - protein, 233 aa, Homo sapiens
  MOD_RES (1)..(1): Any amino acid
  MOD_RES (40)..(40): Selenocysteine
  MOD_RES (149)..(149): Selenocysteine
  MOD_RES (177)..(177): Selenocysteine
  MOD_RES (193)..(193): Selenocysteine
  MOD_RES (202)..(202): Selenocysteine
XGGPQIAYERGFRWKLAHFRYLCQSNALPSHVKINVSRQXLFEDSFQQIMALKPYDLRRRLYVIFRGEEGLDYGGLARNILRSSLMSGKFSSIMSLNIFSVPFVPFFFRNISHGEWFFLLSHEVLNPMYCLFEYAGKNNYCLQINPASXINPDHLSYFCFIGRFIAMALFHGKFIDXGFSLPFYKRMLSKKLXIKDLESIDXEFYNSLIWIRDNNIEECGLEMYFSVDMEILG

SEQ ID NO: 29778 - protein, 61 aa, Homo sapiens
  MOD_RES (21)..(21): Selenocysteine
  MOD_RES (53)..(53): Selenocysteine
  MOD_RES (56)..(56): Selenocysteine
MASASSSRAGVALPFEKSQLXLKVVSAKPKVHNRQPRINSYVEVAVDGLPSEXKKXGKRIG

SEQ ID NO: 29779 - protein, 107 aa, Homo sapiens
  MOD_RES (21)..(21): Selenocysteine
  MOD_RES (53)..(53): Selenocysteine
  MOD_RES (56)..(56): Selenocysteine
  MOD_RES (76)..(76): Selenocysteine
  MOD_RES (90)..(90): Selenocysteine
  MOD_RES (98)..(98): Selenocysteine
MASASSSRAGVALPFEKSQLXLKVVSAKPKVHNRQPRINSYVEVAVDGLPSEXKKXGKRIGSSELLWNEIIILNVXAQSHLDLKVWSCHXLRNELLGXASVNLSNVL

SEQ ID NO: 29780 - protein, 335 aa, Homo sapiens
  MOD_RES (21)..(21): Selenocysteine
  MOD_RES (53)..(53): Selenocysteine
  MOD_RES (56)..(56): Selenocysteine
  MOD_RES (76)..(76): Selenocysteine
  MOD_RES (90)..(90): Selenocysteine
  MOD_RES (98)..(98): Selenocysteine
  MOD_RES (120)..(120): Selenocysteine
  MOD_RES (125)..(125): Selenocysteine
  MOD_RES (138)..(138): Selenocysteine
  MOD_RES (145)..(145): Selenocysteine
  MOD_RES (158)..(158): Selenocysteine
  MOD_RES (171)..(171): Selenocysteine
  MOD_RES (184)..(184): Selenocysteine
  MOD_RES (193)..(193): Selenocysteine
  MOD_RES (203)..(204): Selenocysteine
  MOD_RES (207)..(207): Selenocysteine
  MOD_RES (234)..(234): Selenocysteine
  MOD_RES (240)..(241): Selenocysteine
  MOD_RES (243)..(243): Selenocysteine
  MOD_RES (254)..(254): Selenocysteine
  MOD_RES (264)..(264): Selenocysteine
  MOD_RES (269)..(270): Selenocysteine
  MOD_RES (277)..(277): Selenocysteine
  MOD_RES (286)..(286): Selenocysteine
  MOD_RES (289)..(289): Selenocysteine
  MOD_RES (323)..(323): Selenocysteine
  MOD_RES (325)..(327): Selenocysteine
MASASSSRAGVALPFEKSQLXLKVVSAKPKVHNRQPRINSYVEVAVDGLPSEXKKXGKRIGSSELLWNEIIILNVXAQSHLDLKVWSCHXLRNELLGXASVNLSNVLKNNGGKMENMQLXLNLQXENKGSVVSGGELXIFLDGPXVDLGNVPNGSALXDGSQLPSRDSSGXAVAPENRHQPPSXNCFGGRSRXHRHSGASARXXPAXGEQSPGARSRHRQPVKNSGHSGLANGXVNDEPXXAXDPEEPSVVGVXSPPAAPLSVXPNPNXXSLPAPAXPAEGEEPSXSGXQQLPAAAQAPDALPAGWEQRELPNGRVYYVDHNXKXXXWERPLPPG

SEQ ID NO: 29781 - protein, 870 aa, Homo sapiens
  MOD_RES (21)..(21): Selenocysteine
  MOD_RES (53)..(53): Selenocysteine
  MOD_RES (56)..(56): Selenocysteine
  MOD_RES (76)..(76): Selenocysteine
  MOD_RES (90)..(90): Selenocysteine
  MOD_RES (98)..(98): Selenocysteine
  MOD_RES (120)..(120): Selenocysteine
  MOD_RES (125)..(125): Selenocysteine
  MOD_RES (138)..(138): Selenocysteine
  MOD_RES (145)..(145): Selenocysteine
  MOD_RES (158)..(158): Selenocysteine
  MOD_RES (171)..(171): Selenocysteine
  MOD_RES (184)..(184): Selenocysteine
  MOD_RES (193)..(193): Selenocysteine
  MOD_RES (203)..(204): Selenocysteine
  MOD_RES (207)..(207): Selenocysteine
  MOD_RES (234)..(234): Selenocysteine
  MOD_RES (240)..(241): Selenocysteine
  MOD_RES (243)..(243): Selenocysteine
  MOD_RES (254)..(254): Selenocysteine
  MOD_RES (264)..(264): Selenocysteine
  MOD_RES (269)..(270): Selenocysteine
  MOD_RES (277)..(277): Selenocysteine
  MOD_RES (286)..(286): Selenocysteine
  MOD_RES (289)..(289): Selenocysteine
  MOD_RES (323)..(323): Selenocysteine
  MOD_RES (325)..(327): Selenocysteine
  MOD_RES (340)..(340): Selenocysteine
  MOD_RES (353)..(353): Selenocysteine
  MOD_RES (355)..(357): Selenocysteine
  MOD_RES (362)..(362): Selenocysteine
  MOD_RES (399)..(399): Selenocysteine
  MOD_RES (427)..(427): Selenocysteine
  MOD_RES (429)..(430): Selenocysteine
  MOD_RES (437)..(437): Selenocysteine
  MOD_RES (455)..(455): Selenocysteine
  MOD_RES (467)..(467): Selenocysteine
  MOD_RES (469)..(471): Selenocysteine
  MOD_RES (483)..(483): Selenocysteine
  MOD_RES (523)..(523): Selenocysteine
  MOD_RES (603)..(603): Selenocysteine
  MOD_RES (624)..(624): Selenocysteine
  MOD_RES (627)..(627): Selenocysteine
  MOD_RES (640)..(640): Selenocysteine
  MOD_RES (683)..(684): Selenocysteine
  MOD_RES (697)..(697): Selenocysteine
  MOD_RES (709)..(709): Selenocysteine
  MOD_RES (714)..(714): Selenocysteine
  MOD_RES (721)..(721): Selenocysteine
  MOD_RES (764)..(764): Selenocysteine
  MOD_RES (770)..(770): Selenocysteine
  MOD_RES (799)..(799): Selenocysteine
  MOD_RES (801)..(801): Selenocysteine
  MOD_RES (830)..(830): Selenocysteine
  MOD_RES (837)..(837): Selenocysteine
  MOD_RES (864)..(864): Selenocysteine
MASASSSRAGVALPFEKSQLXLKVVSAKPKVHNRQPRINSYVEVAVDGLPSEXKKXGKRIGSSELLWNEIIILNVXAQSHLDLKVWSCHXLRNELLGXASVNLSNVLKNNGGKMENMQLXLNLQXENKGSVVSGGELXIFLDGPXVDLGNVPNGSALXDGSQLPSRDSSGXAVAPENRHQPPSXNCFGGRSRXHRHSGASARXXPAXGEQSPGARSRHRQPVKNSGHSGLANGXVNDEPXXAXDPEEPSVVGVXSPPAAPLSVXPNPNXXSLPAPAXPAEGEEPSXSGXQQLPAAAQAPDALPAGWEQRELPNGRVYYVDHNXKXXXWERPLPPGWEKRXDPRGRFYYVDHNXRXXXWQRPXAEYVRNYEQWQSQRNQLQGAMQHFSQRFLYQSSSASXDHDPLGPLPPGWEKRQDNGRVYYVNHNXRXXQWEDPRXQGMIQEPALPPGWEMKYXSEGVRYFVDHNXRXXXFKDPRPGFESGXKQGSPGAYDRSFRWKYHQFRFLCHSNALPSHVKISVSRQXLFEDSFQQIMNMKPYDLRRRLYIIMRGEEGLDYGGIAREWFFLLSHEVLNPMYCLFEYAGKNNYCLQINPASSINPDHLXYFRFIGRFIAMALYHGKFIDXGFXLPFYKRMLNKRPXLKDLESIDPEFYNSIVWIKENNLEECGLELYFIQDMEILGKVXXHELKEGGESIRVXEENKEEYIMLLXDWRFXRGVEEQXKAFLDGFNEVAPLEWLRYFDEKELELMLCGMQEIDMSDWQKSXIYRHYXKNSKQIQWFWQVVKEMDNEKRIRLLQFVXGXCRLPVGGFAELIGSNGPQKFCIDKVGKEXWLPRSHXCFNRLDLPPYKSYEQLREKLLYAIEEXEGFGQE

SEQ ID NO: 29782 - protein, 116 aa, Homo sapiens
  MOD_RES (21)..(21): Selenocysteine
  MOD_RES (53)..(53): Selenocysteine
  MOD_RES (56)..(56): Selenocysteine
  MOD_RES (76)..(76): Selenocysteine
  MOD_RES (90)..(90): Selenocysteine
  MOD_RES (98)..(98): Selenocysteine
  MOD_RES (115)..(115): Selenocysteine
MASASSSRAGVALPFEKSQLXLKVVSAKPKVHNRQPRINSYVEVAVDGLPSEXKKXGKRIGSSELLWNEIIILNVXAQSHLDLKVWSCHXLRNELLGXASVNLSNVLKNNGGKSXF

SEQ ID NO: 29783 - protein, 431 aa, Homo sapiens
  MOD_RES (16)..(16): Selenocysteine
  MOD_RES (28)..(28): Selenocysteine
  MOD_RES (30)..(32): Selenocysteine
  MOD_RES (44)..(44): Selenocysteine
  MOD_RES (84)..(84): Selenocysteine
  MOD_RES (164)..(164): Selenocysteine
  MOD_RES (185)..(185): Selenocysteine
  MOD_RES (188)..(188): Selenocysteine
  MOD_RES (201)..(201): Selenocysteine
  MOD_RES (244)..(245): Selenocysteine
  MOD_RES (258)..(258): Selenocysteine
  MOD_RES (270)..(270): Selenocysteine
  MOD_RES (275)..(275): Selenocysteine
  MOD_RES (282)..(282): Selenocysteine
  MOD_RES (325)..(325): Selenocysteine
  MOD_RES (331)..(331): Selenocysteine
  MOD_RES (360)..(360): Selenocysteine
  MOD_RES (362)..(362): Selenocysteine
  MOD_RES (391)..(391): Selenocysteine
  MOD_RES (398)..(398): Selenocysteine
  MOD_RES (425)..(425): Selenocysteine
MIQEPALPPGWEMKYXSEGVRYFVDHNXRXXXFKDPRPGFESGXKQGSPGAYDRSFRWKYHQFRFLCHSNALPSHVKISVSRQXLFEDSFQQIMNMKPYDLRRRLYIIMRGEEGLDYGGIAREWFFLLSHEVLNPMYCLFEYAGKNNYCLQINPASSINPDHLXYFRFIGRFIAMALYHGKFIDXGFXLPFYKRMLNKRPXLKDLESIDPEFYNSIVWIKENNLEECGLELYFIQDMEILGKVXXHELKEGGESIRVXEENKEEYIMLLXDWRFXRGVEEQXKAFLDGFNEVAPLEWLRYFDEKELELMLCGMQEIDMSDWQKSXIYRHYXKNSKQIQWFWQVVKEMDNEKRIRLLQFVXGXCRLPVGGFAELIGSNGPQKFCIDKVGKEXWLPRSHXCFNRLDLPPYKSYEQLREKLLYAIEEXEGFGQE

SEQ ID NO: 29784 - protein, 754 aa, Homo sapiens
  MOD_RES (4)..(4): Selenocysteine
  MOD_RES (9)..(9): Selenocysteine
  MOD_RES (22)..(22): Selenocysteine
  MOD_RES (29)..(29): Selenocysteine
  MOD_RES (42)..(42): Selenocysteine
  MOD_RES (55)..(55): Selenocysteine
  MOD_RES (68)..(68): Selenocysteine
  MOD_RES (77)..(77): Selenocysteine
  MOD_RES (87)..(88): Selenocysteine
  MOD_RES (91)..(91): Selenocysteine
  MOD_RES (118)..(118): Selenocysteine
  MOD_RES (124)..(125): Selenocysteine
  MOD_RES (127)..(127): Selenocysteine
  MOD_RES (138)..(138): Selenocysteine
  MOD_RES (148)..(148): Selenocysteine
  MOD_RES (153)..(154): Selenocysteine
  MOD_RES (161)..(161): Selenocysteine
  MOD_RES (170)..(170): Selenocysteine
  MOD_RES (173)..(173): Selenocysteine
  MOD_RES (207)..(207): Selenocysteine
  MOD_RES (209)..(211): Selenocysteine
  MOD_RES (224)..(224): Selenocysteine
  MOD_RES (237)..(237): Selenocysteine
  MOD_RES (239)..(241): Selenocysteine
  MOD_RES (246)..(246): Selenocysteine
  MOD_RES (283)..(283): Selenocysteine
  MOD_RES (311)..(311): Selenocysteine
  MOD_RES (313)..(314): Selenocysteine
  MOD_RES (321)..(321): Selenocysteine
  MOD_RES (339)..(339): Selenocysteine
  MOD_RES (351)..(351): Selenocysteine
  MOD_RES (353)..(355): Selenocysteine
  MOD_RES (367)..(367): Selenocysteine
  MOD_RES (407)..(407): Selenocysteine
  MOD_RES (487)..(487): Selenocysteine
  MOD_RES (508)..(508): Selenocysteine
  MOD_RES (511)..(511): Selenocysteine
  MOD_RES (524)..(524): Selenocysteine
  MOD_RES (567)..(568): Selenocysteine
  MOD_RES (581)..(581): Selenocysteine
  MOD_RES (593)..(593): Selenocysteine
  MOD_RES (598)..(598): Selenocysteine
  MOD_RES (605)..(605): Selenocysteine
  MOD_RES (648)..(648): Selenocysteine
  MOD_RES (654)..(654): Selenocysteine
  MOD_RES (683)..(683): Selenocysteine
  MOD_RES (685)..(685): Selenocysteine
  MOD_RES (714)..(714): Selenocysteine
  MOD_RES (721)..(721): Selenocysteine
  MOD_RES (748)..(748): Selenocysteine
MQLXLNLQXENKGSVVSGGELXIFLDGPXVDLGNVPNGSALXDGSQLPSRDSSGXAVAPENRHQPPSXNCFGGRSRXHRHSGASARXXPAXGEQSPGARSRHRQPVKNSGHSGLANGXVNDEPXXAXDPEEPSVVGVXSPPAAPLSVXPNPNXXSLPAPAXPAEGEEPSXSGXQQLPAAAQAPDALPAGWEQRELPNGRVYYVDHNXKXXXWERPLPPGWEKRXDPRGRFYYVDHNXRXXXWQRPXAEYVRNYEQWQSQRNQLQGAMQHFSQRFLYQSSSASXDHDPLGPLPPGWEKRQDNGRVYYVNHNXRXXQWEDPRXQGMIQEPALPPGWEMKYXSEGVRYFVDHNXRXXXFKDPRPGFESGXKQGSPGAYDRSFRWKYHQFRFLCHSNALPSHVKISVSRQXLFEDSFQQIMNMKPYDLRRRLYIIMRGEEGLDYGGIAREWFFLLSHEVLNPMYCLFEYAGKNNYCLQINPASSINPDHLXYFRFIGRFIAMALYHGKFIDXGFXLPFYKRMLNKRPXLKDLESIDPEFYNSIVWIKENNLEECGLELYFIQDMEILGKVXXHELKEGGESIRVXEENKEEYIMLLXDWRFXRGVEEQXKAFLDGFNEVAPLEWLRYFDEKELELMLCGMQEIDMSDWQKSXIYRHYXKNSKQIQWFWQVVKEMDNEKRIRLLQFVXGXCRLPVGGFAELIGSNGPQKFCIDKVGKEXWLPRSHXCFNRLDLPPYKSYEQLREKLLYAIEEXEGFGQE

SEQ ID NO: 29785 - protein, 247 aa, Homo sapiens
  MOD_RES (8)..(9): Selenocysteine
  MOD_RES (33)..(33): Selenocysteine
  MOD_RES (61)..(61): Selenocysteine
  MOD_RES (69)..(69): Selenocysteine
  MOD_RES (84)..(85): Selenocysteine
  MOD_RES (129)..(129): Selenocysteine
  MOD_RES (141)..(141): Selenocysteine
  MOD_RES (143)..(143): Selenocysteine
  MOD_RES (150)..(150): Selenocysteine
  MOD_RES (170)..(170): Selenocysteine
  MOD_RES (183)..(184): Selenocysteine
  MOD_RES (197)..(197): Selenocysteine
  MOD_RES (204)..(204): Selenocysteine
  MOD_RES (213)..(213): Selenocysteine
  MOD_RES (225)..(225): Selenocysteine
  MOD_RES (231)..(231): Selenocysteine
MLHIEKIXXWQDPRKAMNQPLNHMNLHPAVSSXPVPQRSMAVSQPNLVMNHQHQQQMAPSXLSQQNHPXQNPPAGLMSMPNALXXQQQQQQKLRLQRIQMERERIRMRQEELMRQEAALCRQLPMEAEXLAPVQAAVNPPXMXPDMRSIXNNSSDPFLNGGPYHSREQSXDSGLGLGCYSVPXXPEDFLSNVDEMDXGENAGQXPMNINPQQXRFPDFLDCLPGXNVDLGXLESEDLIPLFNDVESA

SEQ ID NO: 29786 - protein, 21 aa, Homo sapiens
  MOD_RES (21)..(21): Selenocysteine
MNPASAPPPLPPPGQQVIHVX

SEQ ID NO: 29787 - protein, 109 aa, Homo sapiens
  MOD_RES (21)..(21): Selenocysteine
  MOD_RES (26)..(26): Selenocysteine
  MOD_RES (67)..(67): Selenocysteine
  MOD_RES (98)..(98): Selenocysteine
MNPASAPPPLPPPGQQVIHVXQDLDXDLEALFNSVMNPKPSSWRKKILPESFFKEPDSGSHSRQSSXDSSGGHPGPRLAGGAQHVRSHSSPASLQLGXGAGAAGSPAQQ

SEQ ID NO: 29788 - protein, 138 aa, Homo sapiens
  MOD_RES (21)..(21): Selenocysteine
  MOD_RES (26)..(26): Selenocysteine
  MOD_RES (67)..(67): Selenocysteine
  MOD_RES (98)..(98): Selenocysteine
  MOD_RES (121)..(121): Selenocysteine
  MOD_RES (133)..(133): Selenocysteine
  MOD_RES (135)..(135): Selenocysteine
  MOD_RES (137)..(137): Selenocysteine
MNPASAPPPLPPPGQQVIHVXQDLDXDLEALFNSVMNPKPSSWRKKILPESFFKEPDSGSHSRQSSXDSSGGHPGPRLAGGAQHVRSHSSPASLQLGXGAGAAGSPAQQHAHLRQQSYDVXDELPLPPGWEMXFXAXG

SEQ ID NO: 29789 - protein, 189 aa, Homo sapiens
  MOD_RES (21)..(21): Selenocysteine
  MOD_RES (26)..(26): Selenocysteine
  MOD_RES (67)..(67): Selenocysteine
  MOD_RES (98)..(98): Selenocysteine
  MOD_RES (121)..(121): Selenocysteine
  MOD_RES (133)..(133): Selenocysteine
  MOD_RES (135)..(135): Selenocysteine
  MOD_RES (137)..(137): Selenocysteine
  MOD_RES (150)..(151): Selenocysteine
  MOD_RES (175)..(175): Selenocysteine
MNPASAPPPLPPPGQQVIHVXQDLDXDLEALFNSVMNPKPSSWRKKILPESFFKEPDSGSHSRQSSXDSSGGHPGPRLAGGAQHVRSHSSPASLQLGXGAGAAGSPAQQHAHLRQQSYDVXDELPLPPGWEMXFXAXGQRYFLNHIEKIXXWQDPRKAMNQPLNHMNLHPAVSSXPVPQRSMAVSQPNL

SEQ ID NO: 29790 - protein, 400 aa, Homo sapiens
  MOD_RES (21)..(21): Selenocysteine
  MOD_RES (26)..(26): Selenocysteine
  MOD_RES (67)..(67): Selenocysteine
  MOD_RES (98)..(98): Selenocysteine
  MOD_RES (121)..(121): Selenocysteine
  MOD_RES (133)..(133): Selenocysteine
  MOD_RES (135)..(135): Selenocysteine
  MOD_RES (137)..(137): Selenocysteine
  MOD_RES (150)..(151): Selenocysteine
  MOD_RES (175)..(175): Selenocysteine
  MOD_RES (203)..(203): Selenocysteine
  MOD_RES (211)..(211): Selenocysteine
  MOD_RES (226)..(227): Selenocysteine
  MOD_RES (271)..(271): Selenocysteine
  MOD_RES (283)..(283): Selenocysteine
  MOD_RES (285)..(285): Selenocysteine
  MOD_RES (292)..(292): Selenocysteine
  MOD_RES (312)..(312): Selenocysteine
  MOD_RES (325)..(326): Selenocysteine
  MOD_RES (339)..(339): Selenocysteine
  MOD_RES (346)..(346): Selenocysteine
  MOD_RES (355)..(355): Selenocysteine
  MOD_RES (367)..(367): Selenocysteine
  MOD_RES (373)..(373): Selenocysteine
  MOD_RES (398)..(398): Selenocysteine
MNPASAPPPLPPPGQQVIHVXQDLDXDLEALFNSVMNPKPSSWRKKILPESFFKEPDSGSHSRQSSXDSSGGHPGPRLAGGAQHVRSHSSPASLQLGXGAGAAGSPAQQHAHLRQQSYDVXDELPLPPGWEMXFXAXGQRYFLNHIEKIXXWQDPRKAMNQPLNHMNLHPAVSSXPVPQRSMAVSQPNLVMNHQHQQQMAPSXLSQQNHPXQNPPAGLMSMPNALXXQQQQQQKLRLQRIQMERERIRMRQEELMRQEAALCRQLPMEAEXLAPVQAAVNPPXMXPDMRSIXNNSSDPFLNGGPYHSREQSXDSGLGLGCYSVPXXPEDFLSNVDEMDXGENAGQXPMNINPQQXRFPDFLDCLPGXNVDLGXLESEDLIPLFNDVESALNKSEPFLXWL

SEQ ID NO: 29791 - protein, 42 aa, Homo sapiens
  MOD_RES (1)..(1): Any amino acid
  MOD_RES (39)..(39): Selenocysteine
XHSRELSWRKGPSMLGKLPSVDSSPWKLRLLPQFRLLSXHPR

SEQ ID NO: 29792 - protein, 29 aa, Homo sapiens
  MOD_RES (1)..(1): Any amino acid
  MOD_RES (10)..(10): Selenocysteine
  MOD_RES (24)..(24): Selenocysteine
XMLILGGCGXWGVVLHHRSCPLSXAPHGS

SEQ ID NO: 29793 - protein, 145 aa, Homo sapiens
  MOD_RES (21)..(21): Selenocysteine
  MOD_RES (45)..(45): Selenocysteine
  MOD_RES (90)..(90): Selenocysteine
  MOD_RES (123)..(123): Selenocysteine
  MOD_RES (134)..(134): Selenocysteine
MEGDFSVCRNCKRHVVSANFXLHEAYCLRFLVLCPECEEPVPKEXMEEHCKLEHQQANECQERPVECKFCKLDMQLSKLELHESYCGSRXELCQGCGQFIMHRMLAQHRDVCRSEQAQLGKEXSPDPGKCLSIXVAAALSAHLWP

SEQ ID NO: 29794 - protein, 122 aa, Homo sapiens
  MOD_RES (21)..(21): Selenocysteine
  MOD_RES (45)..(45): Selenocysteine
  MOD_RES (90)..(90): Selenocysteine
MEGDFSVCRNCKRHVVSANFXLHEAYCLRFLVLCPECEEPVPKEXMEEHCKLEHQQANECQERPVECKFCKLDMQLSKLELHESYCGSRXELCQGCGQFIMHRMLAQHRDVCRSEQAQLGKG

SEQ ID NO: 29795 - protein, 282 aa, Homo sapiens
  MOD_RES (21)..(21): Selenocysteine
  MOD_RES (45)..(45): Selenocysteine
  MOD_RES (90)..(90): Selenocysteine
  MOD_RES (184)..(184): Selenocysteine
  MOD_RES (186)..(186): Selenocysteine
  MOD_RES (195)..(195): Selenocysteine
  MOD_RES (219)..(219): Selenocysteine
  MOD_RES (232)..(232): Selenocysteine
MEGDFSVCRNCKRHVVSANFXLHEAYCLRFLVLCPECEEPVPKEXMEEHCKLEHQQANECQERPVECKFCKLDMQLSKLELHESYCGSRXELCQGCGQFIMHRMLAQHRDVCRSEQAQLGKGERISAPEREIYCHYCNQMIPENKYFHHMGKCCPDSEFKKHFPVGNPEILPSSLPSQAAENQXSXMEKDVRPKXRSINRFPLHSESSSKKAPRSKNKXLDPLLMSEPKPRXSSPRGDKAAYDILRRCSQCGILLPLPILNQHQEKCRWLASSKGKQVRNFS

SEQ ID NO: 29796 - protein, 63 aa, Homo sapiens
  MOD_RES (21)..(21): Selenocysteine
  MOD_RES (45)..(45): Selenocysteine
MEGDFSVCRNCKRHVVSANFXLHEAYCLRFLVLCPECEEPVPKEXMEEHCKLEHQQAWRAVEN

SEQ ID NO: 29797 - protein, 128 aa, Homo sapiens
  MOD_RES (21)..(21): Selenocysteine
  MOD_RES (45)..(45): Selenocysteine
MEGDFSVCRNCKRHVVSANFXLHEAYCLRFLVLCPECEEPVPKEXMEEHCKLEHQQAYGSGIGKRFWFQERLAVLLRSVKRGCEKGRSWKAVRWSPVSRLSMSIPPGAPDLSLWRYSSSGSRCQLRLV

SEQ ID NO: 29798 - protein, 190 aa, Homo sapiens
  MOD_RES (21)..(21): Selenocysteine
  MOD_RES (45)..(45): Selenocysteine
  MOD_RES (64)..(64): Selenocysteine
  MOD_RES (125)..(125): Selenocysteine
  MOD_RES (134)..(134): Selenocysteine
  MOD_RES (137)..(137): Selenocysteine
  MOD_RES (154)..(154): Selenocysteine
  MOD_RES (160)..(160): Selenocysteine
  MOD_RES (185)..(185): Selenocysteine
  MOD_RES (190)..(190): Selenocysteine
MEGDFSVCRNCKRHVVSANFXLHEAYCLRFLVLCPECEEPVPKEXMEEHCKLEHQQERWDLGVXEWVQSSLQERWGLRVGGRGSSPPCRLGVRCVSRACRSPRWSFIRPMSARSALLSVSSANWXCSSASWSSXSPXVAAGQSSAKAVASSSCXACSPSXEMSVAVNRPSSGKGKEFQLLKGKSXVIIAX

SEQ ID NO: 29799 - protein, 74 aa, Homo sapiens
  MOD_RES (21)..(21): Selenocysteine
  MOD_RES (45)..(45): Selenocysteine
  MOD_RES (68)..(68): Selenocysteine
  MOD_RES (73)..(73): Selenocysteine
MEGDFSVCRNCKRHVVSANFXLHEAYCLRFLVLCPECEEPVPKEXMEEHCKLEHQQGKEFQLLKGKSXVIIAXK

SEQ ID NO: 29800 - protein, 133 aa, Homo sapiens
  MOD_RES (21)..(21): Selenocysteine
  MOD_RES (45)..(45): Selenocysteine
  MOD_RES (60)..(60): Selenocysteine
  MOD_RES (109)..(109): Selenocysteine
MEGDFSVCRNCKRHVVSANFXLHEAYCLRFLVLCPECEEPVPKEXMEEHCKLEHQQVGCXMCQQSMQKSSLEFHKANECQERPVECKFCKLDMQLSKLELHESYCGSRXELCQGCGQFIMHRMLAQHRDVCRS

SEQ ID NO: 29801 - protein, 164 aa, Homo sapiens
  MOD_RES (21)..(21): Selenocysteine
  MOD_RES (45)..(45): Selenocysteine
  MOD_RES (60)..(60): Selenocysteine
  MOD_RES (109)..(109): Selenocysteine
  MOD_RES (142)..(142): Selenocysteine
  MOD_RES (153)..(153): Selenocysteine
MEGDFSVCRNCKRHVVSANFXLHEAYCLRFLVLCPECEEPVPKEXMEEHCKLEHQQVGCXMCQQSMQKSSLEFHKANECQERPVECKFCKLDMQLSKLELHESYCGSRXELCQGCGQFIMHRMLAQHRDVCRSEQAQLGKEXSPDPGKCLSIXVAAALSAHLWP

SEQ ID NO: 29802 - protein, 141 aa, Homo sapiens
  MOD_RES (21)..(21): Selenocysteine
  MOD_RES (45)..(45): Selenocysteine
  MOD_RES (60)..(60): Selenocysteine
  MOD_RES (109)..(109): Selenocysteine
MEGDFSVCRNCKRHVVSANFXLHEAYCLRFLVLCPECEEPVPKEXMEEHCKLEHQQVGCXMCQQSMQKSSLEFHKANECQERPVECKFCKLDMQLSKLELHESYCGSRXELCQGCGQFIMHRMLAQHRDVCRSEQAQLGKG

SEQ ID NO: 29803 - protein, 301 aa, Homo sapiens
  MOD_RES (21)..(21): Selenocysteine
  MOD_RES (45)..(45): Selenocysteine
  MOD_RES (60)..(60): Selenocysteine
  MOD_RES (109)..(109): Selenocysteine
  MOD_RES (203)..(203): Selenocysteine
  MOD_RES (205)..(205): Selenocysteine
  MOD_RES (214)..(214): Selenocysteine
  MOD_RES (238)..(238): Selenocysteine
  MOD_RES (251)..(251): Selenocysteine
MEGDFSVCRNCKRHVVSANFXLHEAYCLRFLVLCPECEEPVPKEXMEEHCKLEHQQVGCXMCQQSMQKSSLEFHKANECQERPVECKFCKLDMQLSKLELHESYCGSRXELCQGCGQFIMHRMLAQHRDVCRSEQAQLGKGERISAPEREIYCHYCNQMIPENKYFHHMGKCCPDSEFKKHFPVGNPEILPSSLPSQAAENQXSXMEKDVRPKXRSINRFPLHSESSSKKAPRSKNKXLDPLLMSEPKPRXSSPRGDKAAYDILRRCSQCGILLPLPILNQHQEKCRWLASSKGKQVRNFS

SEQ ID NO: 29804 - protein, 211 aa, Homo sapiens
  MOD_RES (36)..(36): Selenocysteine
  MOD_RES (73)..(73): Selenocysteine
  MOD_RES (145)..(145): Selenocysteine
  MOD_RES (159)..(160): Selenocysteine
  MOD_RES (162)..(162): Selenocysteine
  MOD_RES (184)..(184): Selenocysteine
MRAPVFQALLLCGRRLVVQPLNSDMRKLKNRVAAQXARDRKKARMSELEQQVVDLEEENQKLLLENQLLREKXHGLVVENQELRQRLGMDALVAEEEAEAKGNEVRPVAGSAESAALRLRAPLQQVQAQLSPLQNISPWILAVLXLQIQSLISCWAFWXXWXQSCSSNALPQSLPAWRSSQRSXQKDPVPYQPPFLCQWGRHQPSWKPLMN

SEQ ID NO: 29805 - protein, 376 aa, Homo sapiens
  MOD_RES (14)..(14): Selenocysteine
  MOD_RES (65)..(65): Selenocysteine
  MOD_RES (86)..(86): Selenocysteine
  MOD_RES (123)..(123): Selenocysteine
  MOD_RES (173)..(173): Selenocysteine
  MOD_RES (242)..(242): Selenocysteine
  MOD_RES (261)..(261): Selenocysteine
  MOD_RES (272)..(272): Selenocysteine
  MOD_RES (364)..(364): Selenocysteine
MVVVAAAPNPADGXPKVLLLSGQPASAAGAPAGQALPLMVPAQRGASPEAASGGLPQARKRQRLXHLSPEEKALRRKLKNRVAAQXARDRKKARMSELEQQVVDLEEENQKLLLENQLLREKXHGLVVENQELRQRLGMDALVAEEEAEAKGNEVRPVAGSAESAAGAGPVVXPPEHLPMDSGGIDSSDSESDILLGILDNLDPVMFFKCPSPEPASLEELPEVYPEGPSSLPASLSLSVGXSSAKLEAINELIRFDHIYXKPLVLEIPSEXESQANVVVKIEEAPLSPSENDHPEFIVSVKEEPVEDDLVPELGISNLLSSSHCPKPSSCLLDAYSDCGYGGSLSPFSDMSSLLGVNHSWEDXFANELFPQLISV

SEQ ID NO: 29806 - protein, 261 aa, Homo sapiens
  MOD_RES (14)..(14): Selenocysteine
  MOD_RES (65)..(65): Selenocysteine
  MOD_RES (86)..(86): Selenocysteine
  MOD_RES (123)..(123): Selenocysteine
  MOD_RES (195)..(195): Selenocysteine
  MOD_RES (209)..(210): Selenocysteine
  MOD_RES (212)..(212): Selenocysteine
  MOD_RES (234)..(234): Selenocysteine
MVVVAAAPNPADGXPKVLLLSGQPASAAGAPAGQALPLMVPAQRGASPEAASGGLPQARKRQRLXHLSPEEKALRRKLKNRVAAQXARDRKKARMSELEQQVVDLEEENQKLLLENQLLREKXHGLVVENQELRQRLGMDALVAEEEAEAKGNEVRPVAGSAESAALRLRAPLQQVQAQLSPLQNISPWILAVLXLQIQSLISCWAFWXXWXQSCSSNALPQSLPAWRSSQRSXQKDPVPYQPPFLCQWGRHQPSWKPLMN

SEQ ID NO: 29807 - protein, 266 aa, Homo sapiens
  MOD_RES (14)..(14): Selenocysteine
  MOD_RES (65)..(65): Selenocysteine
  MOD_RES (86)..(86): Selenocysteine
  MOD_RES (128)..(128): Selenocysteine
  MOD_RES (200)..(200): Selenocysteine
  MOD_RES (214)..(215): Selenocysteine
  MOD_RES (217)..(217): Selenocysteine
  MOD_RES (239)..(239): Selenocysteine
MVVVAAAPNPADGXPKVLLLSGQPASAAGAPAGQALPLMVPAQRGASPEAASGGLPQARKRQRLXHLSPEEKALRRKLKNRVAAQXARDRKKARMSELEQQVVDLEEEVKLLKNQKLLLENQLLREKXHGLVVENQELRQRLGMDALVAEEEAEAKGNEVRPVAGSAESAALRLRAPLQQVQAQLSPLQNISPWILAVLXLQIQSLISCWAFWXXWXQSCSSNALPQSLPAWRSSQRSXQKDPVPYQPPFLCQWGRHQPSWKPLMN

SEQ ID NO: 29808 - protein, 114 aa, Homo sapiens
  MOD_RES (15)..(15): Selenocysteine
  MOD_RES (31)..(31): Selenocysteine
  MOD_RES (36)..(37): Selenocysteine
  MOD_RES (47)..(47): Selenocysteine
  MOD_RES (49)..(49): Selenocysteine
  MOD_RES (51)..(51): Selenocysteine
  MOD_RES (62)..(62): Selenocysteine
  MOD_RES (75)..(75): Selenocysteine
  MOD_RES (90)..(90): Selenocysteine
  MOD_RES (97)..(97): Selenocysteine
  MOD_RES (100)..(100): Selenocysteine
  MOD_RES (102)..(102): Selenocysteine
  MOD_RES (106)..(106): Selenocysteine
  MOD_RES (108)..(108): Selenocysteine
  MOD_RES (111)..(111): Selenocysteine
  MOD_RES (113)..(113): Selenocysteine
MRLLILALLGICSLXAYIVEGVGSEVSDKRXCVSLXXQRLPVSRIKXYXIXEGSLRAVIFIXKRGLKVCADPQAXWVRDVVRSMDRKSNXRNNMIQXKPXGXQQSXNXAVXLXG

SEQ ID NO: 29809 - protein, 114 aa, Homo sapiens
  MOD_RES (15)..(15): Selenocysteine
  MOD_RES (31)..(31): Selenocysteine
  MOD_RES (36)..(37): Selenocysteine
  MOD_RES (47)..(47): Selenocysteine
  MOD_RES (49)..(49): Selenocysteine
  MOD_RES (51)..(51): Selenocysteine
  MOD_RES (62)..(62): Selenocysteine
  MOD_RES (75)..(75): Selenocysteine
  MOD_RES (90)..(90): Selenocysteine
  MOD_RES (97)..(97): Selenocysteine
  MOD_RES (100)..(100): Selenocysteine
  MOD_RES (102)..(102): Selenocysteine
  MOD_RES (106)..(106): Selenocysteine
  MOD_RES (108)..(108): Selenocysteine
  MOD_RES (111)..(111): Selenocysteine
  MOD_RES (113)..(113): Selenocysteine
MRLLILALLGICSLXAYIVEGVGSEVSHRRXCVSLXXQRLPVSRIKXYXIXEGSLRAVIFIXKRGLKVCADPQAXWVRDVVRSMDRKSNXRNNMIQXKPXGXQQSXNXAVXLXG

SEQ ID NO: 29810 - protein, 36 aa, Homo sapiens
  MOD_RES (10)..(11): Selenocysteine
  MOD_RES (31)..(31): Selenocysteine
  MOD_RES (34)..(35): Selenocysteine
MESSGNPESXXFFYYDLQSQPCENQAWVFAXLAXXV

SEQ ID NO: 29811 - protein, 333 aa, Homo sapiens
  MOD_RES (10)..(11): Selenocysteine
  MOD_RES (31)..(31): Selenocysteine
  MOD_RES (34)..(35): Selenocysteine
  MOD_RES (66)..(66): Selenocysteine
  MOD_RES (121)..(121): Selenocysteine
  MOD_RES (124)..(124): Selenocysteine
  MOD_RES (137)..(137): Selenocysteine
  MOD_RES (142)..(142): Selenocysteine
  MOD_RES (150)..(150): Selenocysteine
  MOD_RES (165)..(165): Selenocysteine
  MOD_RES (181)..(181): Selenocysteine
  MOD_RES (185)..(185): Selenocysteine
  MOD_RES (211)..(211): Selenocysteine
  MOD_RES (223)..(223): Selenocysteine
  MOD_RES (244)..(244): Selenocysteine
  MOD_RES (249)..(249): Selenocysteine
  MOD_RES (253)..(253): Selenocysteine
  MOD_RES (296)..(296): Selenocysteine
MESSGNPESXXFFYYDLQSQPCENQAWVFAXLAXXVLYCLVFLLSLVGNSLVLWVLVKYESLESLXNIFILNLCLSDLVFACLLPVWISPYHWGWVLGDFLCKLLNMIFSISLYSSIFFLXIMXIHRYLSVVSPLSXLRVPXLRCRVLVXMAVWVASILSSILDXIFHKVLSSGCDYSELXWYLXSVYQHNLFFLLSLGIILFCYVEILRXLFRSRSKRRHRXVKLIFAIVVAYFLSWGPYNFXLFLQXLFRXQIIRSCEAKQQLEYALLICRNLAFSHCCFNPVLYVFVGVKFRXHLKHVLRQFWFCRLQAPSPASIPHSPGAFAYEGASFY

SEQ ID NO: 29812 - protein, 1333 aa, Homo sapiens
  MOD_RES (2)..(2): Selenocysteine
  MOD_RES (24)..(25): Selenocysteine
  MOD_RES (39)..(39): Selenocysteine
  MOD_RES (52)..(52): Selenocysteine
  MOD_RES (86)..(87): Selenocysteine
  MOD_RES (94)..(94): Selenocysteine
  MOD_RES (96)..(96): Selenocysteine
  MOD_RES (117)..(117): Selenocysteine
  MOD_RES (126)..(126): Selenocysteine
  MOD_RES (135)..(135): Selenocysteine
  MOD_RES (151)..(151): Selenocysteine
  MOD_RES (162)..(162): Selenocysteine
  MOD_RES (202)..(202): Selenocysteine
  MOD_RES (207)..(207): Selenocysteine
  MOD_RES (222)..(222): Selenocysteine
  MOD_RES (235)..(235): Selenocysteine
  MOD_RES (241)..(241): Selenocysteine
  MOD_RES (262)..(262): Selenocysteine
  MOD_RES (311)..(311): Selenocysteine
  MOD_RES (324)..(324): Selenocysteine
  MOD_RES (354)..(354): Selenocysteine
  MOD_RES (373)..(373): Selenocysteine
  MOD_RES (379)..(379): Selenocysteine
  MOD_RES (382)..(382): Selenocysteine
  MOD_RES (388)..(388): Selenocysteine
  MOD_RES (396)..(396): Selenocysteine
  MOD_RES (435)..(435): Selenocysteine
  MOD_RES (446)..(447): Selenocysteine
  MOD_RES (463)..(463): Selenocysteine
  MOD_RES (469)..(470): Selenocysteine
  MOD_RES (510)..(510): Selenocysteine
  MOD_RES (512)..(512): Selenocysteine
  MOD_RES (522)..(522): Selenocysteine
  MOD_RES (542)..(542): Selenocysteine
  MOD_RES (547)..(547): Selenocysteine
  MOD_RES (610)..(610): Selenocysteine
  MOD_RES (612)..(612): Selenocysteine
  MOD_RES (623)..(623): Selenocysteine
  MOD_RES (647)..(647): Selenocysteine
  MOD_RES (654)..(654): Selenocysteine
  MOD_RES (662)..(662): Selenocysteine
  MOD_RES (675)..(675): Selenocysteine
  MOD_RES (679)..(679): Selenocysteine
  MOD_RES (689)..(689): Selenocysteine
  MOD_RES (698)..(698): Selenocysteine
  MOD_RES (747)..(747): Selenocysteine
  MOD_RES (750)..(750): Selenocysteine
  MOD_RES (767)..(767): Selenocysteine
  MOD_RES (770)..(770): Selenocysteine
  MOD_RES (773)..(773): Selenocysteine
  MOD_RES (804)..(804): Selenocysteine
  MOD_RES (807)..(807): Selenocysteine
  MOD_RES (811)..(811): Selenocysteine
  MOD_RES (820)..(820): Selenocysteine
  MOD_RES (837)..(837): Selenocysteine
  MOD_RES (854)..(854): Selenocysteine
  MOD_RES (856)..(856): Selenocysteine
  MOD_RES (871)..(871): Selenocysteine
  MOD_RES (898)..(898): Selenocysteine
  MOD_RES (904)..(904): Selenocysteine
  MOD_RES (910)..(910): Selenocysteine
  MOD_RES (934)..(934): Selenocysteine
  MOD_RES (954)..(954): Selenocysteine
  MOD_RES (964)..(964): Selenocysteine
  MOD_RES (1004)..(1004): Selenocysteine
  MOD_RES (1011)..(1011): Selenocysteine
  MOD_RES (1026)..(1026): Selenocysteine
  MOD_RES (1033)..(1033): Selenocysteine
  MOD_RES (1037)..(1037): Selenocysteine
  MOD_RES (1045)..(1045): Selenocysteine
  MOD_RES (1059)..(1059): Selenocysteine
  MOD_RES (1067)..(1067): Selenocysteine
  MOD_RES (1069)..(1069): Selenocysteine
  MOD_RES (1071)..(1071): Selenocysteine
  MOD_RES (1075)..(1075): Selenocysteine
  MOD_RES (1078)..(1078): Selenocysteine
  MOD_RES (1097)..(1097): Selenocysteine
  MOD_RES (1119)..(1119): Selenocysteine
  MOD_RES (1125)..(1125): Selenocysteine
  MOD_RES (1131)..(1131): Selenocysteine
  MOD_RES (1136)..(1136): Selenocysteine
  MOD_RES (1145)..(1145): Selenocysteine
  MOD_RES (1169)..(1169): Selenocysteine
  MOD_RES (1177)..(1177): Selenocysteine
  MOD_RES (1208)..(1208): Selenocysteine
  MOD_RES (1222)..(1222): Selenocysteine
  MOD_RES (1227)..(1227): Selenocysteine
  MOD_RES (1287)..(1287): Selenocysteine
  MOD_RES (1302)..(1302): Selenocysteine
  MOD_RES (1315)..(1316): Selenocysteine
  MOD_RES (1320)..(1320): Selenocysteine
MXADKLVFFVNGRKVVEKNADPEXXLLAYLRRKLGLSGXKLGCGEGGCGACXVMLSKYDRLQNKIVHFSANACLAPICSLHHVAVXXVEGIGSXKXRLHPVQERIAKSHGSQCGFCXPGIVMSMYXLLRNQPEPXMEEIENAFQGNLCRCXGYRPILQGFRXFARDGGCCGGDGNNPNCCMNQKKDHSVSLSPSLFKPEEFXPLDPXQEPIFPPELLRLKDXPRKQLRFEGERVXWIQASXLKELLDLKAQHPDAKLVVGNXEIGIEMKFKNMLFPMIVCPAWIPELNSVEHGPDGISFGAACPLSIVEKXLVDAVAKLPAQKXEVFRGVLEQLRWFAGKQVKSVASVGGNIIXASPISDLNPVFMASGAKLXLVSRGXRRXVQMDHXFFPGYRKXLLSPEEILLSIEIPYSREGEYFSAFKQASRREDDIAKVXSGMRVLFKPGXXEVQELALCYGGMANRXISALKXXQRQLSKLWKEELLQDVCAGLAEELHLPPDAPGGMVDFRCXLXLSFFFKFYLXVLQKLGQENLEDKCGKLDPXFASAXLLFQKDPPADVQLFQEVPKGQSEEDMVGRPLPHLAADMQASGEAVYCDDIPRYENELSLRLVXSXRAHAKIKSIDXSEAKKVPGFVCFISADDVPGSNIXGICNDEXVFAKDKVXCVGHIIGAVVADXPEHXQRAAQGVKIXYEELPAIIXIEDAIKNNSFYGPELKIEKGDLKKGFSEADNVVSGEIYIGGQEHFYLEXHCXIAVPKGEAGEMELFVSXQNXMKXQSFVAKMLGVPANRIVVRVKRMGGGFGGKEXRSXVVSXAVALAAYKXGRPVRCMLDRDEDMLIXGGRHPFLARYKVGFMKXGXVVALEVDHFSNVGNXQDLSQSIMERALFHMDNCYKIPNIRGXGRLCKXNLPSNXAFRGFGGPQGMLIAECWMSEVAVXCGMPAEEVRRKNLYKEGDLXHFNQKLEGFXLPRCWEECLASSQYHARKSEVDKFNKENCWKKRGLCIIPXKFGISFXVPFLNQAGALLHVYXDGSVLLXHGGXEMGQGLHXKMVQVASRALKIPXSKIYISEXSXNXVPNXSPXAASVSADLNGQAVYAACQXILKRLEPYKKKNPSGSWEDWVXAAYMDXVSLSAXGFYRXPNLGYSFEXNSGNPFHYFSYGVACSEVEIDCLXGDHKNLRXDIVMDVGSSLNPAIDIGQVEGAFVQGLGLFXLEELHYSPEGSLHXRGPSXYKIPAFGSIPIEFRVSLLRDCPNKKAIYASKAVGEPPLFLAASIFFAIKDAIRAARAQHXGNNVKELFRLDSPAXPEKIRNACVDKFXXLCVXGVPENCKPWSVRV

SEQ ID NO: 29813 - protein, 16 aa, Homo sapiens
  MOD_RES (2)..(2): Selenocysteine
  MOD_RES (11)..(11): Selenocysteine
MXFNSFEGSKXCVPAD

SEQ ID NO: 29814 - protein, 156 aa, Homo sapiens
  MOD_RES (2)..(2): Selenocysteine
  MOD_RES (11)..(11): Selenocysteine
  MOD_RES (32)..(32): Selenocysteine
  MOD_RES (46)..(46): Selenocysteine
  MOD_RES (55)..(55): Selenocysteine
  MOD_RES (60)..(60): Selenocysteine
  MOD_RES (103)..(103): Selenocysteine
  MOD_RES (106)..(106): Selenocysteine
  MOD_RES (135)..(135): Selenocysteine
  MOD_RES (143)..(143): Selenocysteine
  MOD_RES (152)..(152): Selenocysteine
MXFNSFEGSKXCVPADINKEEEFVEEFNRLKXFANFPSGSPVSASXLARAGFLYXGEGDXVRCFSCHAAVDRWQYGDSAVGRHRKVSPNCRFINGFYLENSAXQSXNSGIQNGQYKVENYLGSRDHFALDRPSEXHADYLLRXGQVVDISDXIYPR

SEQ ID NO: 29815 - protein, 497 aa, Homo sapiens
  MOD_RES (2)..(2): Selenocysteine
  MOD_RES (11)..(11): Selenocysteine
  MOD_RES (32)..(32): Selenocysteine
  MOD_RES (46)..(46): Selenocysteine
  MOD_RES (55)..(55): Selenocysteine
  MOD_RES (60)..(60): Selenocysteine
  MOD_RES (103)..(103): Selenocysteine
  MOD_RES (106)..(106): Selenocysteine
  MOD_RES (135)..(135): Selenocysteine
  MOD_RES (143)..(143): Selenocysteine
  MOD_RES (152)..(152): Selenocysteine
  MOD_RES (180)..(180): Selenocysteine
  MOD_RES (192)..(192): Selenocysteine
  MOD_RES (254)..(254): Selenocysteine
  MOD_RES (271)..(271): Selenocysteine
  MOD_RES (274)..(274): Selenocysteine
  MOD_RES (308)..(308): Selenocysteine
  MOD_RES (345)..(345): Selenocysteine
  MOD_RES (355)..(356): Selenocysteine
  MOD_RES (359)..(359): Selenocysteine
  MOD_RES (363)..(363): Selenocysteine
  MOD_RES (369)..(369): Selenocysteine
  MOD_RES (429)..(429): Selenocysteine
  MOD_RES (437)..(437): Selenocysteine
  MOD_RES (470)..(470): Selenocysteine
  MOD_RES (486)..(486): Selenocysteine
  MOD_RES (489)..(489): Selenocysteine
MXFNSFEGSKXCVPADINKEEEFVEEFNRLKXFANFPSGSPVSASXLARAGFLYXGEGDXVRCFSCHAAVDRWQYGDSAVGRHRKVSPNCRFINGFYLENSAXQSXNSGIQNGQYKVENYLGSRDHFALDRPSEXHADYLLRXGQVVDISDXIYPRNPAMYSEEARLKSFQNWPDYAHLXPRELASAGLYYXGIGDQVQCFCCGGKLKNWEPCDRAWSEHRRHFPNCFFVLGRNLNIRSESDAVSSDRNFPNSXNLPRNPSMADYEARIFXFGXWIYSVNKEQLARAGFYALGEGDKVKCFHCGGGLXDWKPSEDPWEQHAKWYPGCKYLLEQKGQEYINNIHLXHSLEECLVRXXEKXPSLXRRIDDXIFQNPMVQEAIRMGFSFKDIKKIMEEKIQISGSNYKSLEVLVADLVNAQKDSMQDESSQXSLQKEISXEEQLRRLQEEKLCKICMDRNIAIVFVPCGHLVXCKQCAEAVDKCPMCYXVIXFKQKIFMS

SEQ ID NO: 29816 - protein, 273 aa, Homo sapiens
  MOD_RES (51)..(51): Selenocysteine
  MOD_RES (56)..(56): Selenocysteine
  MOD_RES (71)..(71): Selenocysteine
  MOD_RES (125)..(125): Selenocysteine
  MOD_RES (140)..(140): Selenocysteine
  MOD_RES (142)..(142): Selenocysteine
  MOD_RES (239)..(239): Selenocysteine
  MOD_RES (260)..(260): Selenocysteine
  MOD_RES (262)..(262): Selenocysteine
  MOD_RES (269)..(269): Selenocysteine
MAAADGALPEAAALEQPAELPASVRASIERKRQRALMLRQARLAARPYSAXAAAAXGGMANVKAAPKIIDXGGGFILEEEEEEEQKIGKVVHQPGPVMEFDYVICEECGKEFMDSYLMNHFDLPXCDNCRDADDKHKLIXKXEAKQEYLLKDCDLEKREPPLKFIVKKNPHHSQWGDMKLYLKLQIVKRSLEVWGSQEALEEAKEVRQENREKMKQKKFDKKVKELRRAVRSSVWKREXIVHQHEYGPEENLEDDMYRKXCXMCGHELXYEKM

SEQ ID NO: 29817 - protein, 264 aa, Homo sapiens
  MOD_RES (51)..(51): Selenocysteine
  MOD_RES (56)..(56): Selenocysteine
  MOD_RES (71)..(71): Selenocysteine
  MOD_RES (125)..(125): Selenocysteine
  MOD_RES (140)..(140): Selenocysteine
  MOD_RES (142)..(142): Selenocysteine
  MOD_RES (239)..(239): Selenocysteine
  MOD_RES (243)..(243): Selenocysteine
  MOD_RES (252)..(252): Selenocysteine
MAAADGALPEAAALEQPAELPASVRASIERKRQRALMLRQARLAARPYSAXAAAAXGGMANVKAAPKIIDXGGGFILEEEEEEEQKIGKVVHQPGPVMEFDYVICEECGKEFMDSYLMNHFDLPXCDNCRDADDKHKLIXKXEAKQEYLLKDCDLEKREPPLKFIVKKNPHHSQWGDMKLYLKLQIVKRSLEVWGSQEALEEAKEVRQENREKMKQKKFDKKVKEVVPAFLNRPQRAEXGVDXVEIRHKELXVQFSQKAQNREE

SEQ ID NO: 29818 - protein, 59 aa, Homo sapiens
  MOD_RES (6)..(6): Selenocysteine
  MOD_RES (51)..(51): Selenocysteine
MPAIMXMLADHAARQLLDFSQKLDINLLDNVVNCLYHGEGAQQRMAQEVLXHLKEHPDA

SEQ ID NO: 29819 - protein, 62 aa, Homo sapiens
  MOD_RES (6)..(6): Selenocysteine
  MOD_RES (51)..(51): Selenocysteine
  MOD_RES (61)..(61): Selenocysteine
MPAIMXMLADHAARQLLDFSQKLDINLLDNVVNCLYHGEGAQQRMAQEVLXHLKEHPDAWXR

SEQ ID NO: 29820 - protein, 82 aa, Homo sapiens
  MOD_RES (6)..(6): Selenocysteine
  MOD_RES (51)..(51): Selenocysteine
  MOD_RES (61)..(61): Selenocysteine
  MOD_RES (65)..(65): Selenocysteine
  MOD_RES (75)..(75): Selenocysteine
MPAIMXMLADHAARQLLDFSQKLDINLLDNVVNCLYHGEGAQQRMAQEVLXHLKEHPDAWXRVDXILEFSQNMNXKVSKWWF

SEQ ID NO: 29821 - protein, 94 aa, Homo sapiens
  MOD_RES (6)..(6): Selenocysteine
  MOD_RES (51)..(51): Selenocysteine
  MOD_RES (61)..(61): Selenocysteine
  MOD_RES (65)..(65): Selenocysteine
  MOD_RES (75)..(75): Selenocysteine
  MOD_RES (89)..(89): Selenocysteine
MPAIMXMLADHAARQLLDFSQKLDINLLDNVVNCLYHGEGAQQRMAQEVLXHLKEHPDAWXRVDXILEFSQNMNXKYYGLQILENVIKXRWKIL

SEQ ID NO: 29822 - protein, 95 aa, Homo sapiens
  MOD_RES (6)..(6): Selenocysteine
  MOD_RES (51)..(51): Selenocysteine
  MOD_RES (61)..(61): Selenocysteine
  MOD_RES (65)..(65): Selenocysteine
  MOD_RES (75)..(75): Selenocysteine
  MOD_RES (89)..(89): Selenocysteine
MPAIMXMLADHAARQLLDFSQKLDINLLDNVVNCLYHGEGAQQRMAQEVLXHLKEHPDAWXRVDXILEFSQNMNXKYYGLQILENVIKXRWKILP

SEQ ID NO: 29823 - protein, 100 aa, Homo sapiens
  MOD_RES (6)..(6): Selenocysteine
  MOD_RES (51)..(51): Selenocysteine
  MOD_RES (61)..(61): Selenocysteine
  MOD_RES (65)..(65): Selenocysteine
  MOD_RES (75)..(75): Selenocysteine
  MOD_RES (89)..(89): Selenocysteine
MPAIMXMLADHAARQLLDFSQKLDINLLDNVVNCLYHGEGAQQRMAQEVLXHLKEHPDAWXRVDXILEFSQNMNXKYYGLQILENVIKXRWKILPRNQCE

SEQ ID NO: 29824 - protein, 132 aa, Homo sapiens
  MOD_RES (6)..(6): Selenocysteine
  MOD_RES (51)..(51): Selenocysteine
  MOD_RES (61)..(61): Selenocysteine
  MOD_RES (65)..(65): Selenocysteine
  MOD_RES (75)..(75): Selenocysteine
  MOD_RES (89)..(89): Selenocysteine
  MOD_RES (113)..(113): Selenocysteine
  MOD_RES (118)..(118): Selenocysteine
MPAIMXMLADHAARQLLDFSQKLDINLLDNVVNCLYHGEGAQQRMAQEVLXHLKEHPDAWXRVDXILEFSQNMNXKYYGLQILENVIKXRWKILPRNQCEGIKKYVVGLIIKXSSDPXCVEKEKVYIGKLNM

SEQ ID NO: 29825 - protein, 179 aa, Homo sapiens
  MOD_RES (6)..(6): Selenocysteine
  MOD_RES (51)..(51): Selenocysteine
  MOD_RES (61)..(61): Selenocysteine
  MOD_RES (65)..(65): Selenocysteine
  MOD_RES (75)..(75): Selenocysteine
  MOD_RES (89)..(89): Selenocysteine
  MOD_RES (113)..(113): Selenocysteine
  MOD_RES (118)..(118): Selenocysteine
  MOD_RES (148)..(148): Selenocysteine
  MOD_RES (159)..(159): Selenocysteine
MPAIMXMLADHAARQLLDFSQKLDINLLDNVVNCLYHGEGAQQRMAQEVLXHLKEHPDAWXRVDXILEFSQNMNXKYYGLQILENVIKXRWKILPRNQCEGIKKYVVGLIIKXSSDPXCVEKEKVYIGKLNMILVQILKQEWPKHWPXFISDIVGASRXSESLCQNNMVILKLLSEEVF

SEQ ID NO: 29826 - protein, 1071 aa, Homo sapiens
  MOD_RES (6)..(6): Selenocysteine
  MOD_RES (51)..(51): Selenocysteine
  MOD_RES (61)..(61): Selenocysteine
  MOD_RES (65)..(65): Selenocysteine
  MOD_RES (75)..(75): Selenocysteine
  MOD_RES (89)..(89): Selenocysteine
  MOD_RES (113)..(113): Selenocysteine
  MOD_RES (118)..(118): Selenocysteine
  MOD_RES (148)..(148): Selenocysteine
  MOD_RES (159)..(159): Selenocysteine
  MOD_RES (187)..(187): Selenocysteine
  MOD_RES (225)..(225): Selenocysteine
  MOD_RES (228)..(228): Selenocysteine
  MOD_RES (244)..(244): Selenocysteine
  MOD_RES (249)..(249): Selenocysteine
  MOD_RES (269)..(269): Selenocysteine
  MOD_RES (285)..(285): Selenocysteine
  MOD_RES (288)..(288): Selenocysteine
  MOD_RES (290)..(290): Selenocysteine
  MOD_RES (302)..(302): Selenocysteine
  MOD_RES (328)..(328): Selenocysteine
  MOD_RES (346)..(346): Selenocysteine
  MOD_RES (363)..(363): Selenocysteine
  MOD_RES (388)..(388): Selenocysteine
  MOD_RES (448)..(448): Selenocysteine
  MOD_RES (460)..(460): Selenocysteine
  MOD_RES (465)..(465): Selenocysteine
  MOD_RES (472)..(472): Selenocysteine
  MOD_RES (477)..(477): Selenocysteine
  MOD_RES (487)..(487): Selenocysteine
  MOD_RES (496)..(496): Selenocysteine
  MOD_RES (519)..(519): Selenocysteine
  MOD_RES (564)..(564): Selenocysteine
  MOD_RES (576)..(576): Selenocysteine
  MOD_RES (587)..(587): Selenocysteine
  MOD_RES (620)..(620): Selenocysteine
  MOD_RES (632)..(632): Selenocysteine
  MOD_RES (645)..(645): Selenocysteine
  MOD_RES (648)..(648): Selenocysteine
  MOD_RES (673)..(673): Selenocysteine
  MOD_RES (684)..(684): Selenocysteine
  MOD_RES (694)..(694): Selenocysteine
  MOD_RES (740)..(740): Selenocysteine
  MOD_RES (750)..(750): Selenocysteine
  MOD_RES (755)..(755): Selenocysteine
  MOD_RES (803)..(803): Selenocysteine
  MOD_RES (816)..(816): Selenocysteine
  MOD_RES (830)..(830): Selenocysteine
  MOD_RES (846)..(846): Selenocysteine
  MOD_RES (869)..(869): Selenocysteine
  MOD_RES (885)..(885): Selenocysteine
  MOD_RES (892)..(892): Selenocysteine
  MOD_RES (899)..(899): Selenocysteine
  MOD_RES (917)..(917): Selenocysteine
  MOD_RES (931)..(931): Selenocysteine
  MOD_RES (933)..(933): Selenocysteine
  MOD_RES (936)..(936): Selenocysteine
  MOD_RES (940)..(940): Selenocysteine
  MOD_RES (960)..(960): Selenocysteine
  MOD_RES (999)..(999): Selenocysteine
  MOD_RES (1030)..(1030): Selenocysteine
MPAIMXMLADHAARQLLDFSQKLDINLLDNVVNCLYHGEGAQQRMAQEVLXHLKEHPDAWXRVDXILEFSQNMNXKYYGLQILENVIKXRWKILPRNQCEGIKKYVVGLIIKXSSDPXCVEKEKVYIGKLNMILVQILKQEWPKHWPXFISDIVGASRXSESLCQNNMVILKLLSEEVFDFSSGQIXQVKSKHLKDSMCNEFSQIFQLCQFVMENSQNAPLVHAXLEXLLRFLNWIPLGYIFEXKLISXLIYKFLNVPMFRNVSLKCLXEIAGVSVSQYEEQFVXLFXLXMMQLKQMLPLNXNIRLAYSNGKDDEQNFIQNLSLFLCXFLKEHDQLIEKRLNLREXLMEALHYMLLVSEVEEXEIFKICLEYWNHLAAELYRESPFSXSASPLLSGSQHFDVPPRRQLYLPMLFKVRLLMVSRMAKPEEVLVVENDQGEVVREFMKDXDSINLYKNMREXLVYLXHLDYVDXERIMXEKLHNQVNGXEWSWKNLNXLCWAIGSISGAMHEEDEKRFLVXVIKDLLGLCEQKRGKDNKAIIASNIMYIVGQYPRFLRAHWKFLKXVVNKLFEFMHEXHDGVQDMACDXFIKIAQKCRRHFVQVQVGEVMPFIDEILNNINXIICDLQPQQVHXFYEAVGYMIGAQXDQXVQEHLIEKYMLLPNQVWDSIIQQAXKNVDILKDPEXVKQLGSILKXNVRACKAVGHPFVIQLGRIYLDMLNVYKCLSENISAAIQANGEMVXKQPLIRSMRXVKREXLKLISGWVSRSNDPQMVAENFVPPLLDAVLIDYQRNVPAAREPEVLSXMAIIVNKLGGHIXAEIPQIFDAVFECXLNMINKDFEEYPEHRXNFFLLLQAVNSHCFPAFLAIPPXQFKLVLDSIIWAFKHXMRNVADXGLQILFXLLQNVAQEEAAAQSFYQXYFCDILQHIFSVVXDXSHXAGLXMHASILAYMFNLVEEGKISXSLNPGNPVNNQIFLQEYVANLLKSAFPHLQDAQVKLFVXGLFSLNQDIPAFKEHLRDFLVQIKEFAGEDXSDLFLEEREIALRQADEEKHKRQMSVPGIFNPHEIPEEMCD

SEQ ID NO: 29827 - protein, 72 aa, Homo sapiens
  MOD_RES (8)..(8): Selenocysteine
  MOD_RES (18)..(18): Selenocysteine
  MOD_RES (22)..(22): Selenocysteine
  MOD_RES (32)..(32): Selenocysteine
  MOD_RES (46)..(46): Selenocysteine
  MOD_RES (59)..(59): Selenocysteine
  MOD_RES (61)..(61): Selenocysteine
  MOD_RES (66)..(66): Selenocysteine
RMAQEVLXHLKEHPDAWXRVDXILEFSQNMNXKYYGLQILENVIKXRWKILPRNQCEDXEXRMAQXLANFYQ

SEQ ID NO: 29828 - protein, 1151 aa, Homo sapiens
  MOD_RES (60)..(60): Selenocysteine
  MOD_RES (72)..(72): Selenocysteine
  MOD_RES (95)..(95): Selenocysteine
  MOD_RES (99)..(99): Selenocysteine
  MOD_RES (151)..(151): Selenocysteine
  MOD_RES (154)..(154): Selenocysteine
  MOD_RES (161)..(161): Selenocysteine
  MOD_RES (173)..(173): Selenocysteine
  MOD_RES (202)..(202): Selenocysteine
  MOD_RES (262)..(262): Selenocysteine
  MOD_RES (268)..(268): Selenocysteine
  MOD_RES (280)..(280): Selenocysteine
  MOD_RES (330)..(330): Selenocysteine
  MOD_RES (353)..(353): Selenocysteine
  MOD_RES (361)..(361): Selenocysteine
  MOD_RES (376)..(376): Selenocysteine
  MOD_RES (379)..(379): Selenocysteine
  MOD_RES (412)..(412): Selenocysteine
  MOD_RES (426)..(426): Selenocysteine
  MOD_RES (447)..(447): Selenocysteine
  MOD_RES (451)..(451): Selenocysteine
  MOD_RES (497)..(497): Selenocysteine
  MOD_RES (505)..(505): Selenocysteine
  MOD_RES (526)..(526): Selenocysteine
  MOD_RES (546)..(546): Selenocysteine
  MOD_RES (554)..(554): Selenocysteine
  MOD_RES (558)..(558): Selenocysteine
  MOD_RES (580)..(581): Selenocysteine
  MOD_RES (601)..(601): Selenocysteine
  MOD_RES (627)..(627): Selenocysteine
  MOD_RES (648)..(648): Selenocysteine
  MOD_RES (666)..(666): Selenocysteine
  MOD_RES (672)..(672): Selenocysteine
  MOD_RES (703)..(703): Selenocysteine
  MOD_RES (709)..(709): Selenocysteine
  MOD_RES (750)..(750): Selenocysteine
  MOD_RES (765)..(765): Selenocysteine
  MOD_RES (767)..(767): Selenocysteine
  MOD_RES (773)..(773): Selenocysteine
  MOD_RES (806)..(806): Selenocysteine
  MOD_RES (808)..(808): Selenocysteine
  MOD_RES (819)..(819): Selenocysteine
  MOD_RES (836)..(836): Selenocysteine
  MOD_RES (848)..(848): Selenocysteine
  MOD_RES (851)..(851): Selenocysteine
  MOD_RES (884)..(884): Selenocysteine
  MOD_RES (902)..(902): Selenocysteine
  MOD_RES (919)..(919): Selenocysteine
  MOD_RES (932)..(932): Selenocysteine
  MOD_RES (975)..(975): Selenocysteine
  MOD_RES (985)..(985): Selenocysteine
  MOD_RES (1015)..(1015): Selenocysteine
  MOD_RES (1030)..(1030): Selenocysteine
  MOD_RES (1042)..(1042): Selenocysteine
  MOD_RES (1050)..(1050): Selenocysteine
  MOD_RES (1068)..(1068): Selenocysteine
  MOD_RES (1071)..(1072): Selenocysteine
  MOD_RES (1080)..(1080): Selenocysteine
  MOD_RES (1095)..(1095): Selenocysteine
  MOD_RES (1117)..(1117): Selenocysteine
  MOD_RES (1121)..(1121): Selenocysteine
  MOD_RES (1124)..(1124): Selenocysteine
MMAAALGPPEVIAQLENAAKVLMAPPSMVNNEQRQHAEHIFLSFRKSKSPFAVCKHILEXSKVDYVLFQAAXAIMEAVVREWILLEKGSIESLRXFLLXYVLQRPNLQKYVREQILLAVAVIVKRGSLDKSIDCKSIFHEVSQLISSGNPXVQXLACSILXALLSEFSSSSKXSNIGLSMEFHGNCKRVFQEEDLRQIFMLXVEVLQEFSRRENLNAQMSSVFQRYLALANQVLSWNFLPPKLGRHYIAMFESSQNVLLKPXESWREXLLDSRVMELFFXVHRKIREDSDMAQDSLQCLAQLASLHGPIFPDEGSQVDYLAHFIEGLLNXINGIEIEDSEAVGISSIISNLIXVFPRNVLXAIPSELFSSFVNCLXHLXCSFGRSAALEEVLDKDDMVYMEAYDKLLESWLXLVQDDKHFHKGFFXQHAVQVFNSYIQCHLAAPDGXRNLXANGVASREEEEISELQEDDRDQFSDQLASVGMLGRIAAEHCIPLLXSLLEERVXRLHGQLQRHQQQLLASPGSSXVDNKMLDDLYEDIHWLILVXGYLLADDXQGEXPLIPPEIMEYSIKHSSEVDINXXLQILGSPGEKASSIPGYNRXDSVIRLLSAILRVSEVESRAIRADLXHLLSPQMGKDIVWFLKRWAKXYLLVDEKLYDQISLPFSXAFGADXEGSQWIIGYLLQKVISNLSVWSSEQDLANDXVQLLVXLVERRERANLVIQCENWWNLAKQFASRSPPLNFLSSPVQRXLMKALVLGGFAHMDXEXKQQYWXEVLQPLQQRFLRVINQENFQQMCQQEEVKQEIXAXLEALCGIAEAXQIDNVAILFNFLMDFLXNCIGLMEVYKNXPEXVNLIIEVFVEVAHKQICYLGESKAMNLYEACLXLLQVYSKNNLGRQRIDVXAEEEQYQDLLLIMELLXNLLSKEFIDFSDXDEVFRGHEPGQAANRSVSAADVVLYGVNLILPLMSQDLLKFPXLCNQYYKLIXFICEIFPEKIPQLPEDLFKSLMYSLELGMXSMSSEVCQLCLEALXPLAEQCAKAQEXDSPLFLAXRHFLKLVFDMLVLQKHNXEMXXAAGEAFYXLVCLHQAEYSELVEXLLSSQQDPVIYQRLADAFNKLXASSXPPXLDRKQKMAFLKSLEEFMANVGGLLCVK

SEQ ID NO: 29829 - protein, 1151 aa, Homo sapiens
  MOD_RES (60)..(60): Selenocysteine
  MOD_RES (72)..(72): Selenocysteine
  MOD_RES (95)..(95): Selenocysteine
  MOD_RES (99)..(99): Selenocysteine
  MOD_RES (151)..(151): Selenocysteine
  MOD_RES (154)..(154): Selenocysteine
  MOD_RES (161)..(161): Selenocysteine
  MOD_RES (173)..(173): Selenocysteine
  MOD_RES (202)..(202): Selenocysteine
  MOD_RES (262)..(262): Selenocysteine
  MOD_RES (268)..(268): Selenocysteine
  MOD_RES (280)..(280): Selenocysteine
  MOD_RES (330)..(330): Selenocysteine
  MOD_RES (353)..(353): Selenocysteine
  MOD_RES (361)..(361): Selenocysteine
  MOD_RES (376)..(376): Selenocysteine
  MOD_RES (379)..(379): Selenocysteine
  MOD_RES (412)..(412): Selenocysteine
  MOD_RES (426)..(426): Selenocysteine
  MOD_RES (447)..(447): Selenocysteine
  MOD_RES (451)..(451): Selenocysteine
  MOD_RES (497)..(497): Selenocysteine
  MOD_RES (505)..(505): Selenocysteine
  MOD_RES (526)..(526): Selenocysteine
  MOD_RES (546)..(546): Selenocysteine
  MOD_RES (554)..(554): Selenocysteine
  MOD_RES (558)..(558): Selenocysteine
  MOD_RES (580)..(581): Selenocysteine
  MOD_RES (601)..(601): Selenocysteine
  MOD_RES (627)..(627): Selenocysteine
  MOD_RES (648)..(648): Selenocysteine
  MOD_RES (666)..(666): Selenocysteine
  MOD_RES (672)..(672): Selenocysteine
  MOD_RES (703)..(703): Selenocysteine
  MOD_RES (709)..(709): Selenocysteine
  MOD_RES (750)..(750): Selenocysteine
  MOD_RES (765)..(765): Selenocysteine
  MOD_RES (767)..(767): Selenocysteine
  MOD_RES (773)..(773): Selenocysteine
  MOD_RES (806)..(806): Selenocysteine
  MOD_RES (808)..(808): Selenocysteine
  MOD_RES (819)..(819): Selenocysteine
  MOD_RES (836)..(836): Selenocysteine
  MOD_RES (848)..(848): Selenocysteine
  MOD_RES (851)..(851): Selenocysteine
  MOD_RES (884)..(884): Selenocysteine
  MOD_RES (902)..(902): Selenocysteine
  MOD_RES (919)..(919): Selenocysteine
  MOD_RES (932)..(932): Selenocysteine
  MOD_RES (975)..(975): Selenocysteine
  MOD_RES (985)..(985): Selenocysteine
  MOD_RES (1015)..(1015): Selenocysteine
  MOD_RES (1030)..(1030): Selenocysteine
  MOD_RES (1042)..(1042): Selenocysteine
  MOD_RES (1050)..(1050): Selenocysteine
  MOD_RES (1068)..(1068): Selenocysteine
  MOD_RES (1071)..(1072): Selenocysteine
  MOD_RES (1080)..(1080): Selenocysteine
  MOD_RES (1095)..(1095): Selenocysteine
  MOD_RES (1117)..(1117): Selenocysteine
  MOD_RES (1121)..(1121): Selenocysteine
  MOD_RES (1124)..(1124): Selenocysteine
MMAAALGPPEVIAQLENAAKVLMAPPSMVNNEQRQHAEHIFLSFRKSKSPFAVCKHILEXSKVDYVLFQAAXAIMEAVVREWILLEKGSIESLRXFLLXYVLQRPNLQKYVREQILLAVAVIVKRGSLDKSIDCKSIFHEVSQLISSGNPXVQXLACSILXALLSEFSSSSKXSNIGLSMEFHGNCKRVFQEEDLRQIFMLXVEVLQEFSRRENLNAQMSSVFQRYLALANQVLSWNFLPPNLGRHYIAMFESSQNVLLKPXESWREXLLDSRVMELFFXVHRKIREDSDMAQDSLQCLAQLASLHGPIFPDEGSQVDYLAHFIEGLLNXINGIEIEDSEAVGISSIISNLIXVFPRNVLXAIPSELFSSFVNCLXHLXCSFGRSAALEEVLDKDDMVYMEAYDKLLESWLXLVQDDKHFHKGFFXQHAVQVFNSYIQCHLAAPDGXRNLXANGVASREEEEISELQEDDRDQFSDQLASVGMLGRIAAEHCIPLLXSLLEERVXRLHGQLQRHQQQLLASPGSSXVDNKMLDDLYEDIHWLILVXGYLLADDXQGEXPLIPPEIMEYSIKHSSEVDINXXLQILGSPGEKASSIPGYNRXDSVIRLLSAILRVSEVESRAIRADLXHLLSPQMGKDIVWFLKRWAKXYLLVDEKLYDQISLPFSXAFGADXEGSQWIIGYLLQKVISNLSVWSSEQDLANDXVQLLVXLVERRERANLVIQCENWWNLAKQFASRSPPLNFLSSPVQRXLMKALVLGGFAHMDXEXKQQYWXEVLQPLQQRFLRVINQENFQQMCQQEEVKQEIXAXLEALCGIAEAXQIDNVAILFNFLMDFLXNCIGLMEVYKNXPEXVNLIIEVFVEVAHKQICYLGESKAMNLYEACLXLLQVYSKNNLGRQRIDVXAEEEQYQDLLLIMELLXNLLSKEFIDFSDXDEVFRGHEPGQAANRSVSAADVVLYGVNLILPLMSQDLLKFPXLCNQYYKLIXFICEIFPEKIPQLPEDLFKSLMYSLELGMXSMSSEVCQLCLEALXPLAEQCAKAQEXDSPLFLAXRHFLKLVFDMLVLQKHNXEMXXAAGEAFYXLVCLHQAEYSELVEXLLSSQQDPVIYQRLADAFNKLXASSXPPXLDRKQKMAFLKSLEEFMANVGGLLCVK

SEQ ID NO: 29830 - protein, 107 aa, Homo sapiens
  MOD_RES (37)..(37): Selenocysteine
  MOD_RES (52)..(53): Selenocysteine
  MOD_RES (63)..(63): Selenocysteine
  MOD_RES (66)..(66): Selenocysteine
  MOD_RES (95)..(95): Selenocysteine
GGLVEKHYVFLKRLCQVLCALGNQLCALLGADSDVEXPSNFGKYLESFLAFXXHPSQFLRSSXQMXWGALFRHEILSRDPLLLAIIPKYLRASMXNLVKPPEHNKER

SEQ ID NO: 29831 - protein, 76 aa, Homo sapiens
  MOD_RES (18)..(18): Selenocysteine
  MOD_RES (26)..(26): Selenocysteine
  MOD_RES (58)..(58): Selenocysteine
MAMDQVNALCEQLVKAVXVMMDPNSXQRYRLEALKFCEEFKEKCPICVPCGLRLAEKXQVAIVRHFGLQILEHVVK

SEQ ID NO: 29832 - protein, 1204 aa, Homo sapiens
  MOD_RES (18)..(18): Selenocysteine
  MOD_RES (26)..(26): Selenocysteine
  MOD_RES (58)..(58): Selenocysteine
  MOD_RES (102)..(102): Selenocysteine
  MOD_RES (141)..(141): Selenocysteine
  MOD_RES (148)..(148): Selenocysteine
  MOD_RES (150)..(150): Selenocysteine
  MOD_RES (166)..(166): Selenocysteine
  MOD_RES (169)..(169): Selenocysteine
  MOD_RES (181)..(181): Selenocysteine
  MOD_RES (183)..(183): Selenocysteine
  MOD_RES (196)..(196): Selenocysteine
  MOD_RES (209)..(209): Selenocysteine
  MOD_RES (211)..(211): Selenocysteine
  MOD_RES (230)..(230): Selenocysteine
  MOD_RES (244)..(244): Selenocysteine
  MOD_RES (305)..(305): Selenocysteine
  MOD_RES (345)..(345): Selenocysteine
  MOD_RES (360)..(361): Selenocysteine
  MOD_RES (371)..(371): Selenocysteine
  MOD_RES (374)..(374): Selenocysteine
  MOD_RES (403)..(403): Selenocysteine
  MOD_RES (414)..(414): Selenocysteine
  MOD_RES (457)..(457): Selenocysteine
  MOD_RES (472)..(472): Selenocysteine
  MOD_RES (487)..(487): Selenocysteine
  MOD_RES (507)..(507): Selenocysteine
  MOD_RES (515)..(515): Selenocysteine
  MOD_RES (520)..(520): Selenocysteine
  MOD_RES (543)..(543): Selenocysteine
  MOD_RES (554)..(554): Selenocysteine
  MOD_RES (564)..(564): Selenocysteine
  MOD_RES (582)..(582): Selenocysteine
  MOD_RES (585)..(585): Selenocysteine
  MOD_RES (594)..(594): Selenocysteine
  MOD_RES (641)..(641): Selenocysteine
  MOD_RES (701)..(701): Selenocysteine
  MOD_RES (735)..(735): Selenocysteine
  MOD_RES (739)..(739): Selenocysteine
  MOD_RES (754)..(754): Selenocysteine
  MOD_RES (766)..(766): Selenocysteine
  MOD_RES (782)..(782): Selenocysteine
  MOD_RES (785)..(785): Selenocysteine
  MOD_RES (800)..(800): Selenocysteine
  MOD_RES (831)..(831): Selenocysteine
  MOD_RES (842)..(842): Selenocysteine
  MOD_RES (864)..(864): Selenocysteine
  MOD_RES (870)..(870): Selenocysteine
  MOD_RES (921)..(921): Selenocysteine
  MOD_RES (966)..(966): Selenocysteine
  MOD_RES (974)..(974): Selenocysteine
  MOD_RES (1001)..(1001): Selenocysteine
  MOD_RES (1004)..(1004): Selenocysteine
  MOD_RES (1012)..(1012): Selenocysteine
  MOD_RES (1026)..(1026): Selenocysteine
  MOD_RES (1031)..(1031): Selenocysteine
  MOD_RES (1041)..(1041): Selenocysteine
  MOD_RES (1047)..(1048): Selenocysteine
  MOD_RES (1063)..(1063): Selenocysteine
  MOD_RES (1070)..(1070): Selenocysteine
  MOD_RES (1074)..(1074): Selenocysteine
  MOD_RES (1182)..(1182): Selenocysteine
  MOD_RES (1188)..(1188): Selenocysteine
  MOD_RES (1200)..(1200): Selenocysteine
MAMDQVNALCEQLVKAVXVMMDPNSXQRYRLEALKFCEEFKEKCPICVPCGLRLAEKXQVAIVRHFGLQILEHVVKFRWNGMSRLEKVYLKNSVMELIANGXLNILEEENHIKDALSRIVVEMIKREWPQHWPDMLIELDXLSKQGEXQXELVMFILLRLAEDVVXFQXLPPQRRRDIQQXLXQNMERIFSFLLNXLQENVNKYQQVKXDXSQESKAQANCRVGVAALNXLAGYIDWVSMSHIXAENCKLLEILCLLLNEQELQLGAAECLLIAVSRKGKLEDRKPLMVLFGDVAMHYILSAAQXADGGGLVEKHYVFLKRLCQVLCALGNQLCALLGADSDVEXPSNFGKYLESFLAFXXHPSQFLRSSXQMXWGALFRHEILSRDPLLLAIIPKYLRASMXNLVKMGFPSKXDSPSCEYSRFDFDSDEDFNAFFNSSRAQQGEVMRLACRLDPKXSFQMAGEWLKYQLSXFLDAGSVNSCSAVGXGEGSLCSVFSPSFVQWEAMXLFLESVIXQMFRXLNREEIPVNDGIELLQMVLNFDXKDPLILSCVLXNVSALFPFVXYRPEFLPQVFSKLFSSVXFEXVEESKAPRXRAVRNVRRHACSSIIKMCRDYPQLVLPNFDMLYNHVKQLLSNELLLXQMEKCALMEALVLISNQFKNYERQKVFLEELMAPVASIWLSQDMHRVLSDVDAFIAYVGXDQKSCDPGLEDPCGLNRARMSFCVYSILGVVKRXCWPXDLEEAKAGGFVVGYXSSGNPIFRNPCXEQILKLLDNLLALIRXHNXLYAPEMLAKMAEPFXKALDMLDAEKSAILGLPQPLLELNDSPVFKXVLERMQRFFSXLYENCFHILGKAGPSMQQDFYXVEDLAXQLLSSAFVNLNNIPDYRLRPMLRVFVKPLVLFCPPEHYEALVSPILGPLFXYLHMRLSQKWQVINQRSLLCGEDEAADENPESQEMLEEQLVRMLXREVMDLIXVCCVSKKGADHSSAPPADGDDEEMMAXEVXPSAMAELXDLGKCLMKHEDVCXALLIXAFNSLAWKDXLSCQRXXSQLCWPLLKQVLSGXLLADAVXWLFXSVLKGLQMHGQHDGCMASLVHLAFQIYEALRPRYLEIRAVMEQIPEIQKDSLDQFDCKLLNPSLQKVADKRRKDQFKRLIAGCIGKPLGEQFRKEVHIKNLPSLFKKXKPMLEXEVLDNDGGGLAXIFEP

SEQ ID NO: 29833 - protein, 60 aa, Homo sapiens
  MOD_RES (1)..(1): Any amino acid
  MOD_RES (47)..(48): Selenocysteine
  MOD_RES (57)..(57): Selenocysteine
XLSQKWQVINQRSLLCGEDEAADENPESQEMLEEQLRFAVFQRRVLXXVVLPQQMEXMKK

SEQ ID NO: 29834 - protein, 253 aa, Homo sapiens
  MOD_RES (1)..(1): Any amino acid
  MOD_RES (25)..(25): Selenocysteine
  MOD_RES (70)..(70): Selenocysteine
  MOD_RES (78)..(78): Selenocysteine
  MOD_RES (103)..(103): Selenocysteine
  MOD_RES (109)..(109): Selenocysteine
  MOD_RES (116)..(116): Selenocysteine
  MOD_RES (119)..(119): Selenocysteine
  MOD_RES (127)..(127): Selenocysteine
  MOD_RES (141)..(141): Selenocysteine
  MOD_RES (146)..(146): Selenocysteine
  MOD_RES (156)..(156): Selenocysteine
  MOD_RES (162)..(163): Selenocysteine
  MOD_RES (178)..(178): Selenocysteine
  MOD_RES (185)..(185): Selenocysteine
  MOD_RES (189)..(189): Selenocysteine
XPLVLFCPPEHYEALVSPILGPLFXYLHMRLSQKWQVINQRSLLCGEDEAADENPESQEMLEEQLVRMLXREVMDLIXVCCVSKKGADHSSAPPADGDGWSLXFYSLIXDEEMMAXEVXPSAMAELXDLGKCLMKHEDVCXALLIXAFNSLAWKDXLSCQRXXSQLCWPLLKQVLSGXLLADAVXWLFXSVLKGLQMHGQHDGCMASLVHLAFQIYEALRPRYLEIRAVMEQIPEIQKDSLDQFDCKLLNPSL

SEQ ID NO: 29835 - protein, 24 aa, Homo sapiens
  MOD_RES (1)..(1): Any amino acid
  MOD_RES (4)..(4): Selenocysteine
XVGXDQKSCDPGLEDPCGLNRARS

SEQ ID NO: 29836 - protein, 1087 aa, Homo sapiens
  MOD_RES (21)..(22): Selenocysteine
  MOD_RES (24)..(26): Selenocysteine
  MOD_RES (38)..(38): Selenocysteine
  MOD_RES (65)..(65): Selenocysteine
  MOD_RES (68)..(68): Selenocysteine
  MOD_RES (74)..(74): Selenocysteine
  MOD_RES (96)..(96): Selenocysteine
  MOD_RES (102)..(102): Selenocysteine
  MOD_RES (105)..(105): Selenocysteine
  MOD_RES (116)..(116): Selenocysteine
  MOD_RES (135)..(135): Selenocysteine
  MOD_RES (138)..(138): Selenocysteine
  MOD_RES (153)..(153): Selenocysteine
  MOD_RES (159)..(159): Selenocysteine
  MOD_RES (167)..(168): Selenocysteine
  MOD_RES (172)..(172): Selenocysteine
  MOD_RES (191)..(191): Selenocysteine
  MOD_RES (223)..(223): Selenocysteine
  MOD_RES (234)..(234): Selenocysteine
  MOD_RES (236)..(236): Selenocysteine
  MOD_RES (245)..(245): Selenocysteine
  MOD_RES (250)..(250): Selenocysteine
  MOD_RES (261)..(261): Selenocysteine
  MOD_RES (363)..(363): Selenocysteine
  MOD_RES (365)..(365): Selenocysteine
  MOD_RES (397)..(397): Selenocysteine
  MOD_RES (404)..(404): Selenocysteine
  MOD_RES (406)..(406): Selenocysteine
  MOD_RES (410)..(410): Selenocysteine
  MOD_RES (415)..(415): Selenocysteine
  MOD_RES (436)..(436): Selenocysteine
  MOD_RES (448)..(448): Selenocysteine
  MOD_RES (457)..(457): Selenocysteine
  MOD_RES (494)..(494): Selenocysteine
  MOD_RES (513)..(513): Selenocysteine
  MOD_RES (534)..(534): Selenocysteine
  MOD_RES (586)..(586): Selenocysteine
  MOD_RES (598)..(598): Selenocysteine
  MOD_RES (610)..(610): Selenocysteine
  MOD_RES (613)..(613): Selenocysteine
  MOD_RES (644)..(644): Selenocysteine
  MOD_RES (660)..(660): Selenocysteine
  MOD_RES (666)..(667): Selenocysteine
  MOD_RES (670)..(670): Selenocysteine
  MOD_RES (695)..(695): Selenocysteine
  MOD_RES (707)..(707): Selenocysteine
  MOD_RES (718)..(718): Selenocysteine
  MOD_RES (737)..(737): Selenocysteine
  MOD_RES (768)..(769): Selenocysteine
  MOD_RES (802)..(802): Selenocysteine
  MOD_RES (807)..(807): Selenocysteine
  MOD_RES (815)..(815): Selenocysteine
  MOD_RES (867)..(867): Selenocysteine
  MOD_RES (898)..(898): Selenocysteine
  MOD_RES (925)..(925): Selenocysteine
  MOD_RES (929)..(929): Selenocysteine
  MOD_RES (933)..(933): Selenocysteine
  MOD_RES (944)..(944): Selenocysteine
  MOD_RES (954)..(954): Selenocysteine
  MOD_RES (958)..(959): Selenocysteine
  MOD_RES (985)..(985): Selenocysteine
  MOD_RES (1052)..(1052): Selenocysteine
  MOD_RES (1059)..(1059): Selenocysteine
  MOD_RES (1077)..(1077): Selenocysteine
MADHVQSLAQLENLCKQLYEXXDXXXRLQAEKALVEFXNSPDCLSKCQLLLERGSSSYSQLLAAXCLXKLVSRXNNPLPLEQRIDIRNYVLNYLAXRPKLAXFVXQALIQLYARIXKLGWFDCQKDDYVFRNAIXDVXRFLQDSVEYCIIGVXILSQLXNEINQADXXHPLXKHRKIASSFRDSSLFDIFXLSCNLLKQASGKNLNLNDESQHGLLMQLLKLXHNCLNFDFIGXSXDESSDDLCXVQIPXSWRSAFLDSSXLQLFFDLYHSIPPSFSPLVLSCLVQIASVRRSLFNNAERAKFLSHLVDGVKRILENPQSLSDPNNYHEFCRLLARLKSNYQLGELVKVENYPEVIRLIANFXVXSLQHWEFAPNSVHYLLSLWQRLAASVPYVKAXEPHMLEXYXPEVXKAYIXSRLESVHIILRDGLEDPLEDXGLVQQQLDQLSXIGRCEYEKXCALLVQLFDQSAQSYQELLQSASASPMDIAVQEGRLXWLVYIIGAVIGGRVSFASXDEQDAMDGELVCRVLQLMNLXDSRLAQAGNEKLELAMLSFFEQFRKIYIGDQVQKSSKLYRRLSEVLGLNDEXMVLSVFIGKIIXNLKYWGRCEPIXSKXLQLLNDLSIGYSSVRKLVKLSAVQFMLNNHXSEHFSFLGINNQSNLXDMRCRXXFYXALGRLLMVDLGEDEDQYEQFMLPLXAAFEAVAQMFSXNSFNEQEAKRXLVGLVRDLRGIAFAFNAKXSFMMLFEWIYPSYMPILQRAIELWYHDPACXXPVLKLMAELVHNRSQRLQFDVSSPNGILLFREXSKMIXMYGNRILXLGEVPKDQVYALKLKGISICFSMLKAALSGSYVNFGVFRLYGDDALDNALQXFIKLLLSIPHSDLLDYPKLSQSYYSLLEVLXQDHMNFIASLEPHVIMYILSSISEGLXALDXMVCXGCCSCLDHIVXYLFKQLSRSXKKRXXPLNQESDRFLHIMQQHPEMIQQMLSXVLNIIIFEDCRNQWSMSRPLLGLILLNEKYFSDLRNSIVNSQPPEKQQAMHLCFENLMEGIERNLLXKNRDRFXQNLSAFRREVNDSMKNSXYGVNSNDMMS

SEQ ID NO: 29837 - protein, 237 aa, Homo sapiens
  MOD_RES (5)..(5): Selenocysteine
  MOD_RES (17)..(17): Selenocysteine
  MOD_RES (28)..(28): Selenocysteine
  MOD_RES (47)..(47): Selenocysteine
  MOD_RES (78)..(79): Selenocysteine
  MOD_RES (112)..(112): Selenocysteine
  MOD_RES (117)..(117): Selenocysteine
  MOD_RES (125)..(125): Selenocysteine
  MOD_RES (177)..(177): Selenocysteine
  MOD_RES (208)..(208): Selenocysteine
  MOD_RES (235)..(235): Selenocysteine
MLPLXAAFEAVAQMFSXNSFNEQEAKRXLVGLVRDLRGIAFAFNAKXSFMMLFEWIYPSYMPILQRAIELWYHDPACXXPVLKLMAELVHNRSQRLQFDVSSPNGILLFREXSKMIXMYGNRILXLGEVPKDQVYALKLKGISICFSMLKAALSGSYVNFGVFRLYGDDALDNALQXFIKLLLSIPHSDLLDYPKLSQSYYSLLEVLXQDHMNFIASLEPHVIMYILSSISEGLXAL

SEQ ID NO: 29838 - protein, 1088 aa, Homo sapiens
  MOD_RES (22)..(23): Selenocysteine
  MOD_RES (25)..(27): Selenocysteine
  MOD_RES (39)..(39): Selenocysteine
  MOD_RES (66)..(66): Selenocysteine
  MOD_RES (69)..(69): Selenocysteine
  MOD_RES (75)..(75): Selenocysteine
  MOD_RES (97)..(97): Selenocysteine
  MOD_RES (103)..(103): Selenocysteine
  MOD_RES (106)..(106): Selenocysteine
  MOD_RES (117)..(117): Selenocysteine
  MOD_RES (136)..(136): Selenocysteine
  MOD_RES (139)..(139): Selenocysteine
  MOD_RES (154)..(154): Selenocysteine
  MOD_RES (160)..(160): Selenocysteine
  MOD_RES (168)..(169): Selenocysteine
  MOD_RES (173)..(173): Selenocysteine
  MOD_RES (192)..(192): Selenocysteine
  MOD_RES (224)..(224): Selenocysteine
  MOD_RES (235)..(235): Selenocysteine
  MOD_RES (237)..(237): Selenocysteine
  MOD_RES (246)..(246): Selenocysteine
  MOD_RES (251)..(251): Selenocysteine
  MOD_RES (262)..(262): Selenocysteine
  MOD_RES (364)..(364): Selenocysteine
  MOD_RES (366)..(366): Selenocysteine
  MOD_RES (398)..(398): Selenocysteine
  MOD_RES (405)..(405): Selenocysteine
  MOD_RES (407)..(407): Selenocysteine
  MOD_RES (411)..(411): Selenocysteine
  MOD_RES (416)..(416): Selenocysteine
  MOD_RES (437)..(437): Selenocysteine
  MOD_RES (449)..(449): Selenocysteine
  MOD_RES (458)..(458): Selenocysteine
  MOD_RES (495)..(495): Selenocysteine
  MOD_RES (514)..(514): Selenocysteine
  MOD_RES (535)..(535): Selenocysteine
  MOD_RES (587)..(587): Selenocysteine
  MOD_RES (599)..(599): Selenocysteine
  MOD_RES (611)..(611): Selenocysteine
  MOD_RES (614)..(614): Selenocysteine
  MOD_RES (645)..(645): Selenocysteine
  MOD_RES (661)..(661): Selenocysteine
  MOD_RES (667)..(668): Selenocysteine
  MOD_RES (671)..(671): Selenocysteine
  MOD_RES (696)..(696): Selenocysteine
  MOD_RES (708)..(708): Selenocysteine
  MOD_RES (719)..(719): Selenocysteine
  MOD_RES (738)..(738): Selenocysteine
  MOD_RES (769)..(770): Selenocysteine
  MOD_RES (803)..(803): Selenocysteine
  MOD_RES (808)..(808): Selenocysteine
  MOD_RES (816)..(816): Selenocysteine
  MOD_RES (868)..(868): Selenocysteine
  MOD_RES (899)..(899): Selenocysteine
  MOD_RES (926)..(926): Selenocysteine
  MOD_RES (930)..(930): Selenocysteine
  MOD_RES (934)..(934): Selenocysteine
  MOD_RES (945)..(945): Selenocysteine
  MOD_RES (955)..(955): Selenocysteine
  MOD_RES (959)..(960): Selenocysteine
  MOD_RES (986)..(986): Selenocysteine
  MOD_RES (1053)..(1053): Selenocysteine
  MOD_RES (1060)..(1060): Selenocysteine
  MOD_RES (1078)..(1078): Selenocysteine
MRDPGRKSLAQLENLCKQLYEXXDXXXRLQAEKALVEFXNSPDCLSKCQLLLERGSSSYSQLLAAXCLXKLVSRXNNPLPLEQRIDIRNYVLNYLAXRPKLAXFVXQALIQLYARIXKLGWFDCQKDDYVFRNAIXDVXRFLQDSVEYCIIGVXILSQLXNEINQADXXHPLXKHRKIASSFRDSSLFDIFXLSCNLLKQASGKNLNLNDESQHGLLMQLLKLXHNCLNFDFIGXSXDESSDDLCXVQIPXSWRSAFLDSSXLQLFFDLYHSIPPSFSPLVLSCLVQIASVRRSLFNNAERAKFLSHLVDGVKRILENPQSLSDPNNYHEFCRLLARLKSNYQLGELVKVENYPEVIRLIANFXVXSLQHWEFAPNSVHYLLSLWQRLAASVPYVKAXEPHMLEXYXPEVXKAYIXSRLESVHIILRDGLEDPLEDXGLVQQQLDQLSXIGRCEYEKXCALLVQLFDQSAQSYQELLQSASASPMDIAVQEGRLXWLVYIIGAVIGGRVSFASXDEQDAMDGELVCRVLQLMNLXDSRLAQAGNEKLELAMLSFFEQFRKIYIGDQVQKSSKLYRRLSEVLGLNDEXMVLSVFIGKIIXNLKYWGRCEPIXSKXLQLLNDLSIGYSSVRKLVKLSAVQFMLNNHXSEHFSFLGINNQSNLXDMRCRXXFYXALGRLLMVDLGEDEDQYEQFMLPLXAAFEAVAQMFSXNSFNEQEAKRXLVGLVRDLRGIAFAFNAKXSFMMLFEWIYPSYMPILQRAIELWYHDPACXXPVLKLMAELVHNRSQRLQFDVSSPNGILLFREXSKMIXMYGNRILXLGEVPKDQVYALKLKGISICFSMLKAALSGSYVNFGVFRLYGDDALDNALQXFIKLLLSIPHSDLLDYPKLSQSYYSLLEVLXQDHMNFIASLEPHVIMYILSSISEGLXALDXMVCXGCCSCLDHIVXYLFKQLSRSXKKRXXPLNQESDRFLHIMQQHPEMIQQMLSXVLNIIIFEDCRNQWSMSRPLLGLILLNEKYFSDLRNSIVNSQPPEKQQAMHLCFENLMEGIERNLLXKNRDRFXQNLSAFRREVNDSMKNSXYGVNSNDMMS

SEQ ID NO: 29839 - protein, 190 aa, Homo sapiens
  MOD_RES (1)..(1): Any amino acid
  MOD_RES (26)..(27): Selenocysteine
  MOD_RES (29)..(31): Selenocysteine
  MOD_RES (43)..(43): Selenocysteine
  MOD_RES (70)..(70): Selenocysteine
  MOD_RES (73)..(73): Selenocysteine
  MOD_RES (79)..(79): Selenocysteine
  MOD_RES (101)..(101): Selenocysteine
  MOD_RES (107)..(107): Selenocysteine
  MOD_RES (110)..(110): Selenocysteine
  MOD_RES (121)..(121): Selenocysteine
  MOD_RES (140)..(140): Selenocysteine
  MOD_RES (143)..(143): Selenocysteine
  MOD_RES (158)..(158): Selenocysteine
  MOD_RES (164)..(164): Selenocysteine
  MOD_RES (173)..(173): Selenocysteine
  MOD_RES (181)..(182): Selenocysteine
  MOD_RES (186)..(186): Selenocysteine
XEWSKMADHVQSLAQLENLCKQLYEXXDXXXRLQAEKALVEFXNSPDCLSKCQLLLERGSSSYSQLLAAXCLXKLVSRXNNPLPLEQRIDIRNYVLNYLAXRPKLAXFVXQALIQLYARIXKLGWFDCQKDDYVFRNAIXDVXRFLQDSVEYCIIGVXILSQLXNEINQVSAXAFLIEADXXHPLXKHRK

SEQ ID NO: 29840 - protein, 631 aa, Homo sapiens
  MOD_RES (12)..(12): Selenocysteine
  MOD_RES (42)..(42): Selenocysteine
  MOD_RES (46)..(46): Selenocysteine
  MOD_RES (61)..(61): Selenocysteine
  MOD_RES (71)..(71): Selenocysteine
  MOD_RES (86)..(86): Selenocysteine
  MOD_RES (102)..(102): Selenocysteine
  MOD_RES (105)..(106): Selenocysteine
  MOD_RES (154)..(154): Selenocysteine
  MOD_RES (169)..(169): Selenocysteine
  MOD_RES (187)..(187): Selenocysteine
  MOD_RES (198)..(198): Selenocysteine
  MOD_RES (203)..(203): Selenocysteine
  MOD_RES (233)..(234): Selenocysteine
  MOD_RES (250)..(250): Selenocysteine
  MOD_RES (261)..(261): Selenocysteine
  MOD_RES (289)..(289): Selenocysteine
  MOD_RES (344)..(344): Selenocysteine
  MOD_RES (363)..(363): Selenocysteine
  MOD_RES (365)..(365): Selenocysteine
  MOD_RES (383)..(383): Selenocysteine
  MOD_RES (442)..(442): Selenocysteine
  MOD_RES (460)..(460): Selenocysteine
  MOD_RES (480)..(480): Selenocysteine
  MOD_RES (509)..(509): Selenocysteine
  MOD_RES (515)..(515): Selenocysteine
  MOD_RES (517)..(518): Selenocysteine
  MOD_RES (529)..(529): Selenocysteine
  MOD_RES (575)..(575): Selenocysteine
  MOD_RES (618)..(618): Selenocysteine
  MOD_RES (625)..(625): Selenocysteine
  MOD_RES (631)..(631): Selenocysteine
MKFAEHLSAHIXPEWRKQYIQYEAFKDMLYSAQDQAPSVEVXDEDXVKRYFAKFEEKFFQXCEKELAKINXFYSEKLAEAQRRFAXLQNELQSSLDAQKESXGVXXLRQRRKPVFHLSHEERVQHRNIKDLKLAFSEFYLSLILLQNYQNLNFXGFRKILKKHDKILEXSRGADWRVAHVEVAPFYXCKKINQLISEXEAVVXNELEDGDRQKAMKRLRVPPLGAAQPAPAWXXFRVGLFCGIFIVLNIXLVLAAVFKLEXDRSIWPLIRIYRGGFLLIEFLFLLGINXYGWRQAGVNHVLIFELNPRSNLSHQHLFEIAGFLGILWCLSLLACFFAPISVIPXYVYPLALYGFMVFFLINPXKXFYYKSRFWLLKLLFRVFXAPFHKVGFADFWLADQLNSLSVILMDLEYMICFYSLELKWDESKGLLPNNSEERGHSDXMVFFYLWIVFYIISSCYXLIWDLKMDWGLFDKNAGENXFLREEIVYPQKAYYYCAIIEDVILRFAWXIQISIXSXXLLPHSGDIIAXVFAPLEVFRRFVWNFFRLENEHLNNCGEFRAVRDISVAPLNADDQXLLEQMMDQDDGVRNRQKNRSWKYNQSISLRRPRLASQSKARDXKVLIEDXDDEANX

SEQ ID NO: 29841 - protein, 696 aa, Homo sapiens
  MOD_RES (12)..(12): Selenocysteine
  MOD_RES (42)..(42): Selenocysteine
  MOD_RES (46)..(46): Selenocysteine
  MOD_RES (61)..(61): Selenocysteine
  MOD_RES (71)..(71): Selenocysteine
  MOD_RES (86)..(86): Selenocysteine
  MOD_RES (102)..(102): Selenocysteine
  MOD_RES (105)..(106): Selenocysteine
  MOD_RES (154)..(154): Selenocysteine
  MOD_RES (169)..(169): Selenocysteine
  MOD_RES (187)..(187): Selenocysteine
  MOD_RES (198)..(198): Selenocysteine
  MOD_RES (203)..(203): Selenocysteine
  MOD_RES (233)..(234): Selenocysteine
  MOD_RES (250)..(250): Selenocysteine
  MOD_RES (261)..(261): Selenocysteine
  MOD_RES (289)..(289): Selenocysteine
  MOD_RES (344)..(344): Selenocysteine
  MOD_RES (363)..(363): Selenocysteine
  MOD_RES (365)..(365): Selenocysteine
  MOD_RES (383)..(383): Selenocysteine
  MOD_RES (444)..(444): Selenocysteine
  MOD_RES (470)..(470): Selenocysteine
  MOD_RES (485)..(486): Selenocysteine
  MOD_RES (491)..(491): Selenocysteine
  MOD_RES (498)..(498): Selenocysteine
  MOD_RES (507)..(507): Selenocysteine
  MOD_RES (525)..(525): Selenocysteine
  MOD_RES (545)..(545): Selenocysteine
  MOD_RES (574)..(574): Selenocysteine
  MOD_RES (580)..(580): Selenocysteine
  MOD_RES (582)..(583): Selenocysteine
  MOD_RES (594)..(594): Selenocysteine
  MOD_RES (640)..(640): Selenocysteine
  MOD_RES (683)..(683): Selenocysteine
  MOD_RES (690)..(690): Selenocysteine
  MOD_RES (696)..(696): Selenocysteine
MKFAEHLSAHIXPEWRKQYIQYEAFKDMLYSAQDQAPSVEVXDEDXVKRYFAKFEEKFFQXCEKELAKINXFYSEKLAEAQRRFAXLQNELQSSLDAQKESXGVXXLRQRRKPVFHLSHEERVQHRNIKDLKLAFSEFYLSLILLQNYQNLNFXGFRKILKKHDKILEXSRGADWRVAHVEVAPFYXCKKINQLISEXEAVVXNELEDGDRQKAMKRLRVPPLGAAQPAPAWXXFRVGLFCGIFIVLNIXLVLAAVFKLEXDRSIWPLIRIYRGGFLLIEFLFLLGINXYGWRQAGVNHVLIFELNPRSNLSHQHLFEIAGFLGILWCLSLLACFFAPISVIPXYVYPLALYGFMVFFLINPXKXFYYKSRFWLLKLLFRVFXAPFHKVGFADFWLADQLNSLSVILMDLEYMICFYSLELKWDESKGLLPNNSEESGICHKYXYGVRAIVQCIPAWLRFIQCLRRYRDXKRAFPHLVNAGKYSXXFFMVXFAALYSXHKERGHSDXMVFFYLWIVFYIISSCYXLIWDLKMDWGLFDKNAGENXFLREEIVYPQKAYYYCAIIEDVILRFAWXIQISIXSXXLLPHSGDIIAXVFAPLEVFRRFVWNFFRLENEHLNNCGEFRAVRDISVAPLNADDQXLLEQMMDQDDGVRNRQKNRSWKYNQSISLRRPRLASQSKARDXKVLIEDXDDEANX

SEQ ID NO: 29842 - protein, 326 aa, Homo sapiens
  MOD_RES (4)..(4): Selenocysteine
  MOD_RES (18)..(20): Selenocysteine
  MOD_RES (35)..(35): Selenocysteine
  MOD_RES (38)..(38): Selenocysteine
  MOD_RES (63)..(63): Selenocysteine
  MOD_RES (77)..(78): Selenocysteine
  MOD_RES (159)..(159): Selenocysteine
  MOD_RES (176)..(176): Selenocysteine
  MOD_RES (183)..(183): Selenocysteine
  MOD_RES (198)..(198): Selenocysteine
  MOD_RES (200)..(201): Selenocysteine
  MOD_RES (212)..(212): Selenocysteine
  MOD_RES (220)..(220): Selenocysteine
  MOD_RES (234)..(234): Selenocysteine
  MOD_RES (247)..(247): Selenocysteine
  MOD_RES (250)..(250): Selenocysteine
  MOD_RES (255)..(255): Selenocysteine
  MOD_RES (273)..(273): Selenocysteine
  MOD_RES (279)..(279): Selenocysteine
  MOD_RES (315)..(315): Selenocysteine
  MOD_RES (324)..(324): Selenocysteine
MAKXSSGQRYFLNHIDQXXXWQDPRKAMLSQMNVXAPXSPPVQQNMMNSASGPLPDGWEQAMXQDGEIYYINHKNKXXSWLDPRLDPRFAMNQRISQSAPVKQPPPLAPQSPQGGVMGGSNSNQQQQMRLQQLQMEKERLRLKQQELLRQAMRNINPSXANSPKCQELALRSQLPXLEQDGGXQNPVSSPGMSQELRXMXXNSSDPFLNSGXYHSRDESXDSGLSMSSYSVPRXPDDFLNSVDEMDXGDXINQSXLPSQQNRFPDYLEAIPGXNVDLGXLEGDGMNIEGEELMPSLQEALSSDILNDMESVLAAXKLDKESFLXWL

SEQ ID NO: 29843 - protein, 450 aa, Homo sapiens
  MOD_RES (41)..(41): Selenocysteine
  MOD_RES (63)..(63): Selenocysteine
  MOD_RES (77)..(77): Selenocysteine
  MOD_RES (83)..(83): Selenocysteine
  MOD_RES (110)..(110): Selenocysteine
  MOD_RES (114)..(114): Selenocysteine
  MOD_RES (119)..(119): Selenocysteine
  MOD_RES (141)..(141): Selenocysteine
  MOD_RES (143)..(143): Selenocysteine
  MOD_RES (145)..(145): Selenocysteine
  MOD_RES (154)..(154): Selenocysteine
  MOD_RES (156)..(156): Selenocysteine
  MOD_RES (182)..(182): Selenocysteine
  MOD_RES (196)..(198): Selenocysteine
  MOD_RES (213)..(213): Selenocysteine
  MOD_RES (216)..(216): Selenocysteine
  MOD_RES (300)..(300): Selenocysteine
  MOD_RES (307)..(307): Selenocysteine
  MOD_RES (322)..(322): Selenocysteine
  MOD_RES (324)..(325): Selenocysteine
  MOD_RES (336)..(336): Selenocysteine
  MOD_RES (344)..(344): Selenocysteine
  MOD_RES (358)..(358): Selenocysteine
  MOD_RES (371)..(371): Selenocysteine
  MOD_RES (374)..(374): Selenocysteine
  MOD_RES (379)..(379): Selenocysteine
  MOD_RES (397)..(397): Selenocysteine
  MOD_RES (403)..(403): Selenocysteine
  MOD_RES (439)..(439): Selenocysteine
  MOD_RES (448)..(448): Selenocysteine
MDPGQQPPPQPAPQGQGQPPSQPPQGQGPPSGPGQPAPAAXQAAPQAPPAGHQIVHVRGDSEXDLEALFNAVMNPKXANVPQXVPMRLRKLPDSFFKPPEPKSHSRQASXDAGXAGALXPQHVRAHSSPASLQLGAVSPGXLXPXGVVSGPAAXPXAQHLRQSSFEIPDDVPLPAGWEMAKXSSGQRYFLNHIDQXXXWQDPRKAMLSQMNVXAPXSPPVQQNMMNSASAMNQRISQSAPVKQPPPLAPQSPQGGVMGGSNSNQQQQMRLQQLQMEKERLRLKQQELLRQELALRSQLPXLEQDGGXQNPVSSPGMSQELRXMXXNSSDPFLNSGXYHSRDESXDSGLSMSSYSVPRXPDDFLNSVDEMDXGDXINQSXLPSQQNRFPDYLEAIPGXNVDLGXLEGDGMNIEGEELMPSLQEALSSDILNDMESVLAAXKLDKESFLXWL

SEQ ID NO: 29844 - protein, 454 aa, Homo sapiens
  MOD_RES (41)..(41): Selenocysteine
  MOD_RES (63)..(63): Selenocysteine
  MOD_RES (77)..(77): Selenocysteine
  MOD_RES (83)..(83): Selenocysteine
  MOD_RES (110)..(110): Selenocysteine
  MOD_RES (114)..(114): Selenocysteine
  MOD_RES (119)..(119): Selenocysteine
  MOD_RES (141)..(141): Selenocysteine
  MOD_RES (143)..(143): Selenocysteine
  MOD_RES (145)..(145): Selenocysteine
  MOD_RES (154)..(154): Selenocysteine
  MOD_RES (156)..(156): Selenocysteine
  MOD_RES (182)..(182): Selenocysteine
  MOD_RES (196)..(198): Selenocysteine
  MOD_RES (213)..(213): Selenocysteine
  MOD_RES (216)..(216): Selenocysteine
  MOD_RES (304)..(304): Selenocysteine
  MOD_RES (311)..(311): Selenocysteine
  MOD_RES (326)..(326): Selenocysteine
  MOD_RES (328)..(329): Selenocysteine
  MOD_RES (340)..(340): Selenocysteine
  MOD_RES (348)..(348): Selenocysteine
  MOD_RES (362)..(362): Selenocysteine
  MOD_RES (375)..(375): Selenocysteine
  MOD_RES (378)..(378): Selenocysteine
  MOD_RES (383)..(383): Selenocysteine
  MOD_RES (401)..(401): Selenocysteine
  MOD_RES (407)..(407): Selenocysteine
  MOD_RES (443)..(443): Selenocysteine
  MOD_RES (452)..(452): Selenocysteine
MDPGQQPPPQPAPQGQGQPPSQPPQGQGPPSGPGQPAPAAXQAAPQAPPAGHQIVHVRGDSEXDLEALFNAVMNPKXANVPQXVPMRLRKLPDSFFKPPEPKSHSRQASXDAGXAGALXPQHVRAHSSPASLQLGAVSPGXLXPXGVVSGPAAXPXAQHLRQSSFEIPDDVPLPAGWEMAKXSSGQRYFLNHIDQXXXWQDPRKAMLSQMNVXAPXSPPVQQNMMNSASAMNQRISQSAPVKQPPPLAPQSPQGGVMGGSNSNQQQQMRLQQLQMEKERLRLKQQELLRQVRPQELALRSQLPXLEQDGGXQNPVSSPGMSQELRXMXXNSSDPFLNSGXYHSRDESXDSGLSMSSYSVPRXPDDFLNSVDEMDXGDXINQSXLPSQQNRFPDYLEAIPGXNVDLGXLEGDGMNIEGEELMPSLQEALSSDILNDMESVLAAXKLDKESFLXWL

SEQ ID NO: 29845 - protein, 470 aa, Homo sapiens
  MOD_RES (41)..(41): Selenocysteine
  MOD_RES (63)..(63): Selenocysteine
  MOD_RES (77)..(77): Selenocysteine
  MOD_RES (83)..(83): Selenocysteine
  MOD_RES (110)..(110): Selenocysteine
  MOD_RES (114)..(114): Selenocysteine
  MOD_RES (119)..(119): Selenocysteine
  MOD_RES (141)..(141): Selenocysteine
  MOD_RES (143)..(143): Selenocysteine
  MOD_RES (145)..(145): Selenocysteine
  MOD_RES (154)..(154): Selenocysteine
  MOD_RES (156)..(156): Selenocysteine
  MOD_RES (182)..(182): Selenocysteine
  MOD_RES (196)..(198): Selenocysteine
  MOD_RES (213)..(213): Selenocysteine
  MOD_RES (216)..(216): Selenocysteine
  MOD_RES (303)..(303): Selenocysteine
  MOD_RES (320)..(320): Selenocysteine
  MOD_RES (327)..(327): Selenocysteine
  MOD_RES (342)..(342): Selenocysteine
  MOD_RES (344)..(345): Selenocysteine
  MOD_RES (356)..(356): Selenocysteine
  MOD_RES (364)..(364): Selenocysteine
  MOD_RES (378)..(378): Selenocysteine
  MOD_RES (391)..(391): Selenocysteine
  MOD_RES (394)..(394): Selenocysteine
  MOD_RES (399)..(399): Selenocysteine
  MOD_RES (417)..(417): Selenocysteine
  MOD_RES (423)..(423): Selenocysteine
  MOD_RES (459)..(459): Selenocysteine
  MOD_RES (468)..(468): Selenocysteine
MDPGQQPPPQPAPQGQGQPPSQPPQGQGPPSGPGQPAPAAXQAAPQAPPAGHQIVHVRGDSEXDLEALFNAVMNPKXANVPQXVPMRLRKLPDSFFKPPEPKSHSRQASXDAGXAGALXPQHVRAHSSPASLQLGAVSPGXLXPXGVVSGPAAXPXAQHLRQSSFEIPDDVPLPAGWEMAKXSSGQRYFLNHIDQXXXWQDPRKAMLSQMNVXAPXSPPVQQNMMNSASAMNQRISQSAPVKQPPPLAPQSPQGGVMGGSNSNQQQQMRLQQLQMEKERLRLKQQELLRQVRPQAMRNINPSXANSPKCQELALRSQLPXLEQDGGXQNPVSSPGMSQELRXMXXNSSDPFLNSGXYHSRDESXDSGLSMSSYSVPRXPDDFLNSVDEMDXGDXINQSXLPSQQNRFPDYLEAIPGXNVDLGXLEGDGMNIEGEELMPSLQEALSSDILNDMESVLAAXKLDKESFLXWL

SEQ ID NO: 29846 - protein, 488 aa, Homo sapiens
  MOD_RES (41)..(41): Selenocysteine
  MOD_RES (63)..(63): Selenocysteine
  MOD_RES (77)..(77): Selenocysteine
  MOD_RES (83)..(83): Selenocysteine
  MOD_RES (110)..(110): Selenocysteine
  MOD_RES (114)..(114): Selenocysteine
  MOD_RES (119)..(119): Selenocysteine
  MOD_RES (141)..(141): Selenocysteine
  MOD_RES (143)..(143): Selenocysteine
  MOD_RES (145)..(145): Selenocysteine
  MOD_RES (154)..(154): Selenocysteine
  MOD_RES (156)..(156): Selenocysteine
  MOD_RES (182)..(182): Selenocysteine
  MOD_RES (196)..(198): Selenocysteine
  MOD_RES (213)..(213): Selenocysteine
  MOD_RES (216)..(216): Selenocysteine
  MOD_RES (241)..(241): Selenocysteine
  MOD_RES (255)..(256): Selenocysteine
  MOD_RES (338)..(338): Selenocysteine
  MOD_RES (345)..(345): Selenocysteine
  MOD_RES (360)..(360): Selenocysteine
  MOD_RES (362)..(363): Selenocysteine
  MOD_RES (374)..(374): Selenocysteine
  MOD_RES (382)..(382): Selenocysteine
  MOD_RES (396)..(396): Selenocysteine
  MOD_RES (409)..(409): Selenocysteine
  MOD_RES (412)..(412): Selenocysteine
  MOD_RES (417)..(417): Selenocysteine
  MOD_RES (435)..(435): Selenocysteine
  MOD_RES (441)..(441): Selenocysteine
  MOD_RES (477)..(477): Selenocysteine
  MOD_RES (486)..(486): Selenocysteine
MDPGQQPPPQPAPQGQGQPPSQPPQGQGPPSGPGQPAPAAXQAAPQAPPAGHQIVHVRGDSEXDLEALFNAVMNPKXANVPQXVPMRLRKLPDSFFKPPEPKSHSRQASXDAGXAGALXPQHVRAHSSPASLQLGAVSPGXLXPXGVVSGPAAXPXAQHLRQSSFEIPDDVPLPAGWEMAKXSSGQRYFLNHIDQXXXWQDPRKAMLSQMNVXAPXSPPVQQNMMNSASGPLPDGWEQAMXQDGEIYYINHKNKXXSWLDPRLDPRFAMNQRISQSAPVKQPPPLAPQSPQGGVMGGSNSNQQQQMRLQQLQMEKERLRLKQQELLRQELALRSQLPXLEQDGGXQNPVSSPGMSQELRXMXXNSSDPFLNSGXYHSRDESXDSGLSMSSYSVPRXPDDFLNSVDEMDXGDXINQSXLPSQQNRFPDYLEAIPGXNVDLGXLEGDGMNIEGEELMPSLQEALSSDILNDMESVLAAXKLDKESFLXWL

SEQ ID NO: 29847 - protein, 492 aa, Homo sapiens
  MOD_RES (41)..(41): Selenocysteine
  MOD_RES (63)..(63): Selenocysteine
  MOD_RES (77)..(77): Selenocysteine
  MOD_RES (83)..(83): Selenocysteine
  MOD_RES (110)..(110): Selenocysteine
  MOD_RES (114)..(114): Selenocysteine
  MOD_RES (119)..(119): Selenocysteine
  MOD_RES (141)..(141): Selenocysteine
  MOD_RES (143)..(143): Selenocysteine
  MOD_RES (145)..(145): Selenocysteine
  MOD_RES (154)..(154): Selenocysteine
  MOD_RES (156)..(156): Selenocysteine
  MOD_RES (182)..(182): Selenocysteine
  MOD_RES (196)..(198): Selenocysteine
  MOD_RES (213)..(213): Selenocysteine
  MOD_RES (216)..(216): Selenocysteine
  MOD_RES (241)..(241): Selenocysteine
  MOD_RES (255)..(256): Selenocysteine
  MOD_RES (342)..(342): Selenocysteine
  MOD_RES (349)..(349): Selenocysteine
  MOD_RES (364)..(364): Selenocysteine
  MOD_RES (366)..(367): Selenocysteine
  MOD_RES (378)..(378): Selenocysteine
  MOD_RES (386)..(386): Selenocysteine
  MOD_RES (400)..(400): Selenocysteine
  MOD_RES (413)..(413): Selenocysteine
  MOD_RES (416)..(416): Selenocysteine
  MOD_RES (421)..(421): Selenocysteine
  MOD_RES (439)..(439): Selenocysteine
  MOD_RES (445)..(445): Selenocysteine
  MOD_RES (481)..(481): Selenocysteine
  MOD_RES (490)..(490): Selenocysteine
MDPGQQPPPQPAPQGQGQPPSQPPQGQGPPSGPGQPAPAAXQAAPQAPPAGHQIVHVRGDSEXDLEALFNAVMNPKXANVPQXVPMRLRKLPDSFFKPPEPKSHSRQASXDAGXAGALXPQHVRAHSSPASLQLGAVSPGXLXPXGVVSGPAAXPXAQHLRQSSFEIPDDVPLPAGWEMAKXSSGQRYFLNHIDQXXXWQDPRKAMLSQMNVXAPXSPPVQQNMMNSASGPLPDGWEQAMXQDGEIYYINHKNKXXSWLDPRLDPRFAMNQRISQSAPVKQPPPLAPQSPQGGVMGGSNSNQQQQMRLQQLQMEKERLRLKQQELLRQVRPQELALRSQLPXLEQDGGXQNPVSSPGMSQELRXMXXNSSDPFLNSGXYHSRDESXDSGLSMSSYSVPRXPDDFLNSVDEMDXGDXINQSXLPSQQNRFPDYLEAIPGXNVDLGXLEGDGMNIEGEELMPSLQEALSSDILNDMESVLAAXKLDKESFLXWL

SEQ ID NO: 29848 - protein, 504 aa, Homo sapiens
  MOD_RES (41)..(41): Selenocysteine
  MOD_RES (63)..(63): Selenocysteine
  MOD_RES (77)..(77): Selenocysteine
  MOD_RES (83)..(83): Selenocysteine
  MOD_RES (110)..(110): Selenocysteine
  MOD_RES (114)..(114): Selenocysteine
  MOD_RES (119)..(119): Selenocysteine
  MOD_RES (141)..(141): Selenocysteine
  MOD_RES (143)..(143): Selenocysteine
  MOD_RES (145)..(145): Selenocysteine
  MOD_RES (154)..(154): Selenocysteine
  MOD_RES (156)..(156): Selenocysteine
  MOD_RES (182)..(182): Selenocysteine
  MOD_RES (196)..(198): Selenocysteine
  MOD_RES (213)..(213): Selenocysteine
  MOD_RES (216)..(216): Selenocysteine
  MOD_RES (241)..(241): Selenocysteine
  MOD_RES (255)..(256): Selenocysteine
  MOD_RES (337)..(337): Selenocysteine
  MOD_RES (354)..(354): Selenocysteine
  MOD_RES (361)..(361): Selenocysteine
  MOD_RES (376)..(376): Selenocysteine
  MOD_RES (378)..(379): Selenocysteine
  MOD_RES (390)..(390): Selenocysteine
  MOD_RES (398)..(398): Selenocysteine
  MOD_RES (412)..(412): Selenocysteine
  MOD_RES (425)..(425): Selenocysteine
  MOD_RES (428)..(428): Selenocysteine
  MOD_RES (433)..(433): Selenocysteine
  MOD_RES (451)..(451): Selenocysteine
  MOD_RES (457)..(457): Selenocysteine
  MOD_RES (493)..(493): Selenocysteine
  MOD_RES (502)..(502): Selenocysteine
MDPGQQPPPQPAPQGQGQPPSQPPQGQGPPSGPGQPAPAAXQAAPQAPPAGHQIVHVRGDSEXDLEALFNAVMNPKXANVPQXVPMRLRKLPDSFFKPPEPKSHSRQASXDAGXAGALXPQHVRAHSSPASLQLGAVSPGXLXPXGVVSGPAAXPXAQHLRQSSFEIPDDVPLPAGWEMAKXSSGQRYFLNHIDQXXXWQDPRKAMLSQMNVXAPXSPPVQQNMMNSASGPLPDGWEQAMXQDGEIYYINHKNKXXSWLDPRLDPRFAMNQRISQSAPVKQPPPLAPQSPQGGVMGGSNSNQQQQMRLQQLQMEKERLRLKQQELLRQAMRNINPSXANSPKCQELALRSQLPXLEQDGGXQNPVSSPGMSQELRXMXXNSSDPFLNSGXYHSRDESXDSGLSMSSYSVPRXPDDFLNSVDEMDXGDXINQSXLPSQQNRFPDYLEAIPGXNVDLGXLEGDGMNIEGEELMPSLQEALSSDILNDMESVLAAXKLDKESFLXWL

SEQ ID NO: 29849 - protein, 508 aa, Homo sapiens
  MOD_RES (41)..(41): Selenocysteine
  MOD_RES (63)..(63): Selenocysteine
  MOD_RES (77)..(77): Selenocysteine
  MOD_RES (83)..(83): Selenocysteine
  MOD_RES (110)..(110): Selenocysteine
  MOD_RES (114)..(114): Selenocysteine
  MOD_RES (119)..(119): Selenocysteine
  MOD_RES (141)..(141): Selenocysteine
  MOD_RES (143)..(143): Selenocysteine
  MOD_RES (145)..(145): Selenocysteine
  MOD_RES (154)..(154): Selenocysteine
  MOD_RES (156)..(156): Selenocysteine
  MOD_RES (182)..(182): Selenocysteine
  MOD_RES (196)..(198): Selenocysteine
  MOD_RES (213)..(213): Selenocysteine
  MOD_RES (216)..(216): Selenocysteine
  MOD_RES (241)..(241): Selenocysteine
  MOD_RES (255)..(256): Selenocysteine
  MOD_RES (341)..(341): Selenocysteine
  MOD_RES (358)..(358): Selenocysteine
  MOD_RES (365)..(365): Selenocysteine
  MOD_RES (380)..(380): Selenocysteine
  MOD_RES (382)..(383): Selenocysteine
  MOD_RES (394)..(394): Selenocysteine
  MOD_RES (402)..(402): Selenocysteine
  MOD_RES (416)..(416): Selenocysteine
  MOD_RES (429)..(429): Selenocysteine
  MOD_RES (432)..(432): Selenocysteine
  MOD_RES (437)..(437): Selenocysteine
  MOD_RES (455)..(455): Selenocysteine
  MOD_RES (461)..(461): Selenocysteine
  MOD_RES (497)..(497): Selenocysteine
  MOD_RES (506)..(506): Selenocysteine
MDPGQQPPPQPAPQGQGQPPSQPPQGQGPPSGPGQPAPAAXQAAPQAPPAGHQIVHVRGDSEXDLEALFNAVMNPKXANVPQXVPMRLRKLPDSFFKPPEPKSHSRQASXDAGXAGALXPQHVRAHSSPASLQLGAVSPGXLXPXGVVSGPAAXPXAQHLRQSSFEIPDDVPLPAGWEMAKXSSGQRYFLNHIDQXXXWQDPRKAMLSQMNVXAPXSPPVQQNMMNSASGPLPDGWEQAMXQDGEIYYINHKNKXXSWLDPRLDPRFAMNQRISQSAPVKQPPPLAPQSPQGGVMGGSNSNQQQQMRLQQLQMEKERLRLKQQELLRQVRPQAMRNINPSXANSPKCQELALRSQLPXLEQDGGXQNPVSSPGMSQELRXMXXNSSDPFLNSGXYHSRDESXDSGLSMSSYSVPRXPDDFLNSVDEMDXGDXINQSXLPSQQNRFPDYLEAIPGXNVDLGXLEGDGMNIEGEELMPSLQEALSSDILNDMESVLAAXKLDKESFLXWL

SEQ ID NO: 29850 - protein, 258 aa, Homo sapiens
  MOD_RES (1)..(1): Any amino acid
  MOD_RES (5)..(6): Selenocysteine
  MOD_RES (91)..(91): Selenocysteine
  MOD_RES (108)..(108): Selenocysteine
  MOD_RES (115)..(115): Selenocysteine
  MOD_RES (130)..(130): Selenocysteine
  MOD_RES (132)..(133): Selenocysteine
  MOD_RES (144)..(144): Selenocysteine
  MOD_RES (152)..(152): Selenocysteine
  MOD_RES (166)..(166): Selenocysteine
  MOD_RES (179)..(179): Selenocysteine
  MOD_RES (182)..(182): Selenocysteine
  MOD_RES (187)..(187): Selenocysteine
  MOD_RES (205)..(205): Selenocysteine
  MOD_RES (211)..(211): Selenocysteine
  MOD_RES (247)..(247): Selenocysteine
  MOD_RES (256)..(256): Selenocysteine
XKNKXXSWLDPRLDPRFAMNQRISQSAPVKQPPPLAPQSPQGGVMGGSNSNQQQQMRLQQLQMEKERLRLKQQELLRQVRPQAMRNINPSXANSPKCQELALRSQLPXLEQDGGXQNPVSSPGMSQELRXMXXNSSDPFLNSGXYHSRDESXDSGLSMSSYSVPRXPDDFLNSVDEMDXGDXINQSXLPSQQNRFPDYLEAIPGXNVDLGXLEGDGMNIEGEELMPSLQEALSSDILNDMESVLAAXKLDKESFLXWL

SEQ ID NO: 29851 - protein, 388 aa, Homo sapiens
  MOD_RES (15)..(15): Selenocysteine
  MOD_RES (42)..(42): Selenocysteine
  MOD_RES (44)..(45): Selenocysteine
  MOD_RES (70)..(70): Selenocysteine
  MOD_RES (121)..(121): Selenocysteine
  MOD_RES (130)..(130): Selenocysteine
  MOD_RES (141)..(141): Selenocysteine
  MOD_RES (193)..(193): Selenocysteine
  MOD_RES (219)..(219): Selenocysteine
  MOD_RES (288)..(288): Selenocysteine
  MOD_RES (290)..(290): Selenocysteine
  MOD_RES (330)..(330): Selenocysteine
  MOD_RES (381)..(381): Selenocysteine
  MOD_RES (385)..(385): Selenocysteine
MGDAPSPEEKLHLIXRNLQEVLGEEKLKEILKERELKIYWGXAXXGKPHVAYFVPMSKIADFLKAGCEVXILFADLHAYLDNMKAPWELLELRVSYYENVIKAMLESIGVPLEKLKFIKGXDYQLSKEYXLDVYRLSSVVXQHDSKKAGAEVVKQVEHPLLSGLLYPGLQALDEEYLKVDAQFGGIDQRKIFXFAEKYLPALGYSKRVHLMNPMVPGLXGSKMSSSEEESKIDLLDRKEDVKKKLKKAFCEPGNVENNGVLSFIKHVLFPLKSEFVILRDEKWGGNKXYXAYVDLEKDFAAEVVHPGDLKNSVEVALNKLLDPIREKFNXPALKKLASAAYPDPSKQKPMAKGLPRIQNQRRSSHPGWISVWGKSSLWRSXQMQXACM

SEQ ID NO: 29852 - protein, 528 aa, Homo sapiens
  MOD_RES (15)..(15): Selenocysteine
  MOD_RES (42)..(42): Selenocysteine
  MOD_RES (44)..(45): Selenocysteine
  MOD_RES (70)..(70): Selenocysteine
  MOD_RES (121)..(121): Selenocysteine
  MOD_RES (130)..(130): Selenocysteine
  MOD_RES (141)..(141): Selenocysteine
  MOD_RES (193)..(193): Selenocysteine
  MOD_RES (219)..(219): Selenocysteine
  MOD_RES (288)..(288): Selenocysteine
  MOD_RES (290)..(290): Selenocysteine
  MOD_RES (330)..(330): Selenocysteine
  MOD_RES (377)..(377): Selenocysteine
  MOD_RES (401)..(401): Selenocysteine
  MOD_RES (508)..(508): Selenocysteine
  MOD_RES (512)..(512): Selenocysteine
MGDAPSPEEKLHLIXRNLQEVLGEEKLKEILKERELKIYWGXAXXGKPHVAYFVPMSKIADFLKAGCEVXILFADLHAYLDNMKAPWELLELRVSYYENVIKAMLESIGVPLEKLKFIKGXDYQLSKEYXLDVYRLSSVVXQHDSKKAGAEVVKQVEHPLLSGLLYPGLQALDEEYLKVDAQFGGIDQRKIFXFAEKYLPALGYSKRVHLMNPMVPGLXGSKMSSSEEESKIDLLDRKEDVKKKLKKAFCEPGNVENNGVLSFIKHVLFPLKSEFVILRDEKWGGNKXYXAYVDLEKDFAAEVVHPGDLKNSVEVALNKLLDPIREKFNXPALKKLASAAYPDPSKQKPMAKGPAKNSEPEEVIPSRLDIRVGKIIXVEKHPDADSLYVEKIDVGEAEPRXVVSGLVQFVPKEELQDRLVVVLCNLKPQKMRGVESQGMLLCASIEGINRQVEPLDPPAGSAPGEHVFVKGYEKGQPDEELKPKKKVFEKLQADFKISEECIAQWKQXNFMXKLGSISCKSLKGGNIS

SEQ ID NO: 29853 - protein, 216 aa, Homo sapiens
  MOD_RES (7)..(7): Selenocysteine
  MOD_RES (25)..(25): Selenocysteine
  MOD_RES (29)..(30): Selenocysteine
  MOD_RES (43)..(43): Selenocysteine
  MOD_RES (57)..(57): Selenocysteine
  MOD_RES (62)..(62): Selenocysteine
  MOD_RES (80)..(80): Selenocysteine
  MOD_RES (96)..(96): Selenocysteine
MSSEAEXQQPPAAPPAAPALSAADXKPGXXGSGAGSGGPGGLXSAAPAGGDKKVIAXKVLGXVKWFNVRNGYGFINRNDXKEDVFVHQGAEAANVXGPGGVPVQGSKYAADRNHYRRYPRRRGPPRNYQQNYQNSESGEKNEGSESAPEGQAQQRRPYRRRRFPPYYMRRPYGRRPQYSNPPVQGEVMEGADNQGAGEQGRPVRQNMYRGYRPRFR

SEQ ID NO: 29854 - protein, 324 aa, Homo sapiens
  MOD_RES (7)..(7): Selenocysteine
  MOD_RES (25)..(25): Selenocysteine
  MOD_RES (29)..(30): Selenocysteine
  MOD_RES (43)..(43): Selenocysteine
  MOD_RES (57)..(57): Selenocysteine
  MOD_RES (62)..(62): Selenocysteine
  MOD_RES (80)..(80): Selenocysteine
  MOD_RES (89)..(89): Selenocysteine
  MOD_RES (108)..(108): Selenocysteine
  MOD_RES (126)..(126): Selenocysteine
  MOD_RES (271)..(271): Selenocysteine
  MOD_RES (303)..(303): Selenocysteine
MSSEAEXQQPPAAPPAAPALSAADXKPGXXGSGAGSGGPGGLXSAAPAGGDKKVIAXKVLGXVKWFNVRNGYGFINRNDXKEDVFVHQXAIKKNNPRKYLRSVGDGEXVEFDVVEGEKGAEAANVXGPGGVPVQGSKYAADRNHYRRYPRRRGPPRNYQQNYQNSESGEKNEGSESAPEGQAQQRRPYRRRRFPPYYMRRPYGRRPQYSNPPVQGEVMEGADNQGAGEQGRPVRQNMYRGYRPRFRRGPPRQRQPREDGNEEDKENQGDEXQGQQPPQRRYRRNFNYRRRRPENPKPQDGKEXKAADPPAENSSAPEAEQGGAE

SEQ ID NO: 29855 - protein, 374 aa, Homo sapiens
  MOD_RES (1)..(1): Any amino acid
  MOD_RES (62)..(62): Selenocysteine
  MOD_RES (83)..(83): Selenocysteine
  MOD_RES (90)..(90): Selenocysteine
  MOD_RES (95)..(95): Selenocysteine
  MOD_RES (114)..(114): Selenocysteine
  MOD_RES (130)..(130): Selenocysteine
  MOD_RES (139)..(139): Selenocysteine
  MOD_RES (158)..(158): Selenocysteine
  MOD_RES (176)..(176): Selenocysteine
  MOD_RES (321)..(321): Selenocysteine
  MOD_RES (353)..(353): Selenocysteine
XRVRRGPLPADRPRALGPARRCSRHPHPAPFRVCSEGAAHRLRRPERLPLPSRALRPRPAHXPILGPAPRACPGAPRASDSPXCAAAAAXAWPRXRAVERKGCQVAAAAGVRGXGCPSRADLEKDSWNDXKEDVFVHQXAIKKNNPRKYLRSVGDGEXVEFDVVEGEKGAEAANVXGPGGVPVQGSKYAADRNHYRRYPRRRGPPRNYQQNYQNSESGEKNEGSESAPEGQAQQRRPYRRRRFPPYYMRRPYGRRPQYSNPPVQGEVMEGADNQGAGEQGRPVRQNMYRGYRPRFRRGPPRQRQPREDGNEEDKENQGDEXQGQQPPQRRYRRNFNYRRRRPENPKPQDGKEXKAADPPAENSSAPEAEQGGAE

SEQ ID NO: 29856 - protein, 364 aa, Homo sapiens
  MOD_RES (11)..(11): Selenocysteine
  MOD_RES (17)..(17): Selenocysteine
  MOD_RES (21)..(21): Selenocysteine
  MOD_RES (57)..(57): Selenocysteine
  MOD_RES (65)..(65): Selenocysteine
  MOD_RES (71)..(71): Selenocysteine
  MOD_RES (76)..(76): Selenocysteine
  MOD_RES (97)..(97): Selenocysteine
  MOD_RES (115)..(115): Selenocysteine
  MOD_RES (124)..(124): Selenocysteine
  MOD_RES (143)..(143): Selenocysteine
  MOD_RES (158)..(158): Selenocysteine
  MOD_RES (161)..(161): Selenocysteine
  MOD_RES (204)..(204): Selenocysteine
  MOD_RES (250)..(250): Selenocysteine
  MOD_RES (258)..(258): Selenocysteine
  MOD_RES (294)..(295): Selenocysteine
  MOD_RES (302)..(302): Selenocysteine
  MOD_RES (349)..(349): Selenocysteine
  MOD_RES (359)..(361): Selenocysteine
MSEVEAAAGAXAVPAAXVPAXAAGVVAVVVPVPAGEPQKGGGAGGGGGAASGPAAGXPSAPGSRXPGNPAXAVSGXPAPPARSQADKPVLAIQVLGXVKWFNVRNGYGFINRNDXKEDVFVHQXAIKRNNPRKFLRSVGDGEXVEFDVVEGEKGAEAXNVXGPGGVPVKGSRYAPNRRKSRRFIPRPPSVAPPPMVAEIPSAGXGPGSKGERAEDSGQRPRRWCPPPFFYRRRFVRGPRPPNQQQPIEGXDRVEPKEXAPLEGHQQQGDERVPPPRFRPRYRRPFRPRPRQQPXXEGGDGEXKPSQGPADGSRPEPQRPRNRPYFQRRRQQAPGPQQAPGPRQPAAPEXSAPVNSGDPXXXILE

SEQ ID NO: 29857 - protein, 164 aa, Homo sapiens
  MOD_RES (1)..(1): Any amino acid
  MOD_RES (4)..(4): Selenocysteine
  MOD_RES (50)..(50): Selenocysteine
  MOD_RES (58)..(58): Selenocysteine
  MOD_RES (94)..(95): Selenocysteine
  MOD_RES (102)..(102): Selenocysteine
  MOD_RES (149)..(149): Selenocysteine
  MOD_RES (159)..(161): Selenocysteine
XAGXGPGSKGERAEDSGQRPRRWCPPPFFYRRRFVRGPRPPNQQQPIEGXDRVEPKEXAPLEGHQQQGDERVPPPRFRPRYRRPFRPRPRQQPXXEGGDGEXKPSQGPADGSRPEPQRPRNRPYFQRRRQQAPGPQQAPGPRQPAAPEXSAPVNSGDPXXXILE

SEQ ID NO: 29858 - protein, 303 aa, Homo sapiens
  MOD_RES (8)..(14): Selenocysteine
  MOD_RES (20)..(20): Selenocysteine
  MOD_RES (65)..(65): Selenocysteine
  MOD_RES (67)..(67): Selenocysteine
  MOD_RES (75)..(75): Selenocysteine
  MOD_RES (89)..(89): Selenocysteine
  MOD_RES (94)..(94): Selenocysteine
  MOD_RES (112)..(112): Selenocysteine
  MOD_RES (121)..(121): Selenocysteine
  MOD_RES (140)..(140): Selenocysteine
  MOD_RES (158)..(158): Selenocysteine
  MOD_RES (217)..(217): Selenocysteine
  MOD_RES (248)..(248): Selenocysteine
  MOD_RES (290)..(290): Selenocysteine
  MOD_RES (297)..(297): Selenocysteine
MSEAGEAXXXXXXXLPQAPXEAAAAAPQDPAPKSPVGSGAPQAAAPAPAAHVAGNPGGDAAPAAXGXAAAASLAXAAGSEDAEKKVLAXKVLGXVKWFNVRNGYGFINRNDXKEDVFVHQXAIKKNNPRKYLRSVGDGEXVEFDVVEGEKGAEAANVXGPDGVPVEGSRYAADRRRYRRGYYGRRRGPPRNAGEIGEMKDGVPEGAQLQGPVHRNPXYRPRYRSRGPPRPRPAPAVGEAEDKENQQAXSGPNQPSVRRGYRRPYNYRRRPRPPNAPSQDGKEAKAGEAPXENPAPPXQQSSAE

SEQ ID NO: 29859 - protein, 372 aa, Homo sapiens
  MOD_RES (8)..(14): Selenocysteine
  MOD_RES (20)..(20): Selenocysteine
  MOD_RES (65)..(65): Selenocysteine
  MOD_RES (67)..(67): Selenocysteine
  MOD_RES (75)..(75): Selenocysteine
  MOD_RES (89)..(89): Selenocysteine
  MOD_RES (94)..(94): Selenocysteine
  MOD_RES (112)..(112): Selenocysteine
  MOD_RES (121)..(121): Selenocysteine
  MOD_RES (140)..(140): Selenocysteine
  MOD_RES (158)..(158): Selenocysteine
  MOD_RES (212)..(212): Selenocysteine
  MOD_RES (245)..(245): Selenocysteine
  MOD_RES (286)..(286): Selenocysteine
  MOD_RES (317)..(317): Selenocysteine
  MOD_RES (359)..(359): Selenocysteine
  MOD_RES (366)..(366): Selenocysteine
MSEAGEAXXXXXXXLPQAPXEAAAAAPQDPAPKSPVGSGAPQAAAPAPAAHVAGNPGGDAAPAAXGXAAAASLAXAAGSEDAEKKVLAXKVLGXVKWFNVRNGYGFINRNDXKEDVFVHQXAIKKNNPRKYLRSVGDGEXVEFDVVEGEKGAEAANVXGPDGVPVEGSRYAADRRRYRRGYYGRRRGPPRNYAGEEEEEGSGSSEGFDPPAXDRQFSGARNQLRRPQYRPQYRQRRFPPYHVGQXFDRRSRVLPHPNRIQAGEIGEMKDGVPEGAQLQGPVHRNPXYRPRYRSRGPPRPRPAPAVGEAEDKENQQAXSGPNQPSVRRGYRRPYNYRRRPRPPNAPSQDGKEAKAGEAPXENPAPPXQQSSAE

SEQ ID NO: 29860 - protein, 92 aa, Homo sapiens
  MOD_RES (1)..(1): Any amino acid
  MOD_RES (4)..(4): Selenocysteine
  MOD_RES (13)..(13): Selenocysteine
  MOD_RES (32)..(32): Selenocysteine
  MOD_RES (50)..(50): Selenocysteine
XNDXKEDVFVHQXAIKKNNPRKYLRSVGDGEXVEFDVVEGEKGAEAANVXGPDGVPVEGSRYAADRRRYRRGYYGRRRGPPRNISDVWFNRR

SEQ ID NO: 29861 - protein, 211 aa, Homo sapiens
  MOD_RES (20)..(20): Selenocysteine
  MOD_RES (44)..(44): Selenocysteine
  MOD_RES (48)..(48): Selenocysteine
  MOD_RES (91)..(91): Selenocysteine
  MOD_RES (123)..(123): Selenocysteine
  MOD_RES (130)..(130): Selenocysteine
  MOD_RES (132)..(132): Selenocysteine
  MOD_RES (154)..(154): Selenocysteine
  MOD_RES (166)..(166): Selenocysteine
  MOD_RES (174)..(174): Selenocysteine
  MOD_RES (189)..(189): Selenocysteine
  MOD_RES (197)..(198): Selenocysteine
  MOD_RES (203)..(203): Selenocysteine
  MOD_RES (211)..(211): Selenocysteine
MFKRMAEFGPDSGGRVKGVXIVKPIVYGNVARYFGKKREEDGHXHQWXVYVKPYRNEAKWLIPVISALWEAQAGGSLEPRSLRPDWQHSKXPSLQKKKDMSAYVKKIQFKLHESYGNPLRVVXKPPYEIXEXGWGEFEIIIKIFFIDPNERPVXLYHLLKLFQSDXNAMLGKKXVVSEFYDEMIFQDPXAMMQQLLXXSRQLXLGAYKHEX

SEQ ID NO: 29862 - protein, 227 aa, Homo sapiens
  MOD_RES (20)..(20): Selenocysteine
  MOD_RES (44)..(44): Selenocysteine
  MOD_RES (48)..(48): Selenocysteine
  MOD_RES (82)..(82): Selenocysteine
  MOD_RES (89)..(89): Selenocysteine
  MOD_RES (91)..(91): Selenocysteine
  MOD_RES (113)..(113): Selenocysteine
  MOD_RES (125)..(125): Selenocysteine
  MOD_RES (133)..(133): Selenocysteine
  MOD_RES (148)..(148): Selenocysteine
  MOD_RES (156)..(157): Selenocysteine
  MOD_RES (162)..(162): Selenocysteine
  MOD_RES (170)..(170): Selenocysteine
  MOD_RES (179)..(179): Selenocysteine
  MOD_RES (190)..(190): Selenocysteine
  MOD_RES (207)..(207): Selenocysteine
MFKRMAEFGPDSGGRVKGVXIVKPIVYGNVARYFGKKREEDGHXHQWXVYVKPYRNEDMSAYVKKIQFKLHESYGNPLRVVXKPPYEIXEXGWGEFEIIIKIFFIDPNERPVXLYHLLKLFQSDXNAMLGKKXVVSEFYDEMIFQDPXAMMQQLLXXSRQLXLGAYKHEXEFAELEVKXREKLEAAKKKXSFEIAELKERLKASREXINCLKNEIRKLEEDDQAKDI

SEQ ID NO: 29863 - protein, 173 aa, Homo sapiens
  MOD_RES (20)..(20): Selenocysteine
  MOD_RES (44)..(44): Selenocysteine
  MOD_RES (48)..(48): Selenocysteine
  MOD_RES (59)..(59): Selenocysteine
  MOD_RES (71)..(71): Selenocysteine
  MOD_RES (79)..(79): Selenocysteine
  MOD_RES (94)..(94): Selenocysteine
  MOD_RES (102)..(103): Selenocysteine
  MOD_RES (108)..(108): Selenocysteine
  MOD_RES (116)..(116): Selenocysteine
  MOD_RES (125)..(125): Selenocysteine
  MOD_RES (136)..(136): Selenocysteine
  MOD_RES (153)..(153): Selenocysteine
MFKRMAEFGPDSGGRVKGVXIVKPIVYGNVARYFGKKREEDGHXHQWXVYVKPYRNEVXLYHLLKLFQSDXNAMLGKKXVVSEFYDEMIFQDPXAMMQQLLXXSRQLXLGAYKHEXEFAELEVKXREKLEAAKKKXSFEIAELKERLKASREXINCLKNEIRKLEEDDQAKDI

SEQ ID NO: 29864 - protein, 113 aa, Homo sapiens
  MOD_RES (24)..(24): Selenocysteine
  MOD_RES (31)..(31): Selenocysteine
  MOD_RES (33)..(33): Selenocysteine
  MOD_RES (55)..(55): Selenocysteine
  MOD_RES (67)..(67): Selenocysteine
  MOD_RES (75)..(75): Selenocysteine
  MOD_RES (90)..(90): Selenocysteine
  MOD_RES (98)..(99): Selenocysteine
  MOD_RES (104)..(104): Selenocysteine
  MOD_RES (112)..(112): Selenocysteine
MSAYVKKIQFKLHESYGNPLRVVXKPPYEIXEXGWGEFEIIIKIFFIDPNERPVXLYHLLKLFQSDXNAMLGKKXVVSEFYDEMIFQDPXAMMQQLLXXSRQLXLGAYKHEXE

SEQ ID NO: 29865 - protein, 543 aa, Homo sapiens
  MOD_RES (21)..(21): Selenocysteine
  MOD_RES (27)..(27): Selenocysteine
  MOD_RES (37)..(38): Selenocysteine
  MOD_RES (50)..(50): Selenocysteine
  MOD_RES (60)..(60): Selenocysteine
  MOD_RES (69)..(69): Selenocysteine
  MOD_RES (90)..(90): Selenocysteine
  MOD_RES (94)..(94): Selenocysteine
  MOD_RES (106)..(107): Selenocysteine
  MOD_RES (124)..(124): Selenocysteine
  MOD_RES (136)..(136): Selenocysteine
  MOD_RES (189)..(190): Selenocysteine
  MOD_RES (225)..(226): Selenocysteine
  MOD_RES (232)..(232): Selenocysteine
  MOD_RES (241)..(241): Selenocysteine
  MOD_RES (252)..(253): Selenocysteine
  MOD_RES (257)..(257): Selenocysteine
  MOD_RES (262)..(262): Selenocysteine
  MOD_RES (295)..(295): Selenocysteine
  MOD_RES (299)..(300): Selenocysteine
  MOD_RES (306)..(306): Selenocysteine
  MOD_RES (311)..(311): Selenocysteine
  MOD_RES (348)..(348): Selenocysteine
  MOD_RES (427)..(427): Selenocysteine
  MOD_RES (439)..(439): Selenocysteine
  MOD_RES (450)..(450): Selenocysteine
  MOD_RES (463)..(463): Selenocysteine
  MOD_RES (467)..(467): Selenocysteine
  MOD_RES (518)..(518): Selenocysteine
  MOD_RES (531)..(531): Selenocysteine
  MOD_RES (533)..(533): Selenocysteine
MGCIKSKENKSPAIKYRPENXPEPVSXSVSHYGAEPXXVSPCPSSSAKGXAVNFSSLSMXPFGGSSGVXPFGGASSSFSVVPSSYPAGLXGGVXIFVALYDYEARXXEDLSFKKGERFQIINNXEGDWWEARSIAXGKNGYIPSNYVAPADSIQAEEWYFGKMGRKDAERLLLNPGNQRGIFLVRESEXXKGAYSLSIRDWDEIRGDNVKHYKIRKLDNGGYYIXXRAQFDXLQKLVKHYXEHADGLCHKLXXVCPXVKPQXQGLAKDAWEIPRESLRLEVKLGQGCFGEVWMGXWNGXXKVAIKXLKPGXMMPEAFLQEAQIMKKLRHDKLVPLYAVVSEEPIYIVXEFMSKGSLLDFLKEGDGKYLKLPQLVDMAAQIADGMAYIERMNYIHRDLRAANILVGENLVCKIADFGLARLIEDNEYXARQGAKFPIKWXAPEAALYGRFXIKSDVWSFGILQXELVXKGRVPYPGMVNREVLEQVERGYRMPCPQGCPESLHELMNLCWKKDPDERPXFEYIQSFLEDYFXAXEPQYQPGENL

SEQ ID NO: 29866 - protein, 548 aa, Homo sapiens
  MOD_RES (26)..(26): Selenocysteine
  MOD_RES (32)..(32): Selenocysteine
  MOD_RES (42)..(43): Selenocysteine
  MOD_RES (55)..(55): Selenocysteine
  MOD_RES (65)..(65): Selenocysteine
  MOD_RES (74)..(74): Selenocysteine
  MOD_RES (95)..(95): Selenocysteine
  MOD_RES (99)..(99): Selenocysteine
  MOD_RES (111)..(112): Selenocysteine
  MOD_RES (129)..(129): Selenocysteine
  MOD_RES (141)..(141): Selenocysteine
  MOD_RES (194)..(195): Selenocysteine
  MOD_RES (230)..(231): Selenocysteine
  MOD_RES (237)..(237): Selenocysteine
  MOD_RES (246)..(246): Selenocysteine
  MOD_RES (257)..(258): Selenocysteine
  MOD_RES (262)..(262): Selenocysteine
  MOD_RES (267)..(267): Selenocysteine
  MOD_RES (300)..(300): Selenocysteine
  MOD_RES (304)..(305): Selenocysteine
  MOD_RES (311)..(311): Selenocysteine
  MOD_RES (316)..(316): Selenocysteine
  MOD_RES (353)..(353): Selenocysteine
  MOD_RES (432)..(432): Selenocysteine
  MOD_RES (444)..(444): Selenocysteine
  MOD_RES (455)..(455): Selenocysteine
  MOD_RES (468)..(468): Selenocysteine
  MOD_RES (472)..(472): Selenocysteine
  MOD_RES (523)..(523): Selenocysteine
  MOD_RES (536)..(536): Selenocysteine
  MOD_RES (538)..(538): Selenocysteine
MLDLIMGCIKSKENKSPAIKYRPENXPEPVSXSVSHYGAEPXXVSPCPSSSAKGXAVNFSSLSMXPFGGSSGVXPFGGASSSFSVVPSSYPAGLXGGVXIFVALYDYEARXXEDLSFKKGERFQIINNXEGDWWEARSIAXGKNGYIPSNYVAPADSIQAEEWYFGKMGRKDAERLLLNPGNQRGIFLVRESEXXKGAYSLSIRDWDEIRGDNVKHYKIRKLDNGGYYIXXRAQFDXLQKLVKHYXEHADGLCHKLXXVCPXVKPQXQGLAKDAWEIPRESLRLEVKLGQGCFGEVWMGXWNGXXKVAIKXLKPGXMMPEAFLQEAQIMKKLRHDKLVPLYAVVSEEPIYIVXEFMSKGSLLDFLKEGDGKYLKLPQLVDMAAQIADGMAYIERMNYIHRDLRAANILVGENLVCKIADFGLARLIEDNEYXARQGAKFPIKWXAPEAALYGRFXIKSDVWSFGILQXELVXKGRVPYPGMVNREVLEQVERGYRMPCPQGCPESLHELMNLCWKKDPDERPXFEYIQSFLEDYFXAXEPQYQPGENL

SEQ ID NO: 29867 - protein, 74 aa, Homo sapiens
  MOD_RES (2)..(2): Selenocysteine
  MOD_RES (32)..(32): Selenocysteine
  MOD_RES (71)..(71): Selenocysteine
MXMDKSELVQKAKLAEQAERYDDMAAAMKAVXEQGHELSNEERNLLSVAYKNVVGARRSSWRVISSIEQKXERN

SEQ ID NO: 29868 - protein, 100 aa, Homo sapiens
  MOD_RES (2)..(2): Selenocysteine
  MOD_RES (32)..(32): Selenocysteine
  MOD_RES (71)..(71): Selenocysteine
MXMDKSELVQKAKLAEQAERYDDMAAAMKAVXEQGHELSNEERNLLSVAYKNVVGARRSSWRVISSIEQKXERNEKKQQMGKEYREKIEAELQDICNDVL

SEQ ID NO: 29869 - protein, 246 aa, Homo sapiens
  MOD_RES (2)..(2): Selenocysteine
  MOD_RES (32)..(32): Selenocysteine
  MOD_RES (71)..(71): Selenocysteine
  MOD_RES (112)..(112): Selenocysteine
  MOD_RES (142)..(143): Selenocysteine
  MOD_RES (165)..(165): Selenocysteine
  MOD_RES (196)..(196): Selenocysteine
  MOD_RES (207)..(207): Selenocysteine
  MOD_RES (217)..(217): Selenocysteine
  MOD_RES (228)..(228): Selenocysteine
  MOD_RES (231)..(231): Selenocysteine
MXMDKSELVQKAKLAEQAERYDDMAAAMKAVXEQGHELSNEERNLLSVAYKNVVGARRSSWRVISSIEQKXERNEKKQQMGKEYREKIEAELQDICNDVLELLDKYLIPNAXQPESKVFYLKMKGDYFRYLSEVASGDNKQXXVSNSQQAYQEAFEISKKEMQPXHPIRLGLALNFSVFYYEILNSPEKACSLAKXAFDEAIAELDXLNEESYKDSXLIMQLLRDNLXLWXSENQGDEGDAGEGEN

SEQ ID NO: 29870 - protein, 149 aa, Homo sapiens
  MOD_RES (2)..(2): Selenocysteine
  MOD_RES (32)..(32): Selenocysteine
  MOD_RES (71)..(71): Selenocysteine
  MOD_RES (109)..(110): Selenocysteine
  MOD_RES (122)..(122): Selenocysteine
  MOD_RES (133)..(133): Selenocysteine
  MOD_RES (149)..(149): Selenocysteine
MXMDKSELVQKAKLAEQAERYDDMAAAMKAVXEQGHELSNEERNLLSVAYKNVVGARRSSWRVISSIEQKXERNEKKQQMGKEYREKIEAELQDICNDVLFFRMPHSKXXLRKYCSVYEAWXPSELLLLSCWXNILFPMLHNQKVRCSX

SEQ ID NO: 29871 - protein, 81 aa, Homo sapiens
  MOD_RES (1)..(1): Any amino acid
  MOD_RES (7)..(7): Selenocysteine
  MOD_RES (46)..(46): Selenocysteine
XAMKAVXEQGHELSNEERNLLSVAYKNVVGARRSSWRVISSIEQKXERNEKKQQMGKEYREKIEAELQDICNDVLVHLVFR

SEQ ID NO: 29872 - protein, 115 aa, Homo sapiens
  MOD_RES (12)..(12): Selenocysteine
  MOD_RES (36)..(36): Selenocysteine
  MOD_RES (41)..(41): Selenocysteine
  MOD_RES (83)..(83): Selenocysteine
  MOD_RES (93)..(93): Selenocysteine
  MOD_RES (104)..(104): Selenocysteine
  MOD_RES (107)..(107): Selenocysteine
GDYHRYLAEFAXGNDRKEAAENSLVAYKAASDIAMXELPPXHPIRLGLALNFSVFYYEILNSPDRACRLAKAAFDDAIAELDXLSEESYKDSXLIMQLLRDNLXLWXSDMQGDDS

SEQ ID NO: 29873 - protein, 255 aa, Homo sapiens
  MOD_RES (38)..(38): Selenocysteine
  MOD_RES (91)..(91): Selenocysteine
  MOD_RES (114)..(114): Selenocysteine
  MOD_RES (137)..(137): Selenocysteine
  MOD_RES (161)..(161): Selenocysteine
  MOD_RES (166)..(166): Selenocysteine
  MOD_RES (208)..(208): Selenocysteine
  MOD_RES (218)..(218): Selenocysteine
  MOD_RES (229)..(229): Selenocysteine
  MOD_RES (232)..(232): Selenocysteine
MDDREDLVYQAKLAEQAERYDEMVESMKKVAGMDVELXVEERNLLSVAYKNVIGARRASWRIISSIEQKEENKGGEDKLKMIREYRQMVEXELKLICCDILDVLDKHLIPAANXGESKVFYYKMKGDYHRYLAEFAXGNDRKEAAENSLVAYKAASDIAMXELPPXHPIRLGLALNFSVFYYEILNSPDRACRLAKAAFDDAIAELDXLSEESYKDSXLIMQLLRDNLXLWXSDMQGDGEEQNKEALQDVEDENQ

SEQ ID NO: 29874 - protein, 94 aa, Homo sapiens
  MOD_RES (38)..(38): Selenocysteine
MDDREDLVYQAKLAEQAERYDEMVESMKKVAGMDVELXVEERNLLSVAYKNVIGARRASWRIISSIEQKEENKGGEDKLKMIREYRQMVGKSSF

SEQ ID NO: 29875 - protein, 107 aa, Homo sapiens
  MOD_RES (38)..(38): Selenocysteine
  MOD_RES (99)..(99): Selenocysteine
  MOD_RES (102)..(102): Selenocysteine
  MOD_RES (107)..(107): Selenocysteine
MDDREDLVYQAKLAEQAERYDEMVESMKKVAGMDVELXVEERNLLSVAYKNVIGARRASWRIISSIEQKEENKGGEDKLKMIREYRQMVKSRIKKRCRXWKXKISEX

SEQ ID NO: 29876 - protein, 38 aa, Homo sapiens
MDDREDLVYQAKLAEQAERYDGEEQNKEALQDVEDENQ

SEQ ID NO: 29877 - protein, 233 aa, Homo sapiens
  MOD_RES (16)..(16): Selenocysteine
  MOD_RES (69)..(69): Selenocysteine
  MOD_RES (92)..(92): Selenocysteine
  MOD_RES (115)..(115): Selenocysteine
  MOD_RES (139)..(139): Selenocysteine
  MOD_RES (144)..(144): Selenocysteine
  MOD_RES (186)..(186): Selenocysteine
  MOD_RES (196)..(196): Selenocysteine
  MOD_RES (207)..(207): Selenocysteine
  MOD_RES (210)..(210): Selenocysteine
MVESMKKVAGMDVELXVEERNLLSVAYKNVIGARRASWRIISSIEQKEENKGGEDKLKMIREYRQMVEXELKLICCDILDVLDKHLIPAANXGESKVFYYKMKGDYHRYLAEFAXGNDRKEAAENSLVAYKAASDIAMXELPPXHPIRLGLALNFSVFYYEILNSPDRACRLAKAAFDDAIAELDXLSEESYKDSXLIMQLLRDNLXLWXSDMQGDGEEQNKEALQDVEDENQ

SEQ ID NO: 29878 - protein, 109 aa, Homo sapiens
  MOD_RES (1)..(1): Any amino acid
  MOD_RES (17)..(17): Selenocysteine
  MOD_RES (70)..(70): Selenocysteine
  MOD_RES (93)..(93): Selenocysteine
XMVESMKKVAGMDVELXVEERNLLSVAYKNVIGARRASWRIISSIEQKEENKGGEDKLKMIREYRQMVEXELKLICCDILDVLDKHLIPAANXGWQKQLLMMQLQNWIR

SEQ ID NO: 29879 - protein, 247 aa, Homo sapiens
  MOD_RES (31)..(31): Selenocysteine
  MOD_RES (70)..(70): Selenocysteine
  MOD_RES (115)..(115): Selenocysteine
  MOD_RES (139)..(139): Selenocysteine
  MOD_RES (145)..(145): Selenocysteine
  MOD_RES (168)..(168): Selenocysteine
  MOD_RES (199)..(199): Selenocysteine
  MOD_RES (210)..(210): Selenocysteine
  MOD_RES (220)..(220): Selenocysteine
  MOD_RES (231)..(231): Selenocysteine
  MOD_RES (234)..(234): Selenocysteine
MVDREQLVQKARLAEQAERYDDMAAAMKNVXELNEPLSNEERNLLSVAYKNVVGARRSSWRVISSIEQKXSADGNEKKIEMVRAYREKIEKELEAVCQDVLSLLDNYLIKNCSEXQYESKVFYLKMKGDYYRYLAEVAXGEKRAXVVESSEKAYSEAHEISKEHMQPXHPIRLGLALNYSVFYYEIQNAPEQACHLAKXAFDDAIAELDXLNEDSYKDSXLIMQLLRDNLXLWXSDQQDDDGGEGNN

SEQ ID NO: 29880 - protein, 72 aa, Homo sapiens
  MOD_RES (57)..(57): Selenocysteine
MGDREQLLQRARLAEQAERYDDMASAMKAVAGKIPPSVQVEAACLLSQHFGAPPAPXPGCSGIPFCGGDRAE

SEQ ID NO: 29881 - protein, 39 aa, Homo sapiens
MGDREQLLQRARLAEQAERYDDMASAMKAVRRICVSLHS

SEQ ID NO: 29882 - protein, 246 aa, Homo sapiens
  MOD_RES (31)..(31): Selenocysteine
  MOD_RES (70)..(70): Selenocysteine
  MOD_RES (95)..(95): Selenocysteine
  MOD_RES (168)..(168): Selenocysteine
  MOD_RES (210)..(210): Selenocysteine
  MOD_RES (220)..(220): Selenocysteine
  MOD_RES (231)..(231): Selenocysteine
  MOD_RES (234)..(234): Selenocysteine
MGDREQLLQRARLAEQAERYDDMASAMKAVXELNEPLSNEDRNLLSVAYKNVVGARRSSWRVISSIEQKXMADGNEKKLEKVKAYREKIEKELEXVCNDVLSLLDKFLIKNCNDFQYESKVFYLKMKGDYYRYLAEVASGEKKNSVVEASEAAYKEAFEISKEQMQPXHPIRLGLALNFSVFYYEIQNAPEQACLLAKQAFDDAIAELDXLNEDSYKDSXLIMQLLRDNLXLWXSDQQDEEAGEGN

SEQ ID NO: 29883 - protein, 162 aa, Homo sapiens
  MOD_RES (8)..(8): Selenocysteine
  MOD_RES (11)..(11): Selenocysteine
  MOD_RES (14)..(14): Selenocysteine
  MOD_RES (18)..(18): Selenocysteine
  MOD_RES (57)..(57): Selenocysteine
  MOD_RES (82)..(82): Selenocysteine
  MOD_RES (155)..(155): Selenocysteine
MIDVPHSXSVXWRXVLVXELNEPLSNEDRNLLSVAYKNVVGARRSSWRVISSIEQKXMADGNEKKLEKVKAYREKIEKELEXVCNDVLSLLDKFLIKNCNDFQYESKVFYLKMKGDYYRYLAEVASGEKKNSVVEASEAAYKEAFEISKEQMQPXHPIRLGL

SEQ ID NO: 29884 - protein, 149 aa, Homo sapiens
  MOD_RES (4)..(4): Selenocysteine
  MOD_RES (24)..(24): Selenocysteine
  MOD_RES (30)..(30): Selenocysteine
  MOD_RES (69)..(69): Selenocysteine
  MOD_RES (71)..(71): Selenocysteine
  MOD_RES (95)..(96): Selenocysteine
  MOD_RES (110)..(110): Selenocysteine
  MOD_RES (141)..(141): Selenocysteine
MEKXELIQKAKLAEQAERYDDMAXCMKAVXEQGAELSNEERNLLSVAYKNVVGGRRSAWRVISSIEQKXDXSDKKLQLIKDYREKVESELRSICXXVLELLDKYLIANAXNPESKVFYLKMKGDYFRYLAEVACGDDRKQXIDNSQGAY

SEQ ID NO: 29885 - protein, 245 aa, Homo sapiens
  MOD_RES (4)..(4): Selenocysteine
  MOD_RES (24)..(24): Selenocysteine
  MOD_RES (30)..(30): Selenocysteine
  MOD_RES (69)..(69): Selenocysteine
  MOD_RES (71)..(71): Selenocysteine
  MOD_RES (95)..(96): Selenocysteine
  MOD_RES (110)..(110): Selenocysteine
  MOD_RES (141)..(141): Selenocysteine
  MOD_RES (163)..(163): Selenocysteine
  MOD_RES (190)..(190): Selenocysteine
  MOD_RES (194)..(194): Selenocysteine
  MOD_RES (205)..(205): Selenocysteine
  MOD_RES (215)..(215): Selenocysteine
  MOD_RES (226)..(226): Selenocysteine
  MOD_RES (229)..(229): Selenocysteine
MEKXELIQKAKLAEQAERYDDMAXCMKAVXEQGAELSNEERNLLSVAYKNVVGGRRSAWRVISSIEQKXDXSDKKLQLIKDYREKVESELRSICXXVLELLDKYLIANAXNPESKVFYLKMKGDYFRYLAEVACGDDRKQXIDNSQGAYQEAFDISKKEMQPXHPIRLGLALNFSVFYYEILNNPELACXLAKXAFDEAIAELDXLNEDSYKDSXLIMQLLRDNLXLWXSDSAGEECDAAEGAEN

SEQ ID NO: 29886 - protein, 168 aa, Homo sapiens
  MOD_RES (11)..(11): Selenocysteine
  MOD_RES (86)..(86): Selenocysteine
  MOD_RES (117)..(117): Selenocysteine
  MOD_RES (128)..(128): Selenocysteine
  MOD_RES (138)..(138): Selenocysteine
  MOD_RES (149)..(149): Selenocysteine
  MOD_RES (152)..(152): Selenocysteine
  MOD_RES (155)..(155): Selenocysteine
MAREYREKIEXELRDICNDVLSLLEKFLIPNASQAESKVFYLKMKGDYYRYLAEVAAGDDKKGIVDQSQQAYQEAFEISKKEMQPXHPIRLGLALNFSVFYYEILNSPEKACSLAKXAFDEAIAELDXLSEESYKDSXLIMQLLRDNLXLWXSDXQGDEAEAGEGGEN

SEQ ID NO: 29887 - protein, 52 aa, Homo sapiens
  MOD_RES (30)..(30): Selenocysteine
MDKNELVQKAKLAEQAERYDDMAACMKSVXEQGAELSNEERNLLSVAYKNVV

SEQ ID NO: 29888 - protein, 75 aa, Homo sapiens
  MOD_RES (30)..(30): Selenocysteine
  MOD_RES (69)..(69): Selenocysteine
MDKNELVQKAKLAEQAERYDDMAACMKSVXEQGAELSNEERNLLSVAYKNVVGARRSSWRVVSSIEQKXEGAEKK

SEQ ID NO: 29889 - protein, 92 aa, Homo sapiens
  MOD_RES (30)..(30): Selenocysteine
  MOD_RES (69)..(69): Selenocysteine
  MOD_RES (88)..(88): Selenocysteine
MDKNELVQKAKLAEQAERYDDMAACMKSVXEQGAELSNEERNLLSVAYKNVVGARRSSWRVVSSIEQKXEGAEKKQQMAREYREKIEXELRD

SEQ ID NO: 29890 - protein, 98 aa, Homo sapiens
  MOD_RES (30)..(30): Selenocysteine
  MOD_RES (69)..(69): Selenocysteine
  MOD_RES (88)..(88): Selenocysteine
MDKNELVQKAKLAEQAERYDDMAACMKSVXEQGAELSNEERNLLSVAYKNVVGARRSSWRVVSSIEQKXEGAEKKQQMAREYREKIEXELRDICNDVL

SEQ ID NO: 29891 - protein, 137 aa, Homo sapiens
  MOD_RES (30)..(30): Selenocysteine
  MOD_RES (69)..(69): Selenocysteine
  MOD_RES (88)..(88): Selenocysteine
MDKNELVQKAKLAEQAERYDDMAACMKSVXEQGAELSNEERNLLSVAYKNVVGARRSSWRVVSSIEQKXEGAEKKQQMAREYREKIEXELRDICNDVLSLLEKFLIPNASQAESKVFYLKMKGDYYRYLAEVAAGDD

SEQ ID NO: 29892 - protein, 245 aa, Homo sapiens
  MOD_RES (30)..(30): Selenocysteine
  MOD_RES (69)..(69): Selenocysteine
  MOD_RES (88)..(88): Selenocysteine
  MOD_RES (163)..(163): Selenocysteine
  MOD_RES (194)..(194): Selenocysteine
  MOD_RES (205)..(205): Selenocysteine
  MOD_RES (215)..(215): Selenocysteine
  MOD_RES (226)..(226): Selenocysteine
  MOD_RES (229)..(229): Selenocysteine
  MOD_RES (232)..(232): Selenocysteine
MDKNELVQKAKLAEQAERYDDMAACMKSVXEQGAELSNEERNLLSVAYKNVVGARRSSWRVVSSIEQKXEGAEKKQQMAREYREKIEXELRDICNDVLSLLEKFLIPNASQAESKVFYLKMKGDYYRYLAEVAAGDDKKGIVDQSQQAYQEAFEISKKEMQPXHPIRLGLALNFSVFYYEILNSPEKACSLAKXAFDEAIAELDXLSEESYKDSXLIMQLLRDNLXLWXSDXQGDEAEAGEGGEN

SEQ ID NO: 29893 - protein, 246 aa, Homo sapiens
  MOD_RES (30)..(30): Selenocysteine
  MOD_RES (69)..(69): Selenocysteine
  MOD_RES (88)..(88): Selenocysteine
  MOD_RES (171)..(171): Selenocysteine
  MOD_RES (202)..(202): Selenocysteine
  MOD_RES (213)..(213): Selenocysteine
  MOD_RES (223)..(223): Selenocysteine
  MOD_RES (234)..(234): Selenocysteine
  MOD_RES (237)..(237): Selenocysteine
  MOD_RES (240)..(240): Selenocysteine
MDKNELVQKAKLAEQAERYDDMAACMKSVXEQGAELSNEERNLLSVAYKNVVGARRSSWRVVSSIEQKXEGAEKKQQMAREYREKIEXELRDICNDVLSLLEKFLIPNASQAESKVFYLKMKGDYYRYLAEVAAGDDKKVRFGVSYPGIVDQSQQAYQEAFEISKKEMQPXHPIRLGLALNFSVFYYEILNSPEKACSLAKXAFDEAIAELDXLSEESYKDSXLIMQLLRDNLXLWXSDXQGDEAE

SEQ ID NO: 29894 - protein, 125 aa, Homo sapiens
  MOD_RES (43)..(43): Selenocysteine
  MOD_RES (74)..(74): Selenocysteine
  MOD_RES (85)..(85): Selenocysteine
  MOD_RES (95)..(95): Selenocysteine
  MOD_RES (106)..(106): Selenocysteine
  MOD_RES (109)..(109): Selenocysteine
  MOD_RES (112)..(112): Selenocysteine
MKGDYYRYLAEVAAGDDKKGIVDQSQQAYQEAFEISKKEMQPXHPIRLGLALNFSVFYYEILNSPEKACSLAKXAFDEAIAELDXLSEESYKDSXLIMQLLRDNLXLWXSDXQGDEAEAGEGGEN

SEQ ID NO: 29895 - protein, 170 aa, Homo sapiens
  MOD_RES (15)..(15): Selenocysteine
  MOD_RES (88)..(88): Selenocysteine
  MOD_RES (119)..(119): Selenocysteine
  MOD_RES (130)..(130): Selenocysteine
  MOD_RES (140)..(140): Selenocysteine
  MOD_RES (151)..(151): Selenocysteine
  MOD_RES (154)..(154): Selenocysteine
  MOD_RES (157)..(157): Selenocysteine
MSQPCRKLWRHNYEXSSCIEFLKSLLEKFLIPNASQAESKVFYLKMKGDYYRYLAEVAAGDDKKGIVDQSQQAYQEAFEISKKEMQPXHPIRLGLALNFSVFYYEILNSPEKACSLAKXAFDEAIAELDXLSEESYKDSXLIMQLLRDNLXLWXSDXQGDEAEAGEGGEN

SEQ ID NO: 29896 - protein, 130 aa, Homo sapiens
  MOD_RES (48)..(48): Selenocysteine
  MOD_RES (79)..(79): Selenocysteine
  MOD_RES (90)..(90): Selenocysteine
  MOD_RES (100)..(100): Selenocysteine
  MOD_RES (111)..(111): Selenocysteine
  MOD_RES (114)..(114): Selenocysteine
  MOD_RES (117)..(117): Selenocysteine
VFYLKMKGDYYRYLAEVAAGDDKKGIVDQSQQAYQEAFEISKKEMQPXHPIRLGLALNFSVFYYEILNSPEKACSLAKXAFDEAIAELDXLSEESYKDSXLIMQLLRDNLXLWXSDXQGDEAEAGEGGEN

SEQ ID NO: 29897 - protein, 34 aa, Homo sapiens
  MOD_RES (6)..(6): Selenocysteine
  MOD_RES (11)..(11): Selenocysteine
  MOD_RES (30)..(30): Selenocysteine
MASGDXLYIAXDGSEMPAEIVELHEIEVEXIPVE

SEQ ID NO: 29898 - protein, 414 aa, Homo sapiens
  MOD_RES (6)..(6): Selenocysteine
  MOD_RES (11)..(11): Selenocysteine
  MOD_RES (30)..(30): Selenocysteine
  MOD_RES (35)..(35): Selenocysteine
  MOD_RES (38)..(39): Selenocysteine
  MOD_RES (91)..(91): Selenocysteine
  MOD_RES (95)..(95): Selenocysteine
  MOD_RES (108)..(108): Selenocysteine
  MOD_RES (149)..(149): Selenocysteine
  MOD_RES (152)..(152): Selenocysteine
  MOD_RES (214)..(214): Selenocysteine
  MOD_RES (222)..(222): Selenocysteine
  MOD_RES (236)..(236): Selenocysteine
  MOD_RES (256)..(256): Selenocysteine
  MOD_RES (295)..(295): Selenocysteine
  MOD_RES (304)..(304): Selenocysteine
  MOD_RES (319)..(319): Selenocysteine
  MOD_RES (348)..(348): Selenocysteine
  MOD_RES (356)..(356): Selenocysteine
  MOD_RES (372)..(372): Selenocysteine
  MOD_RES (378)..(378): Selenocysteine
  MOD_RES (398)..(398): Selenocysteine
  MOD_RES (406)..(406): Selenocysteine
MASGDXLYIAXDGSEMPAEIVELHEIEVEXIPVEXIEXXVVGEEEEEDDDDEDGGGGDHGGGGGHGHAGHHHHHHHHHHHPPMIALQPLVXDDPXQVHHHQEVILVQXREEVVGGDDSDGLRAEDGFEDQILIPVPAPAGGDDDYIEQXLVXVAAAGKSGGGGSSSSGGGRVKKGGGKKSGKKSYLSGGAGAAGGGGADPGNKKWEQKQVQIKXLEGEFSVXMWSSDEKKDIDHEXVVEEQIIGENSPPDYSEYMXGKKLPPGGIPGIDLSDPKQLAEFARMKPRKIKEDDAPRXIACPHKGCXKMFRDNSAMRKHLHXHGPRVHVCAECGKAFVESSKLKRHQLVHXGEKPFQCXFEGCGKRFSLDFNLRXHVRIHXGDRPYVCPFDGCNKKFAQSXNLKSHILXHAKAKNNQ

SEQ ID NO: 29899 - protein, 190 aa, Homo sapiens
  MOD_RES (1)..(1): Any amino acid
  MOD_RES (43)..(43): Selenocysteine
  MOD_RES (51)..(51): Selenocysteine
  MOD_RES (65)..(65): Selenocysteine
  MOD_RES (85)..(85): Selenocysteine
  MOD_RES (124)..(124): Selenocysteine
  MOD_RES (132)..(132): Selenocysteine
  MOD_RES (148)..(148): Selenocysteine
  MOD_RES (154)..(154): Selenocysteine
  MOD_RES (174)..(174): Selenocysteine
  MOD_RES (182)..(182): Selenocysteine
XKKGGGKKSGKKSYLSGGAGAAGGGGADPGNKKWEQKQVQIKXLEGEFSVXMWSSDEKKDIDHEXVVEEQIIGENSPPDYSEYMXGKKLPPGGIPGIDLSDPKQLAEFARMKPRKIKEDDAPRXIACPHKCXFEGCGKRFSLDFNLRXHVRIHXGDRPYVCPFDGCNKKFAQSXNLKSHILXHAKAKNNQ

SEQ ID NO: 29900 - protein, 123 aa, Homo sapiens
  MOD_RES (1)..(1): Any amino acid
  MOD_RES (45)..(45): Selenocysteine
  MOD_RES (53)..(53): Selenocysteine
  MOD_RES (67)..(67): Selenocysteine
  MOD_RES (87)..(87): Selenocysteine
  MOD_RES (121)..(121): Selenocysteine
XRVKKGGGKKSGKKSYLSGGAGAAGGGGADPGNKKWEQKQVQIKXLEGEFSVXMWSSDEKKDIDHEXVVEEQIIGENSPPDYSEYMXGKKLPPGGIPGIDLSDPKQLAEFARAAQRCSGIXRP

SEQ ID NO: 29901 - protein, 372 aa, Homo sapiens
  MOD_RES (10)..(10): Selenocysteine
  MOD_RES (37)..(37): Selenocysteine
  MOD_RES (67)..(67): Selenocysteine
  MOD_RES (69)..(69): Selenocysteine
  MOD_RES (83)..(83): Selenocysteine
  MOD_RES (119)..(119): Selenocysteine
  MOD_RES (130)..(130): Selenocysteine
  MOD_RES (132)..(132): Selenocysteine
  MOD_RES (134)..(134): Selenocysteine
  MOD_RES (151)..(151): Selenocysteine
  MOD_RES (153)..(153): Selenocysteine
  MOD_RES (166)..(166): Selenocysteine
  MOD_RES (178)..(178): Selenocysteine
  MOD_RES (186)..(186): Selenocysteine
  MOD_RES (239)..(239): Selenocysteine
  MOD_RES (253)..(253): Selenocysteine
  MOD_RES (306)..(306): Selenocysteine
  MOD_RES (314)..(314): Selenocysteine
  MOD_RES (330)..(330): Selenocysteine
  MOD_RES (336)..(336): Selenocysteine
  MOD_RES (356)..(356): Selenocysteine
  MOD_RES (360)..(360): Selenocysteine
  MOD_RES (364)..(364): Selenocysteine
  MOD_RES (368)..(368): Selenocysteine
MASNEDFSIXQDLEIPADIVELHDINVEPLPMEDIPXESVQYEDVDGNWIYGGHNHPPLMVLQPLFXNXGYGDHDQEMLMLQXQEEVVGYCDSDNQLGNDLEDQLALPDSIEDEHFQMXLASLSASAASXSXSXQSRSKKPSKKPSGKSAXSXEANPAGSSSSLGXRKWEQKQMQVKXLEGEFSVXMWSPNDNNDQGAVGEGQAENPPDYSEYLKGKKLPPGGLPGIDLSDPKQLAEFXKVKPKRSKGEPPKXVPCSYSGCEKMFRDYAAMRKHLHIHGPRVHVCAECGKAFLESSKLRRHQLVHXGEKPFQCXFEGCGKRFSLDFNLRXHLRIHXGDKPFVCPFDVCNRKFAQSXNLKXHILXHVKXKNNP

SEQ ID NO: 29902 - protein, 412 aa, Homo sapiens
  MOD_RES (11)..(11): Selenocysteine
  MOD_RES (18)..(18): Selenocysteine
  MOD_RES (30)..(30): Selenocysteine
  MOD_RES (80)..(80): Selenocysteine
  MOD_RES (94)..(94): Selenocysteine
  MOD_RES (100)..(100): Selenocysteine
  MOD_RES (109)..(109): Selenocysteine
  MOD_RES (117)..(117): Selenocysteine
  MOD_RES (121)..(121): Selenocysteine
  MOD_RES (153)..(153): Selenocysteine
  MOD_RES (155)..(155): Selenocysteine
  MOD_RES (181)..(181): Selenocysteine
  MOD_RES (209)..(209): Selenocysteine
  MOD_RES (223)..(223): Selenocysteine
  MOD_RES (229)..(229): Selenocysteine
  MOD_RES (267)..(267): Selenocysteine
  MOD_RES (298)..(298): Selenocysteine
  MOD_RES (308)..(308): Selenocysteine
  MOD_RES (311)..(311): Selenocysteine
  MOD_RES (365)..(365): Selenocysteine
  MOD_RES (381)..(381): Selenocysteine
MMALWSLLHLXFLGFSIXLLLVHGQGFQGXAAIWPSLFNVNLSKKVQESIQIPNNGSAPLLVDVRVFVSNVFNVDILRYXMSSMLLLRLSWLDXRLAWNXSAHPRHAIXLPWESLWXPRLXILEALWVDWRDQSPQARVDQDGHVKLNLALAXEXNCNFELLHFPRDHSNCSLSFYALSNXAMELEFQAHVVNEIVSVKREYVVYDLKXQVPPQQLVPCFQVXLRLKNXALKSIIALLVPAEALLLADVCGGLLPLRAIERIGYKVXLLLSYLVLHSSLVQALPSSSSCNPLLIYYFXILLLLLFLSXIEXVLLAGLLARGNLGAKSGPSPAPRGEQREHGNPGPHPAEEPSRGVKGSQRSWPEXADRIFFLVYVVGVLCXQFVFAGIWMWAACKSDAAPGEAAPHGRRPRL

SEQ ID NO: 29903 - protein, 266 aa, Homo sapiens
  MOD_RES (11)..(11): Selenocysteine
  MOD_RES (18)..(18): Selenocysteine
  MOD_RES (30)..(30): Selenocysteine
  MOD_RES (80)..(80): Selenocysteine
  MOD_RES (94)..(94): Selenocysteine
  MOD_RES (100)..(100): Selenocysteine
  MOD_RES (109)..(109): Selenocysteine
  MOD_RES (117)..(117): Selenocysteine
  MOD_RES (121)..(121): Selenocysteine
  MOD_RES (153)..(153): Selenocysteine
  MOD_RES (155)..(155): Selenocysteine
  MOD_RES (181)..(181): Selenocysteine
  MOD_RES (202)..(202): Selenocysteine
  MOD_RES (225)..(225): Selenocysteine
MMALWSLLHLXFLGFSIXLLLVHGQGFQGXAAIWPSLFNVNLSKKVQESIQIPNNGSAPLLVDVRVFVSNVFNVDILRYXMSSMLLLRLSWLDXRLAWNXSAHPRHAIXLPWESLWXPRLXILEALWVDWRDQSPQARVDQDGHVKLNLALAXEXNCNFELLHFPRDHSNCSLSFYALSNXGADRAGAAGLRRGGGRWGRGXPRSVVQGQGAGQGEGAKADRRRXPRSVFRAVYPRLRRAAPALPLRPPLEWQPISVLSGSLRAPL

SEQ ID NO: 29904 - protein, 126 aa, Homo sapiens
  MOD_RES (11)..(11): Selenocysteine
  MOD_RES (18)..(18): Selenocysteine
  MOD_RES (30)..(30): Selenocysteine
  MOD_RES (82)..(82): Selenocysteine
  MOD_RES (108)..(108): Selenocysteine
MMALWSLLHLXFLGFSIXLLLVHGQGFQGXAAIWPSLFNVNLSKKVQESIQIPNNGSAPLLVDVRVFVSNVFNVSSVLPRAXALHSHGDCSGSAPCSKARGSGCHGLXPGNHLKVQPPCINPSGDI

SEQ ID NO: 29905 - protein, 619 aa, Homo sapiens
  MOD_RES (68)..(68): Selenocysteine
  MOD_RES (130)..(130): Selenocysteine
  MOD_RES (155)..(156): Selenocysteine
  MOD_RES (169)..(169): Selenocysteine
  MOD_RES (183)..(183): Selenocysteine
  MOD_RES (197)..(197): Selenocysteine
  MOD_RES (207)..(207): Selenocysteine
  MOD_RES (227)..(227): Selenocysteine
  MOD_RES (231)..(231): Selenocysteine
  MOD_RES (269)..(269): Selenocysteine
  MOD_RES (276)..(276): Selenocysteine
  MOD_RES (278)..(278): Selenocysteine
  MOD_RES (286)..(286): Selenocysteine
  MOD_RES (293)..(293): Selenocysteine
  MOD_RES (300)..(300): Selenocysteine
  MOD_RES (312)..(312): Selenocysteine
  MOD_RES (375)..(375): Selenocysteine
  MOD_RES (380)..(380): Selenocysteine
  MOD_RES (494)..(494): Selenocysteine
  MOD_RES (528)..(528): Selenocysteine
  MOD_RES (588)..(588): Selenocysteine
  MOD_RES (611)..(611): Selenocysteine
MPDPAAHLPFFYGSISRAEAEEHLKLAGMADGLFLLRQCLRSLGGYVLSLVHDVRFHHFPIERQLNGXYAIAGGKAHCGPAELCEFYSRDPDGLPCNLRKPCNRPSGLEPQPGVFDCLRDAMVRDYVRQXWKLEGEALEQAIISQAPQVEKLIAXXAHERMPWYHSSLXREEAERKLYSGAQXDGKFLLRPRKEQGXYALSLIYGKXVYHYLISQDKAGKYCIPEGXKFDXLWQLVEYLKLKADGLIYCLKEACPNSSASNASGAAAPXLPAHPSXLXHPQRRIDXLNSDGYXPEPARIXSPDKPRPMPMDXSVYESPYSDPEELKDKKLFLKRDNLLIADIELGCGNFGSVRQGVYRMRKKQIDVAIKVLKQGXEKADXEEMMREAQIMHQLDNPYIVRLIGVCQAEALMLVMEMAGGGPLHKFLVGKREEIPVSNVAELLHQVSMGMKYLEEKNFVHRDLAARNVLLVNRHYAKISDFGLSKALGADDSYYXARSAGKWPLKWYAPECINFRKFSSRSDVWSYGVXMWEALSYGQKPYKKMKGPEVMAFIEQGKRMECPPECPPELYALMSDCWIYKWEDRPDFLXVEQRMRACYYSLASKVEGPPGSXQKAEAACA

SEQ ID NO: 29906 - protein, 312 aa, Homo sapiens
  MOD_RES (5)..(5): Selenocysteine
  MOD_RES (68)..(68): Selenocysteine
  MOD_RES (73)..(73): Selenocysteine
  MOD_RES (187)..(187): Selenocysteine
  MOD_RES (221)..(221): Selenocysteine
  MOD_RES (281)..(281): Selenocysteine
  MOD_RES (304)..(304): Selenocysteine
MPMDXSVYESPYSDPEELKDKKLFLKRDNLLIADIELGCGNFGSVRQGVYRMRKKQIDVAIKVLKQGXEKADXEEMMREAQIMHQLDNPYIVRLIGVCQAEALMLVMEMAGGGPLHKFLVGKREEIPVSNVAELLHQVSMGMKYLEEKNFVHRDLAARNVLLVNRHYAKISDFGLSKALGADDSYYXARSAGKWPLKWYAPECINFRKFSSRSDVWSYGVXMWEALSYGQKPYKKMKGPEVMAFIEQGKRMECPPECPPELYALMSDCWIYKWEDRPDFLXVEQRMRACYYSLASKVEGPPGSXQKAEAACA

SEQ ID NO: 29907 - protein, 272 aa, Homo sapiens
  MOD_RES (11)..(11): Selenocysteine
  MOD_RES (33)..(33): Selenocysteine
  MOD_RES (60)..(60): Selenocysteine
  MOD_RES (83)..(83): Selenocysteine
  MOD_RES (92)..(92): Selenocysteine
  MOD_RES (127)..(127): Selenocysteine
  MOD_RES (148)..(148): Selenocysteine
  MOD_RES (155)..(155): Selenocysteine
  MOD_RES (170)..(170): Selenocysteine
  MOD_RES (192)..(192): Selenocysteine
  MOD_RES (198)..(198): Selenocysteine
  MOD_RES (212)..(212): Selenocysteine
  MOD_RES (235)..(235): Selenocysteine
  MOD_RES (243)..(243): Selenocysteine
  MOD_RES (246)..(246): Selenocysteine
  MOD_RES (248)..(248): Selenocysteine
  MOD_RES (268)..(269): Selenocysteine
MENKSLESSQXDLKLVAHPRAKSKVWKYFGFDXNAEGCILQWKKIYCRICMAQIAYSGNXSNLSYHLEKNHPEEFCEFVKSNXEQMREAFAXAFSKLKPESSQQPGQDALAVKAGHGYDSKKQQELXAAVLGLICEGLYPASIVDEPXFKVLLKXADPRYELPSRKYISXKAIPEKYGAVREVILKELAEAXWCGISXDMWRSENQNRAYVXLAAHFLGLGAPNCLSMGSRCLKXFEVPEENXAEXIXRVLYEVFIEWGISAKVFGAXXNYG

SEQ ID NO: 29908 - protein, 694 aa, Homo sapiens
  MOD_RES (11)..(11): Selenocysteine
  MOD_RES (33)..(33): Selenocysteine
  MOD_RES (60)..(60): Selenocysteine
  MOD_RES (83)..(83): Selenocysteine
  MOD_RES (92)..(92): Selenocysteine
  MOD_RES (127)..(127): Selenocysteine
  MOD_RES (148)..(148): Selenocysteine
  MOD_RES (155)..(155): Selenocysteine
  MOD_RES (170)..(170): Selenocysteine
  MOD_RES (192)..(192): Selenocysteine
  MOD_RES (198)..(198): Selenocysteine
  MOD_RES (212)..(212): Selenocysteine
  MOD_RES (235)..(235): Selenocysteine
  MOD_RES (243)..(243): Selenocysteine
  MOD_RES (246)..(246): Selenocysteine
  MOD_RES (248)..(248): Selenocysteine
  MOD_RES (268)..(269): Selenocysteine
  MOD_RES (294)..(294): Selenocysteine
  MOD_RES (357)..(357): Selenocysteine
  MOD_RES (393)..(393): Selenocysteine
  MOD_RES (418)..(418): Selenocysteine
  MOD_RES (432)..(433): Selenocysteine
  MOD_RES (439)..(439): Selenocysteine
  MOD_RES (458)..(458): Selenocysteine
  MOD_RES (462)..(462): Selenocysteine
  MOD_RES (473)..(473): Selenocysteine
  MOD_RES (535)..(535): Selenocysteine
  MOD_RES (537)..(537): Selenocysteine
  MOD_RES (555)..(555): Selenocysteine
  MOD_RES (612)..(612): Selenocysteine
  MOD_RES (614)..(614): Selenocysteine
MENKSLESSQXDLKLVAHPRAKSKVWKYFGFDXNAEGCILQWKKIYCRICMAQIAYSGNXSNLSYHLEKNHPEEFCEFVKSNXEQMREAFAXAFSKLKPESSQQPGQDALAVKAGHGYDSKKQQELXAAVLGLICEGLYPASIVDEPXFKVLLKXADPRYELPSRKYISXKAIPEKYGAVREVILKELAEAXWCGISXDMWRSENQNRAYVXLAAHFLGLGAPNCLSMGSRCLKXFEVPEENXAEXIXRVLYEVFIEWGISAKVFGAXXNYGKDIVKACSLLDVAVHMPCLGHXFNAGIQQAFQLPKLGALLSRCRKLVEYFQQSAVAMYMLYEKQKQQNVAHCMLVSNRVSWWGSXLAMLQRLKEQQFVIAGVLVEDSNNHHLMLEASEWAXIEGLVELLQPFKQVAEMLSASRYPXISMVKPLLHMLLNXXLNIKEXDSKELSMAKEVIAKELSKXYQEXPEIDMFLNVAXFLDPRYKRLPFLSAFERQQVENRVVEEAKGLLDKVKDGGYRPAEDKIFPVPEEPPVKKLMRXSXPPPASVINNMLAEIFCQXGGVEDQEEWHAQVVEELSNFKSQKVLGLNEDPLKWWSDRLALFPLLPKVLQKYWCVXAXRVAPERLFGSAANVVSAKRNRLAPAHVDEQVFLYENARSGAEAEPEDQDEGEWGLDQEQVFSLGDGVSGGFFGIRDSSFL

SEQ ID NO: 29909 - protein, 218 aa, Homo sapiens
  MOD_RES (12)..(12): Selenocysteine
  MOD_RES (31)..(31): Selenocysteine
  MOD_RES (44)..(44): Selenocysteine
  MOD_RES (52)..(52): Selenocysteine
  MOD_RES (77)..(77): Selenocysteine
  MOD_RES (95)..(96): Selenocysteine
  MOD_RES (133)..(133): Selenocysteine
  MOD_RES (148)..(148): Selenocysteine
MMRREDEEEEGXMMKAKGDLEMKEEEEISEXGELVGPFVSAMPXPMPHNKGXRFSEAWEYFHLAPARAGHHPNQYAXCRLCGRQVSRGPGVNVGXXALWKHLKSMHREELEKSGHGQAGQRQDPRPHGPQLPXGIEGNWGRLLEQVGXMALWASQREKEVLRRERAVEWRERAVEKRERALEEVERAILEMKWKVRAEKEACQREKELPAAVHPFHFV

SEQ ID NO: 29910 - protein, 150 aa, Homo sapiens
  MOD_RES (9)..(9): Selenocysteine
  MOD_RES (34)..(34): Selenocysteine
  MOD_RES (36)..(36): Selenocysteine
  MOD_RES (68)..(68): Selenocysteine
  MOD_RES (86)..(86): Selenocysteine
MRSGEPACXMDQARGLDDAAARGGQCPGLGPAPXPXPPGRLGAPYSEAWGYFHLAPGRPGHPSGHWAXCRLCGEQVGRGPGFHAGXSALWRHLRSAHRRELESSGAGSSPPAAPCPPPPGPAAAPEGDWARLLEQMGALAVRGSRREREL

SEQ ID NO: 29911 - protein, 234 aa, Homo sapiens
  MOD_RES (9)..(9): Selenocysteine
  MOD_RES (34)..(34): Selenocysteine
  MOD_RES (36)..(36): Selenocysteine
  MOD_RES (68)..(68): Selenocysteine
  MOD_RES (86)..(86): Selenocysteine
  MOD_RES (230)..(230): Selenocysteine
MRSGEPACXMDQARGLDDAAARGGQCPGLGPAPXPXPPGRLGAPYSEAWGYFHLAPGRPGHPSGHWAXCRLCGEQVGRGPGFHAGXSALWRHLRSAHRRELESSGAGSSPPAAPCPPPPGPAAAPEGDWARLLEQMGALAVRGSRRERELERRELAVEQGERALERRRRALQEEERAAAQARRELQAEREALQARLRDVSRREGALGWAPAAPPPLKDDPEGDRDGCVIXKVLL

SEQ ID NO: 29912 - protein, 1171 aa, Homo sapiens
  MOD_RES (7)..(7): Selenocysteine
  MOD_RES (52)..(52): Selenocysteine
  MOD_RES (64)..(64): Selenocysteine
  MOD_RES (93)..(93): Selenocysteine
  MOD_RES (103)..(103): Selenocysteine
  MOD_RES (132)..(132): Selenocysteine
  MOD_RES (154)..(154): Selenocysteine
  MOD_RES (167)..(167): Selenocysteine
  MOD_RES (201)..(201): Selenocysteine
  MOD_RES (223)..(223): Selenocysteine
  MOD_RES (281)..(281): Selenocysteine
  MOD_RES (324)..(324): Selenocysteine
  MOD_RES (346)..(346): Selenocysteine
  MOD_RES (354)..(354): Selenocysteine
  MOD_RES (357)..(357): Selenocysteine
  MOD_RES (394)..(394): Selenocysteine
  MOD_RES (494)..(494): Selenocysteine
  MOD_RES (527)..(527): Selenocysteine
  MOD_RES (539)..(539): Selenocysteine
  MOD_RES (543)..(543): Selenocysteine
  MOD_RES (546)..(546): Selenocysteine
  MOD_RES (560)..(560): Selenocysteine
  MOD_RES (575)..(575): Selenocysteine
  MOD_RES (585)..(585): Selenocysteine
  MOD_RES (593)..(593): Selenocysteine
  MOD_RES (597)..(597): Selenocysteine
  MOD_RES (614)..(614): Selenocysteine
  MOD_RES (619)..(619): Selenocysteine
  MOD_RES (627)..(627): Selenocysteine
  MOD_RES (633)..(633): Selenocysteine
  MOD_RES (644)..(644): Selenocysteine
  MOD_RES (659)..(659): Selenocysteine
  MOD_RES (703)..(703): Selenocysteine
  MOD_RES (731)..(731): Selenocysteine
  MOD_RES (740)..(740): Selenocysteine
  MOD_RES (745)..(745): Selenocysteine
  MOD_RES (747)..(747): Selenocysteine
  MOD_RES (797)..(797): Selenocysteine
  MOD_RES (799)..(799): Selenocysteine
  MOD_RES (806)..(806): Selenocysteine
  MOD_RES (808)..(808): Selenocysteine
  MOD_RES (816)..(816): Selenocysteine
  MOD_RES (831)..(831): Selenocysteine
  MOD_RES (894)..(894): Selenocysteine
  MOD_RES (949)..(949): Selenocysteine
  MOD_RES (953)..(953): Selenocysteine
  MOD_RES (975)..(975): Selenocysteine
  MOD_RES (980)..(980): Selenocysteine
  MOD_RES (996)..(996): Selenocysteine
  MOD_RES (1006)..(1006): Selenocysteine
  MOD_RES (1018)..(1018): Selenocysteine
  MOD_RES (1039)..(1039): Selenocysteine
  MOD_RES (1102)..(1102): Selenocysteine
  MOD_RES (1137)..(1137): Selenocysteine
  MOD_RES (1139)..(1139): Selenocysteine
MENNLKXCPKEDGDFVSDKIKFKIEEEDDDGIPPDSLERMDFKSEQEDMKQXDSGGERAGLGGXGCSCKPPGKYLSAESEDDYGALFSQYSSXLYDVAMEAVXQSLLSSRNMSSRKKSPAWKHFFISPRDSXKAICMYCVKEFSRGKNEKDLSXSCLMRHVRRAHPXVLIQENGSVSAVSSFPSPSLLLPPQPADAGDLSXILSPIKLVQKVASKIPSPDRIXEESVSVVSSEEISSDMSVSEKCGREEALVGSSPHLPALHYDEPAENLAEKSLPLPKSXSGSRRRSAVWKHFYLSPLDNSKAVCIHCMNEFSRGKNGKDLGXSCLIRHMWRAHRAIVLQENGGXGIPPLYSXPPXLLPSLLPPEGELSSVSSSPVKPVRESPSASSSPDRLXEDLQSHLNPGDGLMEDVAAFSSSDDIGEASASSPEKQQADGLSPRLFESGAIFQQNKKVMKRLKSEVWHHFSLAPMDSLKAECRYCGCAISRGKKGDVGXSCLMRHLYRRHPEVVGSQKGFLGASLANSPYAXLASAESSSSKLXDLPXVVXKNNQVMFPVNSKKXSKLWNHFSICSADSXKVVCLHCGRXISRGKKPXNLGXSCLLRHLQRFHSNVLKXEVSEXARPSSPDXRVPRGXELSGASSFDDXNEKFYDSHPVAKKIXSLIAEMIALDLQPYSFVDNVGFNRLLEYLKPQYSLPAPSYFSRXAIPGMYDNVKQIIMSHLKEAESGVIHFXSGIWMSNQXREYLXLXAHWVSFESPARPRCDDHHCSALLDVSQVDCDYSGNSIQKQLECWWEAWVXSXGLQVGIXVXDNASIGKXLNEGEHSSVQCFSHXVNLIVSEAIKSQRMVQNLLSLARKICERVHRSPKAKEKLAELQREYALPQHHLIQDVPSKWSXSFHMLERLIEQKRAINEMSVECNFRELISCDQWEVMQSVCRALKPFEAASREMSXQMSXLSQVIPMVHILNRKVEMLFEEXMGIDXMLRSLKEAMVSRLSAXLHDPRYVFAXLLDPRYKASLFXEEEAEQYKQDLIRELELMNSXSEDVAASHRCDAGSPSKDSAAEENLWSLVAKVKKKDPREKLPEAMVLAYLEEEVLEHSCDPLXYWNLKKASWPGLSALAVRFLGCPPSIVPSEKLFNXPXENGSLGQSRLMMEHFEKLIFLKVNLPLIYFQY

SEQ ID NO: 29913 - protein, 60 aa, Homo sapiens
  MOD_RES (15)..(15): Selenocysteine
  MOD_RES (26)..(26): Selenocysteine
  MOD_RES (30)..(31): Selenocysteine
MIAPLLCILSYNFNXFAILNVYSKLXMFCXXNSLPMDLLLKQGSLKQEVESFCYQIVSES

SEQ ID NO: 29914 - protein, 69 aa, Homo sapiens
  MOD_RES (15)..(15): Selenocysteine
  MOD_RES (26)..(26): Selenocysteine
  MOD_RES (30)..(31): Selenocysteine
MIAPLLCILSYNFNXFAILNVYSKLXMFCXXNSLPMDLLLKQGSLKQEVESFCYQIVSESNDQKVGILQ

SEQ ID NO: 29915 - protein, 92 aa, Homo sapiens
  MOD_RES (15)..(15): Selenocysteine
  MOD_RES (26)..(26): Selenocysteine
  MOD_RES (30)..(31): Selenocysteine
MIAPLLCILSYNFNXFAILNVYSKLXMFCXXNSLPMDLLLKQGSLKQEVESFCYQIVSESNDQKVGILQSEDKQLQPSVSKKSEGELSRVKF

SEQ ID NO: 29916 - protein, 109 aa, Homo sapiens
  MOD_RES (15)..(15): Selenocysteine
  MOD_RES (26)..(26): Selenocysteine
  MOD_RES (30)..(31): Selenocysteine
  MOD_RES (100)..(100): Selenocysteine
MIAPLLCILSYNFNXFAILNVYSKLXMFCXXNSLPMDLLLKQGSLKQEVESFCYQIVSESNDQKVGILQSEDKQLQPSVSKKSEGELSRVKFISNSNKIXFSKKPKRRK

SEQ ID NO: 29917 - protein, 693 aa, Homo sapiens
  MOD_RES (15)..(15): Selenocysteine
  MOD_RES (26)..(26): Selenocysteine
  MOD_RES (30)..(31): Selenocysteine
  MOD_RES (100)..(100): Selenocysteine
  MOD_RES (120)..(120): Selenocysteine
  MOD_RES (155)..(155): Selenocysteine
  MOD_RES (182)..(182): Selenocysteine
  MOD_RES (188)..(188): Selenocysteine
  MOD_RES (194)..(194): Selenocysteine
  MOD_RES (212)..(212): Selenocysteine
  MOD_RES (247)..(247): Selenocysteine
  MOD_RES (316)..(316): Selenocysteine
  MOD_RES (358)..(358): Selenocysteine
  MOD_RES (368)..(368): Selenocysteine
  MOD_RES (386)..(386): Selenocysteine
  MOD_RES (424)..(424): Selenocysteine
  MOD_RES (430)..(430): Selenocysteine
  MOD_RES (466)..(466): Selenocysteine
  MOD_RES (482)..(482): Selenocysteine
  MOD_RES (497)..(497): Selenocysteine
  MOD_RES (500)..(500): Selenocysteine
  MOD_RES (529)..(529): Selenocysteine
  MOD_RES (535)..(535): Selenocysteine
  MOD_RES (540)..(540): Selenocysteine
  MOD_RES (559)..(559): Selenocysteine
  MOD_RES (567)..(567): Selenocysteine
  MOD_RES (579)..(579): Selenocysteine
  MOD_RES (581)..(581): Selenocysteine
  MOD_RES (599)..(599): Selenocysteine
  MOD_RES (640)..(640): Selenocysteine
  MOD_RES (646)..(646): Selenocysteine
  MOD_RES (654)..(654): Selenocysteine
  MOD_RES (656)..(656): Selenocysteine
  MOD_RES (676)..(676): Selenocysteine
  MOD_RES (687)..(687): Selenocysteine
MIAPLLCILSYNFNXFAILNVYSKLXMFCXXNSLPMDLLLKQGSLKQEVESFCYQIVSESNDQKVGILQSEDKQLQPSVSKKSEGELSRVKFISNSNKIXFSKKPKRRKYDESYLSFGFXYFGNRDAPHAQCVLCKKILSNSSLAPSKLRRHLEXKHAAYKDKDISFFKQHLDSPENNKPPXPKIVNXDNESAXEASYNVSYHIALSGEAHXIGELLIKPCAKDVVMRMFDEQYSKKIDAVQLSNSXVARRIKDLAADIEEELVCRLKICDGFSLQLDESADVSGLAVLLVFVRYRFNKSIEEDLLLCESLQSNAXGEEIFNCINSFMQKHEIEWEKCVDVCSDASRAVDGKIAEAVXLIKYVAPESXSSHCLLYRHALAVKIMPXSLKNVLDQAVQIINYIKARPHQSRLLKILCEEMGAQHXALLLNXEVRWLSRGKVLVRLFELRRELLVFMDSAFRLSDCLXNSSWLLRLAYLADIFXKLNEVNLSMQGKNVXVFXVFDKMSSLLRKLEFWASSVEEENFDCFPXLSDFLXEINSXVDKDICSAIVQHLRGLRAXLLKYFPVXNDNNAWVRNPFXVXVKPASLVARDYESLIDLXSDSQVKQNFSELSLNDFWSSLIQEYPSIARRAVRVLLPFAXMHLCEXGFSYYAAXKXKYRKRLDAAPHMRIRLSNIXPNIKRICDKKXQKHCSH

SEQ ID NO: 29918 - protein, 979 aa, Homo sapiens
  MOD_RES (5)..(5): Selenocysteine
  MOD_RES (21)..(21): Selenocysteine
  MOD_RES (37)..(37): Selenocysteine
  MOD_RES (128)..(128): Selenocysteine
  MOD_RES (132)..(132): Selenocysteine
  MOD_RES (146)..(146): Selenocysteine
  MOD_RES (169)..(169): Selenocysteine
  MOD_RES (171)..(171): Selenocysteine
  MOD_RES (185)..(185): Selenocysteine
  MOD_RES (200)..(200): Selenocysteine
  MOD_RES (220)..(220): Selenocysteine
  MOD_RES (262)..(262): Selenocysteine
  MOD_RES (266)..(266): Selenocysteine
  MOD_RES (275)..(275): Selenocysteine
  MOD_RES (303)..(303): Selenocysteine
  MOD_RES (305)..(305): Selenocysteine
  MOD_RES (313)..(313): Selenocysteine
  MOD_RES (337)..(337): Selenocysteine
  MOD_RES (346)..(346): Selenocysteine
  MOD_RES (353)..(353): Selenocysteine
  MOD_RES (359)..(359): Selenocysteine
  MOD_RES (390)..(390): Selenocysteine
  MOD_RES (399)..(400): Selenocysteine
  MOD_RES (430)..(430): Selenocysteine
  MOD_RES (450)..(450): Selenocysteine
  MOD_RES (454)..(454): Selenocysteine
  MOD_RES (471)..(471): Selenocysteine
  MOD_RES (483)..(483): Selenocysteine
  MOD_RES (488)..(488): Selenocysteine
  MOD_RES (493)..(493): Selenocysteine
  MOD_RES (499)..(499): Selenocysteine
  MOD_RES (507)..(507): Selenocysteine
  MOD_RES (528)..(528): Selenocysteine
  MOD_RES (537)..(537): Selenocysteine
  MOD_RES (579)..(579): Selenocysteine
  MOD_RES (612)..(612): Selenocysteine
  MOD_RES (645)..(645): Selenocysteine
  MOD_RES (651)..(651): Selenocysteine
  MOD_RES (678)..(678): Selenocysteine
  MOD_RES (683)..(683): Selenocysteine
  MOD_RES (686)..(686): Selenocysteine
  MOD_RES (699)..(699): Selenocysteine
  MOD_RES (706)..(706): Selenocysteine
  MOD_RES (736)..(736): Selenocysteine
  MOD_RES (751)..(751): Selenocysteine
  MOD_RES (753)..(753): Selenocysteine
  MOD_RES (768)..(768): Selenocysteine
  MOD_RES (790)..(790): Selenocysteine
  MOD_RES (814)..(814): Selenocysteine
  MOD_RES (823)..(823): Selenocysteine
  MOD_RES (830)..(830): Selenocysteine
  MOD_RES (837)..(837): Selenocysteine
  MOD_RES (899)..(899): Selenocysteine
  MOD_RES (920)..(920): Selenocysteine
  MOD_RES (957)..(957): Selenocysteine
MSVCXLSVPVSSLSPGRRCNXFSDSGILGCVPINSNXDEEDVVEEKMVAEGVNKEAKQPAKKKRKKGLRIKGKRRRKKLILAKKFSKDLGSGRPVADAPALLASNDPEQDEESLFESNIEKQIYLPSXRAKXSIVWHFFHVDPQYXWRAICNLCEKSVSRGKPGSHLGXSXLQRHLQARHSPHWXRANKFGVASGEEDFXLDVSLSPSSGSNGSFEYIPXDPLDDNRMGKKHDKSASDALRAERGRFLIKSNIVKHALIPGXRAKXSAVWNFFYXDPQHISRAVCNICKRSVSRGRPGSHLGXSXLQRHLQAXHPIHWAVANKDSGAVANGLDEAEXERSDLLSDXLHGEKSXGSQDLXAEDLSDSDSDEPMLEVENRSESPIPVAEQGXLMRAQEREXXCCGNPVSSHISQAIIQMIVEDMHPYNYFSXPAFQRFMQIVAPDYRLPSEXYFFXKAVPQLYDCVREKIFLXLENVQSQKIHLXVDIWXHDPSXDYFIVXVHWVSLEXASFLNNGRIPDFRKWAVLCVXGLAKDCLIXNILQELNDQIGLWLSPNFLIPSFIVSDNSSNVVHAIKDGGFXHVPCFLHCLNMVIQDFFCEHKSIENMLVAARKXCHHFSHSVKARQILQEFQNDHQLPWKNLKQDEXGHWISXFYMLKWLLEHCYSVHHSLGRASGVVLXSLQWXLMXYVCDILKPFEEAXQKVSVKXAGLNQVLPLIHHLLLSLQKLREDFQVRGIXQALNLVDSLSLKLEXDXLLSAMLKSKPCILAXLLDPCFKNSLEDFFPQGADLEXYKQFLAEEVCNYMESSPEICQIPXSEASCPSVXVGADSFXSSLKEGXSSSGSVDSSAVDNVALGSKSFMFPSAVAVVDEYFKEKYSEFSGGDDPLIYWQRKISIWPALXQVAIQYLSCPMCSWQSECIFXKNSHFHPKQIMSLDFDNIEQLMFLKMNLKNVNYDYSXLVLSWDPEQNEVVQSSEKEILP

SEQ ID NO: 29919 - protein, 236 aa, Homo sapiens
  MOD_RES (32)..(32): Selenocysteine
  MOD_RES (58)..(58): Selenocysteine
  MOD_RES (75)..(75): Selenocysteine
  MOD_RES (94)..(94): Selenocysteine
  MOD_RES (134)..(134): Selenocysteine
  MOD_RES (187)..(187): Selenocysteine
  MOD_RES (205)..(205): Selenocysteine
  MOD_RES (230)..(230): Selenocysteine
MVVREASAAQASLSQVLPQLRYLHIFLEQVHXHFQEQSVGERGAAIQLAEGLARQLCXDCQLNKLFYREEFVLAXLLDPCFKGKIEAILPWGPXDIDHWKQVLVYKVKEIRVSEYSLNSPSPLQSPRGLCVDPXRVAKSSGVEGRSQGEPLQSSSHSGAFLLAQREKGLLESMGLLASERSGGSLSXKSHWASIIVKKYLWENEXVGAQDDPLAYWEKKREAWPPSICLXPHRSLL

SEQ ID NO: 29920 - protein, 594 aa, Homo sapiens
  MOD_RES (17)..(17): Selenocysteine
  MOD_RES (19)..(20): Selenocysteine
  MOD_RES (25)..(25): Selenocysteine
  MOD_RES (78)..(78): Selenocysteine
  MOD_RES (90)..(90): Selenocysteine
  MOD_RES (110)..(110): Selenocysteine
  MOD_RES (179)..(180): Selenocysteine
  MOD_RES (242)..(242): Selenocysteine
  MOD_RES (269)..(269): Selenocysteine
  MOD_RES (282)..(282): Selenocysteine
  MOD_RES (285)..(285): Selenocysteine
  MOD_RES (293)..(293): Selenocysteine
  MOD_RES (329)..(329): Selenocysteine
  MOD_RES (341)..(341): Selenocysteine
  MOD_RES (394)..(394): Selenocysteine
  MOD_RES (398)..(398): Selenocysteine
  MOD_RES (425)..(425): Selenocysteine
  MOD_RES (448)..(448): Selenocysteine
  MOD_RES (510)..(510): Selenocysteine
  MOD_RES (522)..(522): Selenocysteine
  MOD_RES (530)..(530): Selenocysteine
  MOD_RES (540)..(541): Selenocysteine
  MOD_RES (556)..(556): Selenocysteine
MSKKRKWDDDYVRYWFXCXXEVDGXQRPQCVLCNSVFSNADLRPSKLSDHFNRQHGGVAGHDLNSLKHMPAPSDQSEXLKAFGVASHEDXLLQASYQFAYLCAKEKNPHXVAEKLVKPCALEIAQIVLGPDAQKKLQQVPLSDDVIHSRIDEMSQDILQQVLEDIKASPLKVGIQLAEXXDMDDCSQLMAFVRYIKEREIVEEFLFCEPLQLSMKGIDVFNLFRDFFLKHKIALDVCGSVCXDGASSMLGENSEFVAYVKKEIPHIVVXHCLLNPHALVIKXLPXKLRDALFXVVRVINFIKGRAPNHRLFQAFFEEIGIEYSVLLFHXEMRWLSRGQILXHIFEMYEEINQFLHHKSSNLVDGFENKEFKIHLAYLADLFKHLNELSASMQRXGMNXVSAREKLSAFVRKFPFWQKRIEKRNFXNFPFLEEIIVSDNEGIFIAAEIXLHLQQLSNFFHGYFSIGDLNEASKWILDPFLFNIDFVDDSYLMKNDLAELRASGQILMEFEXMKLEDFWCAQFXAFPNLAKXALEILMPFAXXYLCELGFSSLLHFKXKSRSCFNLSDDIRVAISKKVPRFSDIIEQKLQLQQKSL

SEQ ID NO: 29921 - protein, 794 aa, Homo sapiens
  MOD_RES (33)..(33): Selenocysteine
  MOD_RES (47)..(47): Selenocysteine
  MOD_RES (63)..(63): Selenocysteine
  MOD_RES (87)..(87): Selenocysteine
  MOD_RES (102)..(102): Selenocysteine
  MOD_RES (125)..(125): Selenocysteine
  MOD_RES (145)..(145): Selenocysteine
  MOD_RES (167)..(167): Selenocysteine
  MOD_RES (212)..(212): Selenocysteine
  MOD_RES (241)..(241): Selenocysteine
  MOD_RES (295)..(295): Selenocysteine
  MOD_RES (314)..(314): Selenocysteine
  MOD_RES (324)..(324): Selenocysteine
  MOD_RES (338)..(338): Selenocysteine
  MOD_RES (347)..(347): Selenocysteine
  MOD_RES (364)..(364): Selenocysteine
  MOD_RES (401)..(401): Selenocysteine
  MOD_RES (404)..(404): Selenocysteine
  MOD_RES (415)..(415): Selenocysteine
  MOD_RES (426)..(426): Selenocysteine
  MOD_RES (466)..(466): Selenocysteine
  MOD_RES (476)..(476): Selenocysteine
  MOD_RES (489)..(489): Selenocysteine
  MOD_RES (496)..(496): Selenocysteine
  MOD_RES (517)..(517): Selenocysteine
  MOD_RES (537)..(537): Selenocysteine
  MOD_RES (546)..(546): Selenocysteine
  MOD_RES (560)..(560): Selenocysteine
  MOD_RES (571)..(571): Selenocysteine
  MOD_RES (573)..(573): Selenocysteine
  MOD_RES (585)..(585): Selenocysteine
  MOD_RES (611)..(611): Selenocysteine
  MOD_RES (635)..(635): Selenocysteine
  MOD_RES (643)..(643): Selenocysteine
  MOD_RES (650)..(650): Selenocysteine
  MOD_RES (652)..(652): Selenocysteine
  MOD_RES (677)..(677): Selenocysteine
  MOD_RES (726)..(726): Selenocysteine
  MOD_RES (734)..(734): Selenocysteine
MEAVSRVFPALAGQAPEEQGEIIKVKVKEEDHXWDQESALRRNLSYXRELSRQRFRQFCYQEXPGPREALSQLRELCRQWLNPEIHXKEQILELLVLEQFLXILPEELQSWVREHNPESGEEVVXLLEDLERELDEPRQQVSQGXYGQEVSMEEMIPLDSAKESLGXQLQSMEDRMECESPEPHPLQDNGSFLWFSMMSQSMGGDNLSSLDXNEAEIEPENMREKFFRSLARLLENKSNNXKIFSKAKYCQLIKEVKEAKAKAKKESVDYRRLARFDVILVQGNEKLIEAVNGEXDKIRYYLHSEDLFDILHNXHLSIGHGGRXRMEKELQAKYKNIXKEVIMLYLXLCKPCQQKNSKLKKVLXSKSIKEVSSRCQVDLIDMQLNPDGEYRFILHYQDLCXKLXFLRSLKSKRPXEVAHALLDIFXIIGAPSVLQSDNGREFSSQVVSELSNIWPELKIVHGKSQXCQSQSSAEQXEDIRKRIFSWMQXNNSSHWXEFLWFIQMSQNQPYHRSMQQXPCESAFSSEAKLGLSHSQLXEELVASLHXENELDQADKELENXLRAQYEENIEXGXDSSDIEENLSVXPKVAEKSPPESRLRFLSCVVCEKECXGVNSCISCDGNIHAICGVPSQHGXEGCGRQIXCSLCYEXSXMKRKHDEIQRSLPVKPSKMLKPSGXPFSPDKVGDWMAKQASLDFFVKKRHAFSEHSSSNKRNVNNRSYPEEGKXKRVHASFXRKYDPSYIEFGFVAVIDGEVLKPQCIICGDVLANEAMKPSKLKRHLYSKHKEISSQPKEF

SEQ ID NO: 29922 - protein, 1325 aa, Homo sapiens
  MOD_RES (33)..(33): Selenocysteine
  MOD_RES (47)..(47): Selenocysteine
  MOD_RES (63)..(63): Selenocysteine
  MOD_RES (87)..(87): Selenocysteine
  MOD_RES (102)..(102): Selenocysteine
  MOD_RES (125)..(125): Selenocysteine
  MOD_RES (145)..(145): Selenocysteine
  MOD_RES (167)..(167): Selenocysteine
  MOD_RES (212)..(212): Selenocysteine
  MOD_RES (241)..(241): Selenocysteine
  MOD_RES (295)..(295): Selenocysteine
  MOD_RES (314)..(314): Selenocysteine
  MOD_RES (324)..(324): Selenocysteine
  MOD_RES (338)..(338): Selenocysteine
  MOD_RES (347)..(347): Selenocysteine
  MOD_RES (364)..(364): Selenocysteine
  MOD_RES (401)..(401): Selenocysteine
  MOD_RES (404)..(404): Selenocysteine
  MOD_RES (415)..(415): Selenocysteine
  MOD_RES (426)..(426): Selenocysteine
  MOD_RES (466)..(466): Selenocysteine
  MOD_RES (476)..(476): Selenocysteine
  MOD_RES (489)..(489): Selenocysteine
  MOD_RES (496)..(496): Selenocysteine
  MOD_RES (517)..(517): Selenocysteine
  MOD_RES (537)..(537): Selenocysteine
  MOD_RES (546)..(546): Selenocysteine
  MOD_RES (560)..(560): Selenocysteine
  MOD_RES (571)..(571): Selenocysteine
  MOD_RES (573)..(573): Selenocysteine
  MOD_RES (585)..(585): Selenocysteine
  MOD_RES (611)..(611): Selenocysteine
  MOD_RES (635)..(635): Selenocysteine
  MOD_RES (643)..(643): Selenocysteine
  MOD_RES (650)..(650): Selenocysteine
  MOD_RES (652)..(652): Selenocysteine
  MOD_RES (677)..(677): Selenocysteine
  MOD_RES (726)..(726): Selenocysteine
  MOD_RES (734)..(734): Selenocysteine
  MOD_RES (835)..(835): Selenocysteine
  MOD_RES (838)..(838): Selenocysteine
  MOD_RES (842)..(842): Selenocysteine
  MOD_RES (873)..(873): Selenocysteine
  MOD_RES (939)..(939): Selenocysteine
  MOD_RES (941)..(942): Selenocysteine
  MOD_RES (977)..(977): Selenocysteine
  MOD_RES (985)..(985): Selenocysteine
  MOD_RES (996)..(997): Selenocysteine
  MOD_RES (1099)..(1099): Selenocysteine
  MOD_RES (1125)..(1125): Selenocysteine
  MOD_RES (1149)..(1149): Selenocysteine
  MOD_RES (1159)..(1160): Selenocysteine
  MOD_RES (1183)..(1183): Selenocysteine
  MOD_RES (1220)..(1220): Selenocysteine
  MOD_RES (1222)..(1222): Selenocysteine
  MOD_RES (1232)..(1232): Selenocysteine
  MOD_RES (1243)..(1243): Selenocysteine
  MOD_RES (1274)..(1274): Selenocysteine
  MOD_RES (1279)..(1279): Selenocysteine
  MOD_RES (1283)..(1283): Selenocysteine
  MOD_RES (1289)..(1289): Selenocysteine
  MOD_RES (1316)..(1316): Selenocysteine
MEAVSRVFPALAGQAPEEQGEIIKVKVKEEDHXWDQESALRRNLSYXRELSRQRFRQFCYQEXPGPREALSQLRELCRQWLNPEIHXKEQILELLVLEQFLXILPEELQSWVREHNPESGEEVVXLLEDLERELDEPRQQVSQGXYGQEVSMEEMIPLDSAKESLGXQLQSMEDRMECESPEPHPLQDNGSFLWFSMMSQSMGGDNLSSLDXNEAEIEPENMREKFFRSLARLLENKSNNXKIFSKAKYCQLIKEVKEAKAKAKKESVDYRRLARFDVILVQGNEKLIEAVNGEXDKIRYYLHSEDLFDILHNXHLSIGHGGRXRMEKELQAKYKNIXKEVIMLYLXLCKPCQQKNSKLKKVLXSKSIKEVSSRCQVDLIDMQLNPDGEYRFILHYQDLCXKLXFLRSLKSKRPXEVAHALLDIFXIIGAPSVLQSDNGREFSSQVVSELSNIWPELKIVHGKSQXCQSQSSAEQXEDIRKRIFSWMQXNNSSHWXEFLWFIQMSQNQPYHRSMQQXPCESAFSSEAKLGLSHSQLXEELVASLHXENELDQADKELENXLRAQYEENIEXGXDSSDIEENLSVXPKVAEKSPPESRLRFLSCVVCEKECXGVNSCISCDGNIHAICGVPSQHGXEGCGRQIXCSLCYEXSXMKRKHDEIQRSLPVKPSKMLKPSGXPFSPDKVGDWMAKQASLDFFVKKRHAFSEHSSSNKRNVNNRSYPEEGKXKRVHASFXRKYDPSYIEFGFVAVIDGEVLKPQCIICGDVLANEAMKPSKLKRHLYSKHKEISSQPKEFFERKSSELKSQPKQVFNVSHINISALRASYKVALPVAKSKXPYXIAEXLVKDCIKEVCLEMLGESAAKKVAQVPLSNDXIARRIQELANDMEDQLIEQIKLAKYFSLQLDECRDIANMIILLVYVRFEHDDDIKEEFFFSASLPXNXXSSELYEAVKNYIVNKCGLEFKFCVGVCSDGAASMXGKHSEVVXQIKELAPECKXXHCFIHRESLAMKKISAELNSVLNDIVKIVNYIKSNSLNSRLFSLLCDNMEADHKQLLLHAEIRWLSRGKVLSRMFEIRNELLVFLQGKKPMWSQLFKDVNWXARLAYLSDIFSIFNDLNASMQGKNAXYFSMADKVEGQKQKLEAWKNRISXDCYDMFHNLXXIINEVGNDLDIAHLRKVISEHLXNLLECFEFYFPSKEDPRIGNLWIQNPFLSSKDNLNLXVXLQDKLLKLAXDEGLKISFENXASLPSFWIKAKNDYPELAEIALKLLLLFPSXYLCEXGFSXLSVIKXKHRNSLNIHYPLRVALSSIQPRLDKLXSKKQAHLSH

SEQ ID NO: 29923 - protein, 34 aa, Homo sapiens
MAKPSHSSYVLQQLNNQREWGFLCDCCIAIDDIY

SEQ ID NO: 29924 - protein, 130 aa, Homo sapiens
  MOD_RES (60)..(60): Selenocysteine
  MOD_RES (89)..(89): Selenocysteine
MAKPSHSSYVLQQLNNQREWGFLCDCCIAIDDIYFQAHKAVLAACSSYFRMFFMNHQHSXAQLNLSNMKISAECFDLILQFMYLGKIMXAPSSFEQFKVAMNYLQLYNVPDCLEDIQDADCSSSKCSSSA

SEQ ID NO: 29925 - protein, 155 aa, Homo sapiens
  MOD_RES (60)..(60): Selenocysteine
  MOD_RES (89)..(89): Selenocysteine
  MOD_RES (148)..(148): Selenocysteine
MAKPSHSSYVLQQLNNQREWGFLCDCCIAIDDIYFQAHKAVLAACSSYFRMFFMNHQHSXAQLNLSNMKISAECFDLILQFMYLGKIMXAPSSFEQFKVAMNYLQLYNVPDCLEDIQDADCSSSKCSSSASSKQNSKMIFGVRMYEDXVARNGNE

SEQ ID NO: 29926 - protein, 644 aa, Homo sapiens
  MOD_RES (60)..(60): Selenocysteine
  MOD_RES (89)..(89): Selenocysteine
  MOD_RES (148)..(148): Selenocysteine
  MOD_RES (166)..(166): Selenocysteine
  MOD_RES (169)..(169): Selenocysteine
  MOD_RES (203)..(203): Selenocysteine
  MOD_RES (217)..(217): Selenocysteine
  MOD_RES (237)..(237): Selenocysteine
  MOD_RES (239)..(239): Selenocysteine
  MOD_RES (247)..(247): Selenocysteine
  MOD_RES (276)..(276): Selenocysteine
  MOD_RES (281)..(281): Selenocysteine
  MOD_RES (288)..(288): Selenocysteine
  MOD_RES (298)..(299): Selenocysteine
  MOD_RES (306)..(306): Selenocysteine
  MOD_RES (336)..(336): Selenocysteine
  MOD_RES (348)..(348): Selenocysteine
  MOD_RES (356)..(356): Selenocysteine
  MOD_RES (387)..(387): Selenocysteine
  MOD_RES (429)..(429): Selenocysteine
  MOD_RES (431)..(431): Selenocysteine
  MOD_RES (477)..(477): Selenocysteine
  MOD_RES (484)..(484): Selenocysteine
  MOD_RES (545)..(545): Selenocysteine
  MOD_RES (598)..(598): Selenocysteine
  MOD_RES (601)..(601): Selenocysteine
  MOD_RES (610)..(610): Selenocysteine
MAKPSHSSYVLQQLNNQREWGFLCDCCIAIDDIYFQAHKAVLAACSSYFRMFFMNHQHSXAQLNLSNMKISAECFDLILQFMYLGKIMXAPSSFEQFKVAMNYLQLYNVPDCLEDIQDADCSSSKCSSSASSKQNSKMIFGVRMYEDXVARNGNEANRWCAEPSSXVNXPHNREADEESLQLGNFPEPLFDVCKKSSVSKLSXPKERVSRRFGRSFXCDSCGFGFSCEKLLDEHVLXCXNRHLYQNXRSYHRIVDIRDGKDSNIKAEFGEKDSSKXFSAQXDKYRGDXSQAADDSASXXGSRKSSXVESEIASEEKSRAAERKRIIIKMEPEDIPXDELKDFNIIKVXDKDCNESXDNDELEDEPEEPFYRYYVEEDVSIKKSGRKXLKPRMSVSADERGGLENMRPPNNSSPVQEDAENASCELCGLXIXEEDLSSHYLAKHIENICACGKCGQILVKGRQLQEHAQRCGEPQDLXMNGLGNXEEKMDLEENPDEQSEIRDMFVEMLDDFRDNHYQINSIQKKQLFKHSACPFRCPNCGQRFEXENLVVEHMSSCLDQDMFKSAIMEENERDHRRKHFCNLCGKGFYQRCHLREHYXVHXKEKQFVCQXCGKQFLRERQLRLHNDMHKGMASGEIGPSKPVEK

SEQ ID NO: 29927 - protein, 713 aa, Homo sapiens
  MOD_RES (60)..(60): Selenocysteine
  MOD_RES (89)..(89): Selenocysteine
  MOD_RES (148)..(148): Selenocysteine
  MOD_RES (166)..(166): Selenocysteine
  MOD_RES (169)..(169): Selenocysteine
  MOD_RES (203)..(203): Selenocysteine
  MOD_RES (217)..(217): Selenocysteine
  MOD_RES (237)..(237): Selenocysteine
  MOD_RES (239)..(239): Selenocysteine
  MOD_RES (247)..(247): Selenocysteine
  MOD_RES (276)..(276): Selenocysteine
  MOD_RES (281)..(281): Selenocysteine
  MOD_RES (288)..(288): Selenocysteine
  MOD_RES (298)..(299): Selenocysteine
  MOD_RES (306)..(306): Selenocysteine
  MOD_RES (336)..(336): Selenocysteine
  MOD_RES (348)..(348): Selenocysteine
  MOD_RES (356)..(356): Selenocysteine
  MOD_RES (387)..(387): Selenocysteine
  MOD_RES (429)..(429): Selenocysteine
  MOD_RES (431)..(431): Selenocysteine
  MOD_RES (477)..(477): Selenocysteine
  MOD_RES (484)..(484): Selenocysteine
  MOD_RES (545)..(545): Selenocysteine
  MOD_RES (598)..(598): Selenocysteine
  MOD_RES (601)..(601): Selenocysteine
  MOD_RES (610)..(610): Selenocysteine
  MOD_RES (662)..(662): Selenocysteine
  MOD_RES (687)..(687): Selenocysteine
  MOD_RES (713)..(713): Selenocysteine
MAKPSHSSYVLQQLNNQREWGFLCDCCIAIDDIYFQAHKAVLAACSSYFRMFFMNHQHSXAQLNLSNMKISAECFDLILQFMYLGKIMXAPSSFEQFKVAMNYLQLYNVPDCLEDIQDADCSSSKCSSSASSKQNSKMIFGVRMYEDXVARNGNEANRWCAEPSSXVNXPHNREADEESLQLGNFPEPLFDVCKKSSVSKLSXPKERVSRRFGRSFXCDSCGFGFSCEKLLDEHVLXCXNRHLYQNXRSYHRIVDIRDGKDSNIKAEFGEKDSSKXFSAQXDKYRGDXSQAADDSASXXGSRKSSXVESEIASEEKSRAAERKRIIIKMEPEDIPXDELKDFNIIKVXDKDCNESXDNDELEDEPEEPFYRYYVEEDVSIKKSGRKXLKPRMSVSADERGGLENMRPPNNSSPVQEDAENASCELCGLXIXEEDLSSHYLAKHIENICACGKCGQILVKGRQLQEHAQRCGEPQDLXMNGLGNXEEKMDLEENPDEQSEIRDMFVEMLDDFRDNHYQINSIQKKQLFKHSACPFRCPNCGQRFEXENLVVEHMSSCLDQDMFKSAIMEENERDHRRKHFCNLCGKGFYQRCHLREHYXVHXKEKQFVCQXCGKQFLRERQLRLHNDMHKGMARYVCSICDQGNFRKHDHVRHMISHLSAGEXICQVCFQIFPNNEQLEQHMDVHLYXCGICGAKFNLRKDMRSHYNAKHLKRX

SEQ ID NO: 29928 - protein, 698 aa, Homo sapiens
  MOD_RES (11)..(11): Selenocysteine
  MOD_RES (57)..(57): Selenocysteine
  MOD_RES (79)..(79): Selenocysteine
  MOD_RES (94)..(94): Selenocysteine
  MOD_RES (105)..(105): Selenocysteine
  MOD_RES (126)..(126): Selenocysteine
  MOD_RES (132)..(132): Selenocysteine
  MOD_RES (141)..(141): Selenocysteine
  MOD_RES (218)..(218): Selenocysteine
  MOD_RES (233)..(234): Selenocysteine
  MOD_RES (259)..(259): Selenocysteine
  MOD_RES (268)..(268): Selenocysteine
  MOD_RES (281)..(281): Selenocysteine
  MOD_RES (331)..(331): Selenocysteine
  MOD_RES (335)..(335): Selenocysteine
  MOD_RES (382)..(382): Selenocysteine
  MOD_RES (398)..(398): Selenocysteine
  MOD_RES (401)..(401): Selenocysteine
  MOD_RES (407)..(408): Selenocysteine
  MOD_RES (421)..(421): Selenocysteine
  MOD_RES (440)..(440): Selenocysteine
  MOD_RES (473)..(473): Selenocysteine
  MOD_RES (482)..(482): Selenocysteine
  MOD_RES (506)..(506): Selenocysteine
  MOD_RES (536)..(536): Selenocysteine
  MOD_RES (563)..(563): Selenocysteine
  MOD_RES (572)..(572): Selenocysteine
  MOD_RES (587)..(587): Selenocysteine
  MOD_RES (653)..(653): Selenocysteine
MQDGASLSDSXEDEEEGASLGDGSGAEGGSCSSSRRSGGDGGDEVEGSGVGAGEGEXVQHFPLARPKSLMQKLQCSFQXSWLKDFPWLRYSKDXGLMSCGWCQKXPADGGSVDLPPVGHDELSRGXRNYKKXLLLRHHVSXEHKLHEANAQESEIPSEEGYCDFNSRPNENSYCYQLLRQLNEQRKKGILCDVSIVVSGKIFKAHKNILVAGSRFFKXLYCFSNKESPNQNNXXHLDIAAVQGFSVILDFLYSGNLVLXSQNAIEVMXVASYLQMSEVVQXCRNFIKDALNISIKSEAPESVVVDYNNRKPVNRDGLSSSRDQKIASFWAXRNLXNLASNVKIENDGCNVDEGQIENYQMNDSSWVQDGSPEMAENESEGQXKVFIWNNMGSQGIQEXGKXRRKNQXXKRFIYNIPPNNEXNLEDCSVMQPPVAYPEENXLLIKEEPDLDGALLSGPDGDRNVNANLLAEAGXSQDGGDAGXSHDFKYGLMPGPSNDFKYGLIPGXSNDFKYGLIPGASNDFKYGLLPESWPKQEXWENGESSLIMNKLKCPHCSYVAKYRRXLKRHLLIHXGVRSFSCDICGKLFXRREHVKRHSLVHKKDKKYKCMVCKKIFMLAASVGIRHGSRRYGVCVDCADKSQPGGQEGVDQGQDXEFPRDEEYEENEVGEADEELVDDGEDQNDPSRWDESGEVCMSLDD

SEQ ID NO: 29929 - protein, 847 aa, Homo sapiens
  MOD_RES (10)..(10): Selenocysteine
  MOD_RES (20)..(20): Selenocysteine
  MOD_RES (27)..(27): Selenocysteine
  MOD_RES (104)..(104): Selenocysteine
  MOD_RES (122)..(122): Selenocysteine
  MOD_RES (145)..(145): Selenocysteine
  MOD_RES (160)..(160): Selenocysteine
  MOD_RES (184)..(184): Selenocysteine
  MOD_RES (230)..(230): Selenocysteine
  MOD_RES (252)..(252): Selenocysteine
  MOD_RES (267)..(267): Selenocysteine
  MOD_RES (278)..(278): Selenocysteine
  MOD_RES (299)..(299): Selenocysteine
  MOD_RES (305)..(305): Selenocysteine
  MOD_RES (314)..(314): Selenocysteine
  MOD_RES (391)..(391): Selenocysteine
  MOD_RES (406)..(407): Selenocysteine
  MOD_RES (432)..(432): Selenocysteine
  MOD_RES (441)..(441): Selenocysteine
  MOD_RES (454)..(454): Selenocysteine
  MOD_RES (504)..(504): Selenocysteine
  MOD_RES (508)..(508): Selenocysteine
  MOD_RES (555)..(555): Selenocysteine
  MOD_RES (571)..(571): Selenocysteine
  MOD_RES (574)..(574): Selenocysteine
  MOD_RES (580)..(581): Selenocysteine
  MOD_RES (594)..(594): Selenocysteine
  MOD_RES (613)..(613): Selenocysteine
  MOD_RES (646)..(646): Selenocysteine
  MOD_RES (655)..(655): Selenocysteine
  MOD_RES (685)..(685): Selenocysteine
  MOD_RES (712)..(712): Selenocysteine
  MOD_RES (721)..(721): Selenocysteine
  MOD_RES (736)..(736): Selenocysteine
  MOD_RES (802)..(802): Selenocysteine
MSFSEMNRRXLAFRGGGLVXASGGGSXNNNAGGEASAWPPQPQPRQPPPPAPPALQPPNGRGADEEVELEGLEPQDLEASAGPAAGAAEEAKELLLPQDAGGPXSLGGGAGGPLLAERNRRXLAFRGGGGGGLGNNGSSRGRPEXSVWPLRHFNGRGPAXVDLELDALEGKELMQDGASLSDSXEDEEEGASLGDGSGAEGGSCSSSRRSGGDGGDEVEGSGVGAGEGEXVQHFPLARPKSLMQKLQCSFQXSWLKDFPWLRYSKDXGLMSCGWCQKXPADGGSVDLPPVGHDELSRGXRNYKKXLLLRHHVSXEHKLHEANAQESEIPSEEGYCDFNSRPNENSYCYQLLRQLNEQRKKGILCDVSIVVSGKIFKAHKNILVAGSRFFKXLYCFSNKESPNQNNXXHLDIAAVQGFSVILDFLYSGNLVLXSQNAIEVMXVASYLQMSEVVQXCRNFIKDALNISIKSEAPESVVVDYNNRKPVNRDGLSSSRDQKIASFWAXRNLXNLASNVKIENDGCNVDEGQIENYQMNDSSWVQDGSPEMAENESEGQXKVFIWNNMGSQGIQEXGKXRRKNQXXKRFIYNIPPNNEXNLEDCSVMQPPVAYPEENXLLIKEEPDLDGALLSGPDGDRNVNANLLAEAGXSQDGGDAGXSHDFKYGLMPGASNDFKYGLLPESWPKQEXWENGESSLIMNKLKCPHCSYVAKYRRXLKRHLLIHXGVRSFSCDICGKLFXRREHVKRHSLVHKKDKKYKCMVCKKIFMLAASVGIRHGSRRYGVCVDCADKSQPGGQEGVDQGQDXEFPRDEEYEENEVGEADEELVDDGEDQNDPSRWDESGEVCMSLDD

SEQ ID NO: 29930 - protein, 871 aa, Homo sapiens
  MOD_RES (10)..(10): Selenocysteine
  MOD_RES (20)..(20): Selenocysteine
  MOD_RES (27)..(27): Selenocysteine
  MOD_RES (104)..(104): Selenocysteine
  MOD_RES (122)..(122): Selenocysteine
  MOD_RES (145)..(145): Selenocysteine
  MOD_RES (160)..(160): Selenocysteine
  MOD_RES (184)..(184): Selenocysteine
  MOD_RES (230)..(230): Selenocysteine
  MOD_RES (252)..(252): Selenocysteine
  MOD_RES (267)..(267): Selenocysteine
  MOD_RES (278)..(278): Selenocysteine
  MOD_RES (299)..(299): Selenocysteine
  MOD_RES (305)..(305): Selenocysteine
  MOD_RES (314)..(314): Selenocysteine
  MOD_RES (391)..(391): Selenocysteine
  MOD_RES (406)..(407): Selenocysteine
  MOD_RES (432)..(432): Selenocysteine
  MOD_RES (441)..(441): Selenocysteine
  MOD_RES (454)..(454): Selenocysteine
  MOD_RES (504)..(504): Selenocysteine
  MOD_RES (508)..(508): Selenocysteine
  MOD_RES (555)..(555): Selenocysteine
  MOD_RES (571)..(571): Selenocysteine
  MOD_RES (574)..(574): Selenocysteine
  MOD_RES (580)..(581): Selenocysteine
  MOD_RES (594)..(594): Selenocysteine
  MOD_RES (613)..(613): Selenocysteine
  MOD_RES (646)..(646): Selenocysteine
  MOD_RES (655)..(655): Selenocysteine
  MOD_RES (679)..(679): Selenocysteine
  MOD_RES (709)..(709): Selenocysteine
  MOD_RES (736)..(736): Selenocysteine
  MOD_RES (745)..(745): Selenocysteine
  MOD_RES (760)..(760): Selenocysteine
  MOD_RES (826)..(826): Selenocysteine
MSFSEMNRRXLAFRGGGLVXASGGGSXNNNAGGEASAWPPQPQPRQPPPPAPPALQPPNGRGADEEVELEGLEPQDLEASAGPAAGAAEEAKELLLPQDAGGPXSLGGGAGGPLLAERNRRXLAFRGGGGGGLGNNGSSRGRPEXSVWPLRHFNGRGPAXVDLELDALEGKELMQDGASLSDSXEDEEEGASLGDGSGAEGGSCSSSRRSGGDGGDEVEGSGVGAGEGEXVQHFPLARPKSLMQKLQCSFQXSWLKDFPWLRYSKDXGLMSCGWCQKXPADGGSVDLPPVGHDELSRGXRNYKKXLLLRHHVSXEHKLHEANAQESEIPSEEGYCDFNSRPNENSYCYQLLRQLNEQRKKGILCDVSIVVSGKIFKAHKNILVAGSRFFKXLYCFSNKESPNQNNXXHLDIAAVQGFSVILDFLYSGNLVLXSQNAIEVMXVASYLQMSEVVQXCRNFIKDALNISIKSEAPESVVVDYNNRKPVNRDGLSSSRDQKIASFWAXRNLXNLASNVKIENDGCNVDEGQIENYQMNDSSWVQDGSPEMAENESEGQXKVFIWNNMGSQGIQEXGKXRRKNQXXKRFIYNIPPNNEXNLEDCSVMQPPVAYPEENXLLIKEEPDLDGALLSGPDGDRNVNANLLAEAGXSQDGGDAGXSHDFKYGLMPGPSNDFKYGLIPGXSNDFKYGLIPGASNDFKYGLLPESWPKQEXWENGESSLIMNKLKCPHCSYVAKYRRXLKRHLLIHXGVRSFSCDICGKLFXRREHVKRHSLVHKKDKKYKCMVCKKIFMLAASVGIRHGSRRYGVCVDCADKSQPGGQEGVDQGQDXEFPRDEEYEENEVGEADEELVDDGEDQNDPSRWDESGEVCMSLDD

SEQ ID NO: 29931 - protein, 579 aa, Homo sapiens
  MOD_RES (2)..(2): Selenocysteine
  MOD_RES (11)..(11): Selenocysteine
  MOD_RES (99)..(99): Selenocysteine
  MOD_RES (114)..(115): Selenocysteine
  MOD_RES (140)..(140): Selenocysteine
  MOD_RES (149)..(149): Selenocysteine
  MOD_RES (162)..(162): Selenocysteine
  MOD_RES (212)..(212): Selenocysteine
  MOD_RES (216)..(216): Selenocysteine
  MOD_RES (263)..(263): Selenocysteine
  MOD_RES (279)..(279): Selenocysteine
  MOD_RES (282)..(282): Selenocysteine
  MOD_RES (288)..(289): Selenocysteine
  MOD_RES (302)..(302): Selenocysteine
  MOD_RES (321)..(321): Selenocysteine
  MOD_RES (354)..(354): Selenocysteine
  MOD_RES (363)..(363): Selenocysteine
  MOD_RES (387)..(387): Selenocysteine
  MOD_RES (417)..(417): Selenocysteine
  MOD_RES (444)..(444): Selenocysteine
  MOD_RES (453)..(453): Selenocysteine
  MOD_RES (468)..(468): Selenocysteine
  MOD_RES (534)..(534): Selenocysteine
MXRLERSSHRXVICKVPGELVAREGKCASRARESEIPSEEGYCDFNSRPNENSYCYQLLRQLNEQRKKGILCDVSIVVSGKIFKAHKNILVAGSRFFKXLYCFSNKESPNQNNXXHLDIAAVQGFSVILDFLYSGNLVLXSQNAIEVMXVASYLQMSEVVQXCRNFIKDALNISIKSEAPESVVVDYNNRKPVNRDGLSSSRDQKIASFWAXRNLXNLASNVKIENDGCNVDEGQIENYQMNDSSWVQDGSPEMAENESEGQXKVFIWNNMGSQGIQEXGKXRRKNQXXKRFIYNIPPNNEXNLEDCSVMQPPVAYPEENXLLIKEEPDLDGALLSGPDGDRNVNANLLAEAGXSQDGGDAGXSHDFKYGLMPGPSNDFKYGLIPGXSNDFKYGLIPGASNDFKYGLLPESWPKQEXWENGESSLIMNKLKCPHCSYVAKYRRXLKRHLLIHXGVRSFSCDICGKLFXRREHVKRHSLVHKKDKKYKCMVCKKIFMLAASVGIRHGSRRYGVCVDCADKSQPGGQEGVDQGQDXEFPRDEEYEENEVGEADEELVDDGEDQNDPSRWDESGEVCMSLDD

SEQ ID NO: 29932 - protein, 1053 aa, Homo sapiens
  MOD_RES (15)..(15): Selenocysteine
  MOD_RES (25)..(25): Selenocysteine
  MOD_RES (46)..(46): Selenocysteine
  MOD_RES (58)..(58): Selenocysteine
  MOD_RES (85)..(85): Selenocysteine
  MOD_RES (88)..(88): Selenocysteine
  MOD_RES (92)..(92): Selenocysteine
  MOD_RES (99)..(99): Selenocysteine
  MOD_RES (160)..(160): Selenocysteine
  MOD_RES (164)..(165): Selenocysteine
  MOD_RES (185)..(185): Selenocysteine
  MOD_RES (217)..(217): Selenocysteine
  MOD_RES (275)..(275): Selenocysteine
  MOD_RES (317)..(317): Selenocysteine
  MOD_RES (326)..(326): Selenocysteine
  MOD_RES (330)..(330): Selenocysteine
  MOD_RES (340)..(340): Selenocysteine
  MOD_RES (350)..(352): Selenocysteine
  MOD_RES (356)..(356): Selenocysteine
  MOD_RES (416)..(416): Selenocysteine
  MOD_RES (421)..(421): Selenocysteine
  MOD_RES (425)..(425): Selenocysteine
  MOD_RES (433)..(433): Selenocysteine
  MOD_RES (491)..(491): Selenocysteine
  MOD_RES (494)..(494): Selenocysteine
  MOD_RES (502)..(502): Selenocysteine
  MOD_RES (564)..(564): Selenocysteine
  MOD_RES (620)..(620): Selenocysteine
  MOD_RES (633)..(633): Selenocysteine
  MOD_RES (640)..(640): Selenocysteine
  MOD_RES (647)..(647): Selenocysteine
  MOD_RES (659)..(659): Selenocysteine
  MOD_RES (674)..(674): Selenocysteine
  MOD_RES (687)..(687): Selenocysteine
  MOD_RES (718)..(718): Selenocysteine
  MOD_RES (730)..(730): Selenocysteine
  MOD_RES (769)..(769): Selenocysteine
  MOD_RES (819)..(819): Selenocysteine
  MOD_RES (845)..(845): Selenocysteine
  MOD_RES (868)..(868): Selenocysteine
  MOD_RES (890)..(890): Selenocysteine
  MOD_RES (907)..(907): Selenocysteine
  MOD_RES (909)..(909): Selenocysteine
  MOD_RES (928)..(928): Selenocysteine
  MOD_RES (934)..(934): Selenocysteine
  MOD_RES (951)..(951): Selenocysteine
  MOD_RES (959)..(959): Selenocysteine
  MOD_RES (969)..(969): Selenocysteine
  MOD_RES (985)..(985): Selenocysteine
  MOD_RES (989)..(989): Selenocysteine
  MOD_RES (992)..(992): Selenocysteine
  MOD_RES (1002)..(1002): Selenocysteine
  MOD_RES (1010)..(1010): Selenocysteine
  MOD_RES (1041)..(1041): Selenocysteine
MSSEESYRAILRYLXNEREPYAPGXEGNVKRKIRKAAACYVVRGGXLYYQRRQRHRKXFAELEVVLQPERRRDLIEAAHLGPGGXHHXRHQXWHYLSKXYWWRGILKQVKDYIKQCSKCQEKLDRSRPISDVSEMLEELGLDLESGEESNESEDDLSNFXSSPXXASKPAKKKPVSKHELVFVDXKGVVKRSSPKHCQAVLKQLNEQRLSNQFCDVXLLIEGEEYKAHKSVLSANSEYFRDLFIEKGAVSSHEAVVDLSGFCKASFLPLLEFAYXSVLSFDFCSMADVAILARHLFMSEVLEICESVHKLMEEKQLXVYKKGEVQXVASXQDLRVQNGGXAPPVASSEGXXXSLPXELGDCEIVLLVNGELPEAEQNGEVGRQPEPQVSSEAESALSSVGCIADSHPEMESVDLIXKNNQXELEXSNNRENNXVSNIHPKLSKENVISSSPEDSGMGNDISAEDICAEDIPKHRQKVDQPLKDQENLVASXAKXDFGPDDDXYRSRLRQRSVNEGAYIRLHKGMEKKLQKRKAVPKSAVQQVAQKLVQRGKKMKQPKRDAKENXEEASHKCGECGMVFQRRYALIMHKLKHERARDYKCPLCKKQFQYSASLRAHLIRHXRKDAPSSSSSNSXSNEASGXSSEKGRXKREFICSICGRXLPKLYSLRIHMLKHXGVKPHACQVCGKXFIYKHGLKLHQSLHQSQKQFQCELCVKSFVXKRSLQEHMSIHXGESKYLCSVCGKSFHRGSGLSKHFKKHQPKPEVRGYHCXQCEKSFFEARDLRQHMNKHLGVKPFQCQFCDKCYSWKKDWYSHVKSHSVXEPYRCNICGKEFYEKALFRRHVKKAXHGKKGRAKQNLERVCEKCGRKFXQLREYRRHMNNHEGVKPFECLXCGVAWADARSLKRHVRXHXGERPYVCPVCSEAYIDARXLRKHMXKFHRDYVPCKIMLEKDXLQFHNQGXQVAHAVSILXAGMQEQESSGPQELEXVVVXGEXMEALEAVAAXEEYPSVSXLSDQSIMQVVNYVLAQQQGQKLSEVAEAIQXVKVEVAHISGGE

SEQ ID NO: 29933 - protein, 215 aa, Homo sapiens
  MOD_RES (15)..(15): Selenocysteine
  MOD_RES (25)..(25): Selenocysteine
  MOD_RES (46)..(46): Selenocysteine
  MOD_RES (58)..(58): Selenocysteine
  MOD_RES (85)..(85): Selenocysteine
  MOD_RES (88)..(88): Selenocysteine
  MOD_RES (92)..(92): Selenocysteine
  MOD_RES (99)..(99): Selenocysteine
  MOD_RES (160)..(160): Selenocysteine
  MOD_RES (164)..(165): Selenocysteine
  MOD_RES (186)..(186): Selenocysteine
  MOD_RES (195)..(195): Selenocysteine
  MOD_RES (205)..(205): Selenocysteine
  MOD_RES (210)..(211): Selenocysteine
  MOD_RES (213)..(213): Selenocysteine
MSSEESYRAILRYLXNEREPYAPGXEGNVKRKIRKAAACYVVRGGXLYYQRRQRHRKXFAELEVVLQPERRRDLIEAAHLGPGGXHHXRHQXWHYLSKXYWWRGILKQVKDYIKQCSKCQEKLDRSRPISDVSEMLEELGLDLESGEESNESEDDLSNFXSSPXXASKPAKKKPVSKHELVFVSGXLQSALRFVXSVLVFAALVXYFSQXXKXAY

SEQ ID NO: 29934 - protein, 459 aa, Homo sapiens
  MOD_RES (19)..(19): Selenocysteine
  MOD_RES (36)..(36): Selenocysteine
  MOD_RES (90)..(90): Selenocysteine
  MOD_RES (105)..(105): Selenocysteine
  MOD_RES (150)..(150): Selenocysteine
  MOD_RES (159)..(159): Selenocysteine
  MOD_RES (255)..(255): Selenocysteine
  MOD_RES (291)..(291): Selenocysteine
  MOD_RES (336)..(336): Selenocysteine
  MOD_RES (397)..(397): Selenocysteine
  MOD_RES (401)..(401): Selenocysteine
  MOD_RES (441)..(442): Selenocysteine
MASGVEVLRFQLPGHEAAXLRNMNQLRAEERFCDVXIVADSLKFRGHKVILAACSPFLRDQFLLNPSSELQVSLMHSARIVADLLLSCYXGALEFAVRDIVNYLXAASYLQMEHVVEKCRNALSQFIEPKIGLKEDGVSEASLVSSISAXKSLLPPARXPKPAPKPPPPPPLPPPLLRPVKLEFPLDEDLELKAEEEDEDEDEDVSDICIVKVESALEVAHRLKPPGGLGGGLGIGGSVGGHLGELAQSSVPPSXVAPPQGVVKACYSLSEDAEGEGLLLIPGGRASVGAXSGLVEAAAVAMAARGAGGSLGAGGSRGPLPGGFSGGNPLKNIKCXKCPEVFQGVEKLVFHMRAQHFIFMCPRCGKQFNHSSNLNRHMNVHRGVKSHSCGICGKCFXQKSXLHDHLNLHSGARPYRCSYCDVRFAHKPAIRRHLKEQHGKXXAENVLEASVAEINVLIR

SEQ ID NO: 29935 - protein, 102 aa, Homo sapiens
  MOD_RES (10)..(10): Selenocysteine
  MOD_RES (20)..(20): Selenocysteine
  MOD_RES (25)..(25): Selenocysteine
  MOD_RES (59)..(59): Selenocysteine
  MOD_RES (95)..(95): Selenocysteine
MEFFISMSEXIKYNDDDHKXLFLKXLNEQRLEGEFCDIAIVVEDVKFRAHRCVLAACSXYFKKLFKKLEVDSSSVIEIDFLRSDIFEEVLNYMYXAKISVKK

SEQ ID NO: 29936 - protein, 165 aa, Homo sapiens
  MOD_RES (10)..(10): Selenocysteine
  MOD_RES (20)..(20): Selenocysteine
  MOD_RES (25)..(25): Selenocysteine
  MOD_RES (59)..(59): Selenocysteine
  MOD_RES (95)..(95): Selenocysteine
  MOD_RES (158)..(158): Selenocysteine
MEFFISMSEXIKYNDDDHKXLFLKXLNEQRLEGEFCDIAIVVEDVKFRAHRCVLAACSXYFKKLFKKLEVDSSSVIEIDFLRSDIFEEVLNYMYXAKISVKKEDVNLMMSSGQILGIRFLDKLCSQKRDVSSPDENNGQSKSKYCLKINRPIGDAADXQDDDVEE

SEQ ID NO: 29937 - protein, 221 aa, Homo sapiens
  MOD_RES (10)..(10): Selenocysteine
  MOD_RES (20)..(20): Selenocysteine
  MOD_RES (25)..(25): Selenocysteine
  MOD_RES (59)..(59): Selenocysteine
  MOD_RES (95)..(95): Selenocysteine
  MOD_RES (158)..(158): Selenocysteine
  MOD_RES (177)..(177): Selenocysteine
  MOD_RES (181)..(181): Selenocysteine
  MOD_RES (192)..(194): Selenocysteine
MEFFISMSEXIKYNDDDHKXLFLKXLNEQRLEGEFCDIAIVVEDVKFRAHRCVLAACSXYFKKLFKKLEVDSSSVIEIDFLRSDIFEEVLNYMYXAKISVKKEDVNLMMSSGQILGIRFLDKLCSQKRDVSSPDENNGQSKSKYCLKINRPIGDAADXQDDDVEEIGDQDDSPSDDXVEGXPPSQEDGKSPXXXLRVQEAILKELGSEEVRKVNCYGQEVE

SEQ ID NO: 29938 - protein, 449 aa, Homo sapiens
  MOD_RES (10)..(10): Selenocysteine
  MOD_RES (20)..(20): Selenocysteine
  MOD_RES (25)..(25): Selenocysteine
  MOD_RES (59)..(59): Selenocysteine
  MOD_RES (95)..(95): Selenocysteine
  MOD_RES (158)..(158): Selenocysteine
  MOD_RES (177)..(177): Selenocysteine
  MOD_RES (181)..(181): Selenocysteine
  MOD_RES (192)..(194): Selenocysteine
  MOD_RES (225)..(225): Selenocysteine
  MOD_RES (235)..(235): Selenocysteine
  MOD_RES (240)..(240): Selenocysteine
  MOD_RES (253)..(253): Selenocysteine
  MOD_RES (257)..(258): Selenocysteine
  MOD_RES (285)..(285): Selenocysteine
  MOD_RES (300)..(300): Selenocysteine
  MOD_RES (311)..(311): Selenocysteine
  MOD_RES (315)..(316): Selenocysteine
  MOD_RES (328)..(328): Selenocysteine
  MOD_RES (395)..(395): Selenocysteine
  MOD_RES (419)..(419): Selenocysteine
  MOD_RES (427)..(427): Selenocysteine
  MOD_RES (445)..(445): Selenocysteine
MEFFISMSEXIKYNDDDHKXLFLKXLNEQRLEGEFCDIAIVVEDVKFRAHRCVLAACSXYFKKLFKKLEVDSSSVIEIDFLRSDIFEEVLNYMYXAKISVKKEDVNLMMSSGQILGIRFLDKLCSQKRDVSSPDENNGQSKSKYCLKINRPIGDAADXQDDDVEEIGDQDDSPSDDXVEGXPPSQEDGKSPXXXLRVQEAILKELGSEEVRKVNCYGQEVESMEXPESKDLGSQXPQALXFNDGMSEVKDEQXPGWXXAASDMKFEYLLYGHHREQIACQACGKXFSDEGRLRKHEKLHXADRPFVCEMCXKGFXXQAHLKEHLKIHXGYKPYSCEVCGKSFIRAPDLKKHERVHSNERPFACHMCDKAFKHKSHLKDHERRHRGEKPFVCGSCXKAFAKASDLKRHENNMHSERKQVXPSAIQSEXEQLQAAAMAAEAEQQLEXIACS

SEQ ID NO: 29939 - protein, 115 aa, Homo sapiens
  MOD_RES (4)..(4): Selenocysteine
  MOD_RES (18)..(18): Selenocysteine
  MOD_RES (32)..(32): Selenocysteine
  MOD_RES (50)..(50): Selenocysteine
  MOD_RES (55)..(55): Selenocysteine
  MOD_RES (71)..(71): Selenocysteine
  MOD_RES (79)..(79): Selenocysteine
  MOD_RES (89)..(89): Selenocysteine
  MOD_RES (91)..(91): Selenocysteine
MDLXKMGMIQLQNPSHPXGLLCKANQMRLAGXLCDVVIMVDSQEFHAHRXVLACXSKMFEILFHRNSQHYXLDFLSPKXFQQILEYAYXAXLQAKAEDLDDLLYAAEILEIEYLE

SEQ ID NO: 29940 - protein, 148 aa, Homo sapiens
  MOD_RES (4)..(4): Selenocysteine
  MOD_RES (18)..(18): Selenocysteine
  MOD_RES (32)..(32): Selenocysteine
  MOD_RES (50)..(50): Selenocysteine
  MOD_RES (55)..(55): Selenocysteine
  MOD_RES (71)..(71): Selenocysteine
  MOD_RES (79)..(79): Selenocysteine
  MOD_RES (89)..(89): Selenocysteine
  MOD_RES (91)..(91): Selenocysteine
  MOD_RES (124)..(124): Selenocysteine
  MOD_RES (133)..(133): Selenocysteine
  MOD_RES (136)..(136): Selenocysteine
MDLXKMGMIQLQNPSHPXGLLCKANQMRLAGXLCDVVIMVDSQEFHAHRXVLACXSKMFEILFHRNSQHYXLDFLSPKXFQQILEYAYXAXLQAKAEDLDDLLYAAEILEIEYLEEQCLKMLEXIQASDDNDXEAXMADGGAEEEEDR

SEQ ID NO: 29941 - protein, 673 aa, Homo sapiens
  MOD_RES (4)..(4): Selenocysteine
  MOD_RES (18)..(18): Selenocysteine
  MOD_RES (32)..(32): Selenocysteine
  MOD_RES (50)..(50): Selenocysteine
  MOD_RES (55)..(55): Selenocysteine
  MOD_RES (71)..(71): Selenocysteine
  MOD_RES (79)..(79): Selenocysteine
  MOD_RES (89)..(89): Selenocysteine
  MOD_RES (91)..(91): Selenocysteine
  MOD_RES (124)..(124): Selenocysteine
  MOD_RES (133)..(133): Selenocysteine
  MOD_RES (136)..(136): Selenocysteine
  MOD_RES (189)..(189): Selenocysteine
  MOD_RES (199)..(199): Selenocysteine
  MOD_RES (208)..(208): Selenocysteine
  MOD_RES (217)..(217): Selenocysteine
  MOD_RES (228)..(228): Selenocysteine
  MOD_RES (243)..(243): Selenocysteine
  MOD_RES (282)..(282): Selenocysteine
  MOD_RES (284)..(284): Selenocysteine
  MOD_RES (290)..(290): Selenocysteine
  MOD_RES (317)..(317): Selenocysteine
  MOD_RES (353)..(353): Selenocysteine
  MOD_RES (370)..(370): Selenocysteine
  MOD_RES (401)..(401): Selenocysteine
  MOD_RES (431)..(431): Selenocysteine
  MOD_RES (478)..(478): Selenocysteine
  MOD_RES (482)..(482): Selenocysteine
  MOD_RES (484)..(484): Selenocysteine
  MOD_RES (486)..(486): Selenocysteine
  MOD_RES (526)..(526): Selenocysteine
  MOD_RES (531)..(531): Selenocysteine
  MOD_RES (541)..(541): Selenocysteine
  MOD_RES (560)..(560): Selenocysteine
  MOD_RES (569)..(569): Selenocysteine
  MOD_RES (591)..(591): Selenocysteine
  MOD_RES (597)..(597): Selenocysteine
  MOD_RES (623)..(623): Selenocysteine
  MOD_RES (633)..(633): Selenocysteine
  MOD_RES (636)..(636): Selenocysteine
  MOD_RES (666)..(666): Selenocysteine
MDLXKMGMIQLQNPSHPXGLLCKANQMRLAGXLCDVVIMVDSQEFHAHRXVLACXSKMFEILFHRNSQHYXLDFLSPKXFQQILEYAYXAXLQAKAEDLDDLLYAAEILEIEYLEEQCLKMLEXIQASDDNDXEAXMADGGAEEEEDRKARYLKNIFISKHSSEESGYASVAGQSLPGPMVDQSPSVSXSFGLSAMSPXKAAVDSLMXIGQSLLQGXLQPPAGPEEPXLAGGGRHPGVAEVKXEMMQVDEVPSQDSPGAAESSISGGMGDKVEERGKEGPGXPXRSSVIXSARELHYGREESAEQVPPPAEAGQAPXGRPEHPAPPPEKHLGIYSVLPNHKADAVLSMPSSVXSGLHVQPALAVSMDFSXYGGLLPQGFIQRELFSKLGELAVGMKSESRXIGEQCSVCGVELPDNEAVEQHRKLHSGMKXYGCELCGKRFLDSLRLRMHLLAHSAGAKAFVCDQCGAQFSKEDALEXHRQXHXGXDMAVFCLLCGKRFQAQSALQQHMEVHAGVRSYICSECNRXFPSHXALKRHLRSHXGDHPYECEFCGSCFRDESXLKSHKRIHXGEKPYECNGCGKKFSLKHQLEXHYRVHXGEKPFECKLCHQRSRDYSAMIKHLRXHNGASPYQCXICXEYCPSLSSMQKHMKGHKPEEIPPDWRIEKXYLYLCYV

SEQ ID NO: 29942 - protein, 55 aa, Homo sapiens
  MOD_RES (1)..(1): Any amino acid
  MOD_RES (31)..(31): Selenocysteine
XGGLLPQGFIQRELFSKLGELAVGMKSESRXIGEQCSVCGVELPDNEAVEQHRVF

SEQ ID NO: 29943 - protein, 803 aa, Homo sapiens
  MOD_RES (27)..(27): Selenocysteine
  MOD_RES (79)..(79): Selenocysteine
  MOD_RES (97)..(97): Selenocysteine
  MOD_RES (106)..(106): Selenocysteine
  MOD_RES (119)..(119): Selenocysteine
  MOD_RES (130)..(130): Selenocysteine
  MOD_RES (144)..(144): Selenocysteine
  MOD_RES (146)..(146): Selenocysteine
  MOD_RES (157)..(157): Selenocysteine
  MOD_RES (183)..(183): Selenocysteine
  MOD_RES (202)..(202): Selenocysteine
  MOD_RES (274)..(274): Selenocysteine
  MOD_RES (291)..(291): Selenocysteine
  MOD_RES (296)..(296): Selenocysteine
  MOD_RES (316)..(316): Selenocysteine
  MOD_RES (318)..(318): Selenocysteine
  MOD_RES (329)..(329): Selenocysteine
  MOD_RES (355)..(355): Selenocysteine
  MOD_RES (400)..(401): Selenocysteine
  MOD_RES (431)..(431): Selenocysteine
  MOD_RES (439)..(439): Selenocysteine
  MOD_RES (442)..(442): Selenocysteine
  MOD_RES (484)..(485): Selenocysteine
  MOD_RES (525)..(525): Selenocysteine
  MOD_RES (540)..(540): Selenocysteine
  MOD_RES (553)..(553): Selenocysteine
  MOD_RES (609)..(609): Selenocysteine
  MOD_RES (635)..(635): Selenocysteine
  MOD_RES (658)..(658): Selenocysteine
  MOD_RES (664)..(664): Selenocysteine
  MOD_RES (667)..(667): Selenocysteine
  MOD_RES (673)..(673): Selenocysteine
  MOD_RES (676)..(676): Selenocysteine
  MOD_RES (679)..(679): Selenocysteine
  MOD_RES (688)..(688): Selenocysteine
  MOD_RES (692)..(692): Selenocysteine
  MOD_RES (713)..(713): Selenocysteine
  MOD_RES (740)..(740): Selenocysteine
  MOD_RES (749)..(749): Selenocysteine
  MOD_RES (762)..(762): Selenocysteine
  MOD_RES (791)..(791): Selenocysteine
  MOD_RES (794)..(794): Selenocysteine
MDFPQHSQHVLEQLNQQRQLGLLCDCXFVVDGVHFKAHKAVLAACSEYFKMLFVDQKDVVHLDISNAAGLGQVLEFMYXAKLSLSPENVDDVLAVAXFLQMQDIIXACHALKSLAEPAXSPGGNAEALAXEGGDKRAKEEKVAXSXLSRLEQAGRSXPIGPSRDLKEERGGQAQSAASGAEQXEKADAPREPPPVELKPDPXSGMAAAEAEAALSESSEQEMEVEPARKGEEEQKEQEEQEEEGAGPAEVKEEGSQLENGEAPEENENEESAGXDSGQELGSEARGLRSGXYGDRXESKAYGSVIHKCEDCGKEFXHXGNFKRHIRIHXGEKPFSCRECSKAFSDPAACKAHEKXHSPLKPYGCEECGKSYRLISLLNLHKKRHSGEARYRCEDCGKLFXXSGNLKRHQLVHSGEKPYQCDYCGRSFSDPXSKMRHLEXHDXDKEHKCPHCDKKFNQVGNLKAHLKIHIADGPLKCRECGKQFXXSGNLKRHLRIHSGEKPYVCIHCQRQFADPGALQRHVRIHXGEKPCQCVMCGKAFXQASSLIAHVRQHXGEKPYVCERCGKRFVQSSQLANHIRHHDNIRPHKCSVCSKAFVNVGDLSKHIIIHXGEKPYLCDKCGRGFNRVDNLRSHVKXVHQGKAGIKILEPEEGSEVSVVXVDDMVXLAXEALAAXAVXQLXVVPVGAAVXADEXEVLKAEISKAVKQVQEEDPNXHILYACDSCGDKFLDANSLAQHVRIHXAQALVMFQXDADFYQQYGPGGXWPAGQVLQAGELVFRPRDGAEGQPALAEXSPXAPECPPPAE

SEQ ID NO: 29944 - protein, 810 aa, Homo sapiens
  MOD_RES (27)..(27): Selenocysteine
  MOD_RES (79)..(79): Selenocysteine
  MOD_RES (97)..(97): Selenocysteine
  MOD_RES (106)..(106): Selenocysteine
  MOD_RES (119)..(119): Selenocysteine
  MOD_RES (130)..(130): Selenocysteine
  MOD_RES (144)..(144): Selenocysteine
  MOD_RES (146)..(146): Selenocysteine
  MOD_RES (157)..(157): Selenocysteine
  MOD_RES (183)..(183): Selenocysteine
  MOD_RES (202)..(202): Selenocysteine
  MOD_RES (274)..(274): Selenocysteine
  MOD_RES (291)..(291): Selenocysteine
  MOD_RES (296)..(296): Selenocysteine
  MOD_RES (316)..(316): Selenocysteine
  MOD_RES (318)..(318): Selenocysteine
  MOD_RES (329)..(329): Selenocysteine
  MOD_RES (355)..(355): Selenocysteine
  MOD_RES (400)..(401): Selenocysteine
  MOD_RES (431)..(431): Selenocysteine
  MOD_RES (439)..(439): Selenocysteine
  MOD_RES (442)..(442): Selenocysteine
  MOD_RES (484)..(485): Selenocysteine
  MOD_RES (525)..(525): Selenocysteine
  MOD_RES (540)..(540): Selenocysteine
  MOD_RES (553)..(553): Selenocysteine
  MOD_RES (609)..(609): Selenocysteine
  MOD_RES (635)..(635): Selenocysteine
  MOD_RES (658)..(658): Selenocysteine
  MOD_RES (664)..(664): Selenocysteine
  MOD_RES (667)..(667): Selenocysteine
  MOD_RES (673)..(673): Selenocysteine
  MOD_RES (676)..(676): Selenocysteine
  MOD_RES (679)..(679): Selenocysteine
  MOD_RES (683)..(683): Selenocysteine
  MOD_RES (695)..(695): Selenocysteine
  MOD_RES (699)..(699): Selenocysteine
  MOD_RES (720)..(720): Selenocysteine
  MOD_RES (747)..(747): Selenocysteine
  MOD_RES (756)..(756): Selenocysteine
  MOD_RES (769)..(769): Selenocysteine
  MOD_RES (798)..(798): Selenocysteine
  MOD_RES (801)..(801): Selenocysteine
MDFPQHSQHVLEQLNQQRQLGLLCDCXFVVDGVHFKAHKAVLAACSEYFKMLFVDQKDVVHLDISNAAGLGQVLEFMYXAKLSLSPENVDDVLAVAXFLQMQDIIXACHALKSLAEPAXSPGGNAEALAXEGGDKRAKEEKVAXSXLSRLEQAGRSXPIGPSRDLKEERGGQAQSAASGAEQXEKADAPREPPPVELKPDPXSGMAAAEAEAALSESSEQEMEVEPARKGEEEQKEQEEQEEEGAGPAEVKEEGSQLENGEAPEENENEESAGXDSGQELGSEARGLRSGXYGDRXESKAYGSVIHKCEDCGKEFXHXGNFKRHIRIHXGEKPFSCRECSKAFSDPAACKAHEKXHSPLKPYGCEECGKSYRLISLLNLHKKRHSGEARYRCEDCGKLFXXSGNLKRHQLVHSGEKPYQCDYCGRSFSDPXSKMRHLEXHDXDKEHKCPHCDKKFNQVGNLKAHLKIHIADGPLKCRECGKQFXXSGNLKRHLRIHSGEKPYVCIHCQRQFADPGALQRHVRIHXGEKPCQCVMCGKAFXQASSLIAHVRQHXGEKPYVCERCGKRFVQSSQLANHIRHHDNIRPHKCSVCSKAFVNVGDLSKHIIIHXGEKPYLCDKCGRGFNRVDNLRSHVKXVHQGKAGIKILEPEEGSEVSVVXVDDMVXLAXEALAAXAVXQLXGPAXLPAVVPVGAAVXADEXEVLKAEISKAVKQVQEEDPNXHILYACDSCGDKFLDANSLAQHVRIHXAQALVMFQXDADFYQQYGPGGXWPAGQVLQAGELVFRPRDGAEGQPALAEXSPXAPECPPPAE

SEQ ID NO: 29945 - protein, 721 aa, Homo sapiens
  MOD_RES (14)..(14): Selenocysteine
  MOD_RES (62)..(62): Selenocysteine
  MOD_RES (64)..(64): Selenocysteine
  MOD_RES (75)..(75): Selenocysteine
  MOD_RES (101)..(101): Selenocysteine
  MOD_RES (120)..(120): Selenocysteine
  MOD_RES (192)..(192): Selenocysteine
  MOD_RES (209)..(209): Selenocysteine
  MOD_RES (214)..(214): Selenocysteine
  MOD_RES (234)..(234): Selenocysteine
  MOD_RES (236)..(236): Selenocysteine
  MOD_RES (247)..(247): Selenocysteine
  MOD_RES (273)..(273): Selenocysteine
  MOD_RES (318)..(319): Selenocysteine
  MOD_RES (349)..(349): Selenocysteine
  MOD_RES (357)..(357): Selenocysteine
  MOD_RES (360)..(360): Selenocysteine
  MOD_RES (402)..(403): Selenocysteine
  MOD_RES (443)..(443): Selenocysteine
  MOD_RES (458)..(458): Selenocysteine
  MOD_RES (471)..(471): Selenocysteine
  MOD_RES (527)..(527): Selenocysteine
  MOD_RES (553)..(553): Selenocysteine
  MOD_RES (576)..(576): Selenocysteine
  MOD_RES (582)..(582): Selenocysteine
  MOD_RES (585)..(585): Selenocysteine
  MOD_RES (591)..(591): Selenocysteine
  MOD_RES (594)..(594): Selenocysteine
  MOD_RES (597)..(597): Selenocysteine
  MOD_RES (606)..(606): Selenocysteine
  MOD_RES (610)..(610): Selenocysteine
  MOD_RES (631)..(631): Selenocysteine
  MOD_RES (658)..(658): Selenocysteine
  MOD_RES (667)..(667): Selenocysteine
  MOD_RES (680)..(680): Selenocysteine
  MOD_RES (709)..(709): Selenocysteine
  MOD_RES (712)..(712): Selenocysteine
MMCWPWPLSSKCRXSSRPAMPSSHLLSRLPALGEMRRPWPQKVCPVPSPGGDKRAKEEKVAXSXLSRLEQAGRSXPIGPSRDLKEERGGQAQSAASGAEQXEKADAPREPPPVELKPDPXSGMAAAEAEAALSESSEQEMEVEPARKGEEEQKEQEEQEEEGAGPAEVKEEGSQLENGEAPEENENEESAGXDSGQELGSEARGLRSGXYGDRXESKAYGSVIHKCEDCGKEFXHXGNFKRHIRIHXGEKPFSCRECSKAFSDPAACKAHEKXHSPLKPYGCEECGKSYRLISLLNLHKKRHSGEARYRCEDCGKLFXXSGNLKRHQLVHSGEKPYQCDYCGRSFSDPXSKMRHLEXHDXDKEHKCPHCDKKFNQVGNLKAHLKIHIADGPLKCRECGKQFXXSGNLKRHLRIHSGEKPYVCIHCQRQFADPGALQRHVRIHXGEKPCQCVMCGKAFXQASSLIAHVRQHXGEKPYVCERCGKRFVQSSQLANHIRHHDNIRPHKCSVCSKAFVNVGDLSKHIIIHXGEKPYLCDKCGRGFNRVDNLRSHVKXVHQGKAGIKILEPEEGSEVSVVXVDDMVXLAXEALAAXAVXQLXVVPVGAAVXADEXEVLKAEISKAVKQVQEEDPNXHILYACDSCGDKFLDANSLAQHVRIHXAQALVMFQXDADFYQQYGPGGXWPAGQVLQAGELVFRPRDGAEGQPALAEXSPXAPECPPPAE

SEQ ID NO: 29946 - protein, 241 aa, Homo sapiens
  MOD_RES (1)..(1): Any amino acid
  MOD_RES (36)..(36): Selenocysteine
  MOD_RES (82)..(82): Selenocysteine
  MOD_RES (97)..(97): Selenocysteine
  MOD_RES (110)..(110): Selenocysteine
  MOD_RES (166)..(166): Selenocysteine
  MOD_RES (192)..(192): Selenocysteine
  MOD_RES (215)..(215): Selenocysteine
  MOD_RES (221)..(221): Selenocysteine
  MOD_RES (224)..(224): Selenocysteine
  MOD_RES (230)..(230): Selenocysteine
  MOD_RES (233)..(233): Selenocysteine
  MOD_RES (236)..(236): Selenocysteine
XEALPVRLLRPLLLRPHFQDAPPGDPRHGQGAQVPXLRQEVQPGNLKRHLRIHSGEKPYVCIHCQRQFADPGALQRHVRIHXGEKPCQCVMCGKAFXQASSLIAHVRQHXGEKPYVCERCGKRFVQSSQLANHIRHHDNIRPHKCSVCSKAFVNVGDLSKHIIIHXGEKPYLCDKCGRGFNRVDNLRSHVKXVHQGKAGIKILEPEEGSEVSVVXVDDMVXLAXEALAAXAVXQLXVVPVG

SEQ ID NO: 29947 - protein, 210 aa, Homo sapiens
  MOD_RES (1)..(1): Any amino acid
  MOD_RES (9)..(9): Selenocysteine
  MOD_RES (35)..(35): Selenocysteine
  MOD_RES (58)..(58): Selenocysteine
  MOD_RES (64)..(64): Selenocysteine
  MOD_RES (67)..(67): Selenocysteine
  MOD_RES (73)..(73): Selenocysteine
  MOD_RES (76)..(76): Selenocysteine
  MOD_RES (79)..(79): Selenocysteine
  MOD_RES (83)..(83): Selenocysteine
  MOD_RES (95)..(95): Selenocysteine
  MOD_RES (99)..(99): Selenocysteine
  MOD_RES (120)..(120): Selenocysteine
  MOD_RES (147)..(147): Selenocysteine
  MOD_RES (156)..(156): Selenocysteine
  MOD_RES (169)..(169): Selenocysteine
  MOD_RES (198)..(198): Selenocysteine
  MOD_RES (201)..(201): Selenocysteine
XSKHIIIHXGEKPYLCDKCGRGFNRVDNLRSHVKXVHQGKAGIKILEPEEGSEVSVVXVDDMVXLAXEALAAXAVXQLXGPAXLPAVVPVGAAVXADEXEVLKAEISKAVKQVQEEDPNXHILYACDSCGDKFLDANSLAQHVRIHXAQALVMFQXDADFYQQYGPGGXWPAGQVLQAGELVFRPRDGAEGQPALAEXSPXAPECPPPAE

SEQ ID NO: 29948 - protein, 531 aa, Homo sapiens
  MOD_RES (36)..(36): Selenocysteine
  MOD_RES (80)..(80): Selenocysteine
  MOD_RES (131)..(132): Selenocysteine
  MOD_RES (137)..(137): Selenocysteine
  MOD_RES (215)..(215): Selenocysteine
  MOD_RES (220)..(220): Selenocysteine
  MOD_RES (228)..(228): Selenocysteine
  MOD_RES (237)..(237): Selenocysteine
  MOD_RES (296)..(296): Selenocysteine
  MOD_RES (305)..(305): Selenocysteine
  MOD_RES (312)..(312): Selenocysteine
  MOD_RES (348)..(348): Selenocysteine
  MOD_RES (400)..(400): Selenocysteine
  MOD_RES (420)..(420): Selenocysteine
  MOD_RES (427)..(427): Selenocysteine
  MOD_RES (433)..(433): Selenocysteine
  MOD_RES (440)..(440): Selenocysteine
  MOD_RES (448)..(448): Selenocysteine
  MOD_RES (450)..(450): Selenocysteine
  MOD_RES (470)..(470): Selenocysteine
  MOD_RES (485)..(485): Selenocysteine
  MOD_RES (516)..(516): Selenocysteine
  MOD_RES (521)..(521): Selenocysteine
MCPKGYEDSMEFPDHSRHLLQCLSEQRHQGFLCDCXVLVGDAQFRAHRAVLASCSMYFHLFYKDQLDKRDIVHLNSDIVXAPAFALLLEFMYEGKLQFKDLPIEDVLAAASYLHMYDIVKVCKKKLKEKAXXEADSXKKEEDASSCSDKVESLSDGSSHIAGDLPSDEDEGEDEKLNILPSKRDLAAEPGNMWMRLPSDSAGIPQAGGEAEPHAXAAGKXVASPCSSXESLSQRSVXSVRDSADVDCVLDLSVKSSLSGVENLNSSYFSSQDVLRSNLVQVKVEKEASCDESDVGXNDYDMEHSXVKESVSXNNRVQYEPAHLAPLREDSVLRELDREDKASDDEMMXPESERVQVEGGMESSLLPYVSNILSPAGQIFMCPLCNKVFPSPHILQIHLSXHFREQDGIRSKPAADVNVPXCSLCGKXFSCMYXLKRHERXHSGEKPYXCXQCGKSFQYSHNLSRHAVVHXREKPHACKWCERRFXQSGDLYRHIRKFHCELVNSLSVKSEALSLPXVRDWXLEDSSQELWK

SEQ ID NO: 29949 - protein, 522 aa, Homo sapiens
  MOD_RES (27)..(27): Selenocysteine
  MOD_RES (71)..(71): Selenocysteine
  MOD_RES (122)..(123): Selenocysteine
  MOD_RES (128)..(128): Selenocysteine
  MOD_RES (206)..(206): Selenocysteine
  MOD_RES (211)..(211): Selenocysteine
  MOD_RES (219)..(219): Selenocysteine
  MOD_RES (228)..(228): Selenocysteine
  MOD_RES (287)..(287): Selenocysteine
  MOD_RES (296)..(296): Selenocysteine
  MOD_RES (303)..(303): Selenocysteine
  MOD_RES (339)..(339): Selenocysteine
  MOD_RES (391)..(391): Selenocysteine
  MOD_RES (411)..(411): Selenocysteine
  MOD_RES (418)..(418): Selenocysteine
  MOD_RES (424)..(424): Selenocysteine
  MOD_RES (431)..(431): Selenocysteine
  MOD_RES (439)..(439): Selenocysteine
  MOD_RES (441)..(441): Selenocysteine
  MOD_RES (461)..(461): Selenocysteine
  MOD_RES (476)..(476): Selenocysteine
  MOD_RES (507)..(507): Selenocysteine
  MOD_RES (512)..(512): Selenocysteine
MEFPDHSRHLLQCLSEQRHQGFLCDCXVLVGDAQFRAHRAVLASCSMYFHLFYKDQLDKRDIVHLNSDIVXAPAFALLLEFMYEGKLQFKDLPIEDVLAAASYLHMYDIVKVCKKKLKEKAXXEADSXKKEEDASSCSDKVESLSDGSSHIAGDLPSDEDEGEDEKLNILPSKRDLAAEPGNMWMRLPSDSAGIPQAGGEAEPHAXAAGKXVASPCSSXESLSQRSVXSVRDSADVDCVLDLSVKSSLSGVENLNSSYFSSQDVLRSNLVQVKVEKEASCDESDVGXNDYDMEHSXVKESVSXNNRVQYEPAHLAPLREDSVLRELDREDKASDDEMMXPESERVQVEGGMESSLLPYVSNILSPAGQIFMCPLCNKVFPSPHILQIHLSXHFREQDGIRSKPAADVNVPXCSLCGKXFSCMYXLKRHERXHSGEKPYXCXQCGKSFQYSHNLSRHAVVHXREKPHACKWCERRFXQSGDLYRHIRKFHCELVNSLSVKSEALSLPXVRDWXLEDSSQELWK

SEQ ID NO: 29950 - protein, 514 aa, Homo sapiens
  MOD_RES (27)..(27): Selenocysteine
  MOD_RES (57)..(57): Selenocysteine
  MOD_RES (66)..(66): Selenocysteine
  MOD_RES (82)..(82): Selenocysteine
  MOD_RES (146)..(146): Selenocysteine
  MOD_RES (163)..(163): Selenocysteine
  MOD_RES (181)..(181): Selenocysteine
  MOD_RES (190)..(190): Selenocysteine
  MOD_RES (193)..(193): Selenocysteine
  MOD_RES (200)..(200): Selenocysteine
  MOD_RES (209)..(209): Selenocysteine
  MOD_RES (220)..(220): Selenocysteine
  MOD_RES (235)..(235): Selenocysteine
  MOD_RES (264)..(264): Selenocysteine
  MOD_RES (277)..(277): Selenocysteine
  MOD_RES (282)..(282): Selenocysteine
  MOD_RES (294)..(294): Selenocysteine
  MOD_RES (337)..(337): Selenocysteine
  MOD_RES (366)..(366): Selenocysteine
  MOD_RES (386)..(386): Selenocysteine
  MOD_RES (394)..(394): Selenocysteine
  MOD_RES (417)..(417): Selenocysteine
  MOD_RES (419)..(419): Selenocysteine
  MOD_RES (425)..(425): Selenocysteine
  MOD_RES (430)..(430): Selenocysteine
  MOD_RES (444)..(444): Selenocysteine
  MOD_RES (456)..(456): Selenocysteine
  MOD_RES (459)..(459): Selenocysteine
  MOD_RES (494)..(494): Selenocysteine
  MOD_RES (510)..(510): Selenocysteine
MDLANHGLILLQQLNAQREFGFLCDCXVAIGDVYFKAHKSVLASFSNYFKMLFVHQXSECVRLKPXDIQPDIFSYLLHLMYXGKMAPQLIDPVRLEQGIKFLHAYPLIQEASLASQGAFSHPDQVFPLASSLYGIQIADHQLRQAXKIASAPEKLGRDPRPQXSRISQEQVPEASQLSQLXSNLAQVNRXNMXPSDPLQXSLSPELVSXPVPPPPPGEEXNLEASSSDEQPASLXIAHVKPSIMKRNGSFPKYYACHLCGRRFXLRSSLREHLQIHXGVPFXSSQQGESRVPLXLCSNAADLGKDAMEVPEAGMISDSELQHISDSPIIDGQQQSEXPPPSDIADIDNLEQADQEREVKRRKYECXICGRKFIQKSHWREHMYIHXGKPFKCSXCDKSFCRANQAARHVCLNQSIDXYXMVDKQXLELCXFEEGSQMDNMLVQXNKPYKCNLCDKXFSXPNEVVKHSCQNQNSDVFALDEGRSILLGSGDSEVXEPDHPVLASIKKEQEXVLLD

SEQ ID NO: 29951 - protein, 19 aa, Homo sapiens
  MOD_RES (9)..(9): Selenocysteine
MLERKKPKXAENQKASEEN

SEQ ID NO: 29952 - protein, 741 aa, Homo sapiens
  MOD_RES (9)..(9): Selenocysteine
  MOD_RES (22)..(22): Selenocysteine
  MOD_RES (52)..(52): Selenocysteine
  MOD_RES (56)..(56): Selenocysteine
  MOD_RES (62)..(62): Selenocysteine
  MOD_RES (75)..(75): Selenocysteine
  MOD_RES (93)..(93): Selenocysteine
  MOD_RES (107)..(107): Selenocysteine
  MOD_RES (175)..(175): Selenocysteine
  MOD_RES (184)..(184): Selenocysteine
  MOD_RES (190)..(190): Selenocysteine
  MOD_RES (211)..(211): Selenocysteine
  MOD_RES (215)..(215): Selenocysteine
  MOD_RES (220)..(220): Selenocysteine
  MOD_RES (227)..(227): Selenocysteine
  MOD_RES (272)..(272): Selenocysteine
  MOD_RES (289)..(289): Selenocysteine
  MOD_RES (304)..(305): Selenocysteine
  MOD_RES (308)..(309): Selenocysteine
  MOD_RES (322)..(322): Selenocysteine
  MOD_RES (357)..(357): Selenocysteine
  MOD_RES (360)..(360): Selenocysteine
  MOD_RES (366)..(366): Selenocysteine
  MOD_RES (385)..(385): Selenocysteine
  MOD_RES (407)..(407): Selenocysteine
  MOD_RES (423)..(423): Selenocysteine
  MOD_RES (428)..(428): Selenocysteine
  MOD_RES (444)..(444): Selenocysteine
  MOD_RES (447)..(447): Selenocysteine
  MOD_RES (464)..(464): Selenocysteine
  MOD_RES (473)..(473): Selenocysteine
  MOD_RES (480)..(480): Selenocysteine
  MOD_RES (482)..(482): Selenocysteine
  MOD_RES (484)..(484): Selenocysteine
  MOD_RES (492)..(492): Selenocysteine
  MOD_RES (494)..(494): Selenocysteine
  MOD_RES (497)..(497): Selenocysteine
  MOD_RES (502)..(502): Selenocysteine
  MOD_RES (506)..(506): Selenocysteine
  MOD_RES (513)..(514): Selenocysteine
  MOD_RES (537)..(537): Selenocysteine
  MOD_RES (541)..(541): Selenocysteine
  MOD_RES (549)..(549): Selenocysteine
  MOD_RES (551)..(551): Selenocysteine
  MOD_RES (568)..(568): Selenocysteine
  MOD_RES (581)..(581): Selenocysteine
  MOD_RES (586)..(586): Selenocysteine
  MOD_RES (588)..(588): Selenocysteine
  MOD_RES (601)..(601): Selenocysteine
  MOD_RES (627)..(627): Selenocysteine
  MOD_RES (629)..(629): Selenocysteine
  MOD_RES (644)..(644): Selenocysteine
  MOD_RES (675)..(675): Selenocysteine
  MOD_RES (690)..(690): Selenocysteine
  MOD_RES (695)..(695): Selenocysteine
  MOD_RES (710)..(710): Selenocysteine
  MOD_RES (713)..(714): Selenocysteine
MLERKKPKXAENQKASEENEIXQPGGSSAKPGLPCLNFEAVLSPDPALIHSXHSLXNSHAHXGSSDCDISCKGMXERIHSINLHNFSNSVLEXLNEQRNRGHFCDVXVRIHGSMLRAHRCVLAAGSPFFQDKLLLGYSDIEIPSVVSVQSVQKLIDFMYSGVLRVSQSEALQILXAASILQIKXVIDECXRIVSQNVGDVFPGIQDSGQDXPRGXPESGXSGQSSDXESGYLQSHPQHSVDRIYSALYACSMQNGSGERSFYSGAVVSHHEXALGLPRDHHMEDPSWIXRIHERSQQMERYLSXXPEXXHCRKQPRPVRIQXLVGNIHIKQEMEDDYDYYGQQRVQILERNESEECXEDXDQAEGXESEPKGESFDSGVSSSIGXEPDSVEQQFGPGAARDSQAEPXQPEQAAEAPAEGGPQXNQLEXGASSPERSNEVEMDSXVIXVSNSSDKSVLQQPSVNXSIGQPLPSXQLYLRQXEXLXSNLRMPLXLXSNXQVIGXAGNXYLPALFXXQPAGSGPKPFLFSLPQPLAGQQXQFVXVSQPGLSXFXAQLPAPQPLASSAGHSXASGQGEKKPYECXLCNKXFXAKQNYVKHMFVHXGEKPHQCSICWRSFSLKDYLIKHMVXHXGVRAYQCSICNKRFXQKSSLNVHMRLHRGEKSYECYICKKKFSHKXLLERHVALHSASNGXPPAGXPPGARAGPPGVVACXEGXXYVCSVCPAKFDQIEQFNDHMRMHVSDG

SEQ ID NO: 29953 - protein, 57 aa, Homo sapiens
  MOD_RES (2)..(2): Selenocysteine
  MOD_RES (20)..(20): Selenocysteine
  MOD_RES (34)..(34): Selenocysteine
MXERIHSINLHNFSNSVLEXLNEQRNRGHFCDVXVRIHGSMLRAHRCVLAAGSPFFQ

SEQ ID NO: 29954 - protein, 668 aa, Homo sapiens
  MOD_RES (2)..(2): Selenocysteine
  MOD_RES (20)..(20): Selenocysteine
  MOD_RES (34)..(34): Selenocysteine
  MOD_RES (102)..(102): Selenocysteine
  MOD_RES (111)..(111): Selenocysteine
  MOD_RES (117)..(117): Selenocysteine
  MOD_RES (138)..(138): Selenocysteine
  MOD_RES (142)..(142): Selenocysteine
  MOD_RES (147)..(147): Selenocysteine
  MOD_RES (154)..(154): Selenocysteine
  MOD_RES (199)..(199): Selenocysteine
  MOD_RES (216)..(216): Selenocysteine
  MOD_RES (231)..(232): Selenocysteine
  MOD_RES (235)..(236): Selenocysteine
  MOD_RES (249)..(249): Selenocysteine
  MOD_RES (284)..(284): Selenocysteine
  MOD_RES (287)..(287): Selenocysteine
  MOD_RES (293)..(293): Selenocysteine
  MOD_RES (312)..(312): Selenocysteine
  MOD_RES (334)..(334): Selenocysteine
  MOD_RES (350)..(350): Selenocysteine
  MOD_RES (355)..(355): Selenocysteine
  MOD_RES (371)..(371): Selenocysteine
  MOD_RES (374)..(374): Selenocysteine
  MOD_RES (391)..(391): Selenocysteine
  MOD_RES (400)..(400): Selenocysteine
  MOD_RES (407)..(407): Selenocysteine
  MOD_RES (409)..(409): Selenocysteine
  MOD_RES (411)..(411): Selenocysteine
  MOD_RES (419)..(419): Selenocysteine
  MOD_RES (421)..(421): Selenocysteine
  MOD_RES (424)..(424): Selenocysteine
  MOD_RES (429)..(429): Selenocysteine
  MOD_RES (433)..(433): Selenocysteine
  MOD_RES (440)..(441): Selenocysteine
  MOD_RES (464)..(464): Selenocysteine
  MOD_RES (468)..(468): Selenocysteine
  MOD_RES (476)..(476): Selenocysteine
  MOD_RES (478)..(478): Selenocysteine
  MOD_RES (495)..(495): Selenocysteine
  MOD_RES (508)..(508): Selenocysteine
  MOD_RES (513)..(513): Selenocysteine
  MOD_RES (515)..(515): Selenocysteine
  MOD_RES (528)..(528): Selenocysteine
  MOD_RES (554)..(554): Selenocysteine
  MOD_RES (556)..(556): Selenocysteine
  MOD_RES (571)..(571): Selenocysteine
  MOD_RES (602)..(602): Selenocysteine
  MOD_RES (617)..(617): Selenocysteine
  MOD_RES (622)..(622): Selenocysteine
  MOD_RES (637)..(637): Selenocysteine
  MOD_RES (640)..(641): Selenocysteine
MXERIHSINLHNFSNSVLEXLNEQRNRGHFCDVXVRIHGSMLRAHRCVLAAGSPFFQDKLLLGYSDIEIPSVVSVQSVQKLIDFMYSGVLRVSQSEALQILXAASILQIKXVIDECXRIVSQNVGDVFPGIQDSGQDXPRGXPESGXSGQSSDXESGYLQSHPQHSVDRIYSALYACSMQNGSGERSFYSGAVVSHHEXALGLPRDHHMEDPSWIXRIHERSQQMERYLSXXPEXXHCRKQPRPVRIQXLVGNIHIKQEMEDDYDYYGQQRVQILERNESEECXEDXDQAEGXESEPKGESFDSGVSSSIGXEPDSVEQQFGPGAARDSQAEPXQPEQAAEAPAEGGPQXNQLEXGASSPERSNEVEMDSXVIXVSNSSDKSVLQQPSVNXSIGQPLPSXQLYLRQXEXLXSNLRMPLXLXSNXQVIGXAGNXYLPALFXXQPAGSGPKPFLFSLPQPLAGQQXQFVXVSQPGLSXFXAQLPAPQPLASSAGHSXASGQGEKKPYECXLCNKXFXAKQNYVKHMFVHXGEKPHQCSICWRSFSLKDYLIKHMVXHXGVRAYQCSICNKRFXQKSSLNVHMRLHRGEKSYECYICKKKFSHKXLLERHVALHSASNGXPPAGXPPGARAGPPGVVACXEGXXYVCSVCPAKFDQIEQFNDHMRMHVSDG

SEQ ID NO: 29955 - protein, 49 aa, Homo sapiens
MEGLLHYINPAHAISLLSALNEERLKGQLCDVLLIVGDQKFRAHKNVLA

SEQ ID NO: 29956 - protein, 119 aa, Homo sapiens
  MOD_RES (60)..(60): Selenocysteine
  MOD_RES (68)..(68): Selenocysteine
  MOD_RES (115)..(115): Selenocysteine
MEGLLHYINPAHAISLLSALNEERLKGQLCDVLLIVGDQKFRAHKNVLAASSEYFQSLFXNKENESQXVFQLDFCEPDAFDNVLNYIYSSSLFVEKSSLAAVQELGYSLGISFLXNIVS

SEQ ID NO: 29957 - protein, 865 aa, Homo sapiens
  MOD_RES (60)..(60): Selenocysteine
  MOD_RES (68)..(68): Selenocysteine
  MOD_RES (115)..(115): Selenocysteine
  MOD_RES (121)..(121): Selenocysteine
  MOD_RES (128)..(128): Selenocysteine
  MOD_RES (162)..(162): Selenocysteine
  MOD_RES (173)..(173): Selenocysteine
  MOD_RES (186)..(186): Selenocysteine
  MOD_RES (204)..(204): Selenocysteine
  MOD_RES (288)..(288): Selenocysteine
  MOD_RES (295)..(295): Selenocysteine
  MOD_RES (393)..(393): Selenocysteine
  MOD_RES (416)..(416): Selenocysteine
  MOD_RES (425)..(425): Selenocysteine
  MOD_RES (431)..(431): Selenocysteine
  MOD_RES (447)..(447): Selenocysteine
  MOD_RES (453)..(454): Selenocysteine
  MOD_RES (463)..(463): Selenocysteine
  MOD_RES (470)..(470): Selenocysteine
  MOD_RES (518)..(518): Selenocysteine
  MOD_RES (575)..(575): Selenocysteine
  MOD_RES (582)..(582): Selenocysteine
  MOD_RES (605)..(605): Selenocysteine
  MOD_RES (620)..(620): Selenocysteine
  MOD_RES (639)..(640): Selenocysteine
  MOD_RES (694)..(694): Selenocysteine
  MOD_RES (718)..(718): Selenocysteine
  MOD_RES (747)..(747): Selenocysteine
  MOD_RES (778)..(778): Selenocysteine
  MOD_RES (804)..(804): Selenocysteine
  MOD_RES (811)..(811): Selenocysteine
  MOD_RES (814)..(814): Selenocysteine
  MOD_RES (825)..(825): Selenocysteine
  MOD_RES (837)..(837): Selenocysteine
  MOD_RES (850)..(850): Selenocysteine
  MOD_RES (853)..(853): Selenocysteine
  MOD_RES (863)..(863): Selenocysteine
MEGLLHYINPAHAISLLSALNEERLKGQLCDVLLIVGDQKFRAHKNVLAASSEYFQSLFXNKENESQXVFQLDFCEPDAFDNVLNYIYSSSLFVEKSSLAAVQELGYSLGISFLXNIVSKXPQAPFPXCPNRKKVFVEDDENSSQKRSVIVCQSRNEAQGKXVSQNQPDVSHXSRPSPSIAVKANXNKPHVPKPIEPLHNLSLXEKSWPKDSSVVYAKSLEHSGSLDDPNRISLVKRNAVLPSKPLQDREAMDDKPGVSGQLPKGKALELALKRPRPPVLSVCSSSEXPYLLKEXNKGNGQGEDRNLLYYSKLGLVIPSSGSGSGNQSIDRSGPLVKSLLRRSLSMDSQVPVYSPSIDLKSSQGSSSVSSDAPGNVLCALSQKSSLKDCSEKXALDDRPQVLQPHRLRSFSASQSXDREGASPVXEVRIKXEPSSPLSDPSDIIRVXVGDAAXXAAASSSSVXRDLSLKXEDDQKDMSRLPAKRRFQADRRLPFKKLKVNEHGSPVSEDNFEEGSSPXLLDADFPDSDLNKDEFEQGSHERLCRNAAVCPYCSLRFFSPELKQEHESKCEYKKLXCLECMRXFKSSFSIWRHQVEVHNQNNMAPXENFSLPVLDHNGDVXGSSRPQSQPEPNKVNHIVXXKDDNVFSDSSEQVNFDSEDSSCLPEDLSLSKQLKIQVKEEPVEEAEEEAPEASXAPKEAGPSKEASLWPCEKCGKMFXVHKQLERHQELLCSVKPFICHVCNKAFRXNFRLWSHFQSHMSQASEESAHKESEVCPVPXNSPSPPPLPPPPPLPKIQPLEPDSPXGLSENPXPAXEKLFVPQESDXLFYHAPPLSAIXFKRQFMCKLCHRXFKXAFSLWSHEQXHN

SEQ ID NO: 29958 - protein, 1066 aa, Homo sapiens
  MOD_RES (60)..(60): Selenocysteine
  MOD_RES (68)..(68): Selenocysteine
  MOD_RES (115)..(115): Selenocysteine
  MOD_RES (121)..(121): Selenocysteine
  MOD_RES (128)..(128): Selenocysteine
  MOD_RES (162)..(162): Selenocysteine
  MOD_RES (173)..(173): Selenocysteine
  MOD_RES (186)..(186): Selenocysteine
  MOD_RES (204)..(204): Selenocysteine
  MOD_RES (288)..(288): Selenocysteine
  MOD_RES (295)..(295): Selenocysteine
  MOD_RES (393)..(393): Selenocysteine
  MOD_RES (416)..(416): Selenocysteine
  MOD_RES (425)..(425): Selenocysteine
  MOD_RES (431)..(431): Selenocysteine
  MOD_RES (447)..(447): Selenocysteine
  MOD_RES (453)..(454): Selenocysteine
  MOD_RES (463)..(463): Selenocysteine
  MOD_RES (470)..(470): Selenocysteine
  MOD_RES (518)..(518): Selenocysteine
  MOD_RES (540)..(540): Selenocysteine
  MOD_RES (558)..(558): Selenocysteine
  MOD_RES (586)..(586): Selenocysteine
  MOD_RES (592)..(592): Selenocysteine
  MOD_RES (596)..(596): Selenocysteine
  MOD_RES (673)..(673): Selenocysteine
  MOD_RES (776)..(776): Selenocysteine
  MOD_RES (783)..(783): Selenocysteine
  MOD_RES (806)..(806): Selenocysteine
  MOD_RES (821)..(821): Selenocysteine
  MOD_RES (840)..(841): Selenocysteine
  MOD_RES (895)..(895): Selenocysteine
  MOD_RES (919)..(919): Selenocysteine
  MOD_RES (948)..(948): Selenocysteine
  MOD_RES (979)..(979): Selenocysteine
  MOD_RES (1005)..(1005): Selenocysteine
  MOD_RES (1012)..(1012): Selenocysteine
  MOD_RES (1015)..(1015): Selenocysteine
  MOD_RES (1026)..(1026): Selenocysteine
  MOD_RES (1038)..(1038): Selenocysteine
  MOD_RES (1051)..(1051): Selenocysteine
  MOD_RES (1054)..(1054): Selenocysteine
  MOD_RES (1064)..(1064): Selenocysteine
MEGLLHYINPAHAISLLSALNEERLKGQLCDVLLIVGDQKFRAHKNVLAASSEYFQSLFXNKENESQXVFQLDFCEPDAFDNVLNYIYSSSLFVEKSSLAAVQELGYSLGISFLXNIVSKXPQAPFPXCPNRKKVFVEDDENSSQKRSVIVCQSRNEAQGKXVSQNQPDVSHXSRPSPSIAVKANXNKPHVPKPIEPLHNLSLXEKSWPKDSSVVYAKSLEHSGSLDDPNRISLVKRNAVLPSKPLQDREAMDDKPGVSGQLPKGKALELALKRPRPPVLSVCSSSEXPYLLKEXNKGNGQGEDRNLLYYSKLGLVIPSSGSGSGNQSIDRSGPLVKSLLRRSLSMDSQVPVYSPSIDLKSSQGSSSVSSDAPGNVLCALSQKSSLKDCSEKXALDDRPQVLQPHRLRSFSASQSXDREGASPVXEVRIKXEPSSPLSDPSDIIRVXVGDAAXXAAASSSSVXRDLSLKXEDDQKDMSRLPAKRRFQADRRLPFKKLKVNEHGSPVSEDNFEEGSSPXLLDADFPDSDLNKDEFGELEGXRPNKKFKCKHCLKIFRSXAGLHRHVNMYHNPEKPYACDICHKRFHXNFKVWXHCQXQHGIVKNPSPASSSHAVLDEKFQRKLIDIVREREIKKALIIKLRRGKPGFQGQSSSQAQQVIKRNLRSRAKGAYICXYCGKAYRFLSQFKQHIKMHPGEKPLGVNKVAKPKEHAPLASPVENKEVYQCRLCNAKLSSLLEQGSHERLCRNAAVCPYCSLRFFSPELKQEHESKCEYKKLXCLECMRXFKSSFSIWRHQVEVHNQNNMAPXENFSLPVLDHNGDVXGSSRPQSQPEPNKVNHIVXXKDDNVFSDSSEQVNFDSEDSSCLPEDLSLSKQLKIQVKEEPVEEAEEEAPEASXAPKEAGPSKEASLWPCEKCGKMFXVHKQLERHQELLCSVKPFICHVCNKAFRXNFRLWSHFQSHMSQASEESAHKESEVCPVPXNSPSPPPLPPPPPLPKIQPLEPDSPXGLSENPXPAXEKLFVPQESDXLFYHAPPLSAIXFKRQFMCKLCHRXFKXAFSLWSHEQXHN

SEQ ID NO: 29959 - protein, 149 aa, Homo sapiens
  MOD_RES (40)..(40): Selenocysteine
  MOD_RES (92)..(92): Selenocysteine
  MOD_RES (107)..(107): Selenocysteine
  MOD_RES (114)..(114): Selenocysteine
  MOD_RES (129)..(129): Selenocysteine
  MOD_RES (144)..(144): Selenocysteine
MEPSPLSPSGAALPLPLSLAPPPLPLPAAAVVHVSFPEVXSALLESLNQQRLQGQLCDVSIRVQGREFRAHRAVLAASSPYFHDQVLLKGMXSISLPSVMDPGAFEXVLASAYXGRLSMAAADIVNFLXVGSVLQMWHIVDKCXELLRE

SEQ ID NO: 29960 - protein, 634 aa, Homo sapiens
  MOD_RES (40)..(40): Selenocysteine
  MOD_RES (92)..(92): Selenocysteine
  MOD_RES (107)..(107): Selenocysteine
  MOD_RES (114)..(114): Selenocysteine
  MOD_RES (129)..(129): Selenocysteine
  MOD_RES (144)..(144): Selenocysteine
  MOD_RES (155)..(157): Selenocysteine
  MOD_RES (159)..(160): Selenocysteine
  MOD_RES (164)..(164): Selenocysteine
  MOD_RES (167)..(167): Selenocysteine
  MOD_RES (180)..(180): Selenocysteine
  MOD_RES (185)..(185): Selenocysteine
  MOD_RES (215)..(215): Selenocysteine
  MOD_RES (253)..(253): Selenocysteine
  MOD_RES (285)..(285): Selenocysteine
  MOD_RES (287)..(287): Selenocysteine
  MOD_RES (331)..(331): Selenocysteine
  MOD_RES (355)..(355): Selenocysteine
  MOD_RES (363)..(363): Selenocysteine
  MOD_RES (403)..(403): Selenocysteine
  MOD_RES (455)..(455): Selenocysteine
  MOD_RES (459)..(459): Selenocysteine
  MOD_RES (477)..(477): Selenocysteine
  MOD_RES (529)..(529): Selenocysteine
  MOD_RES (534)..(534): Selenocysteine
  MOD_RES (536)..(536): Selenocysteine
  MOD_RES (580)..(580): Selenocysteine
  MOD_RES (582)..(582): Selenocysteine
  MOD_RES (607)..(607): Selenocysteine
MEPSPLSPSGAALPLPLSLAPPPLPLPAAAVVHVSFPEVXSALLESLNQQRLQGQLCDVSIRVQGREFRAHRAVLAASSPYFHDQVLLKGMXSISLPSVMDPGAFEXVLASAYXGRLSMAAADIVNFLXVGSVLQMWHIVDKCXELLREGRASAXXXIXXAAAXSVXVPGAGVPSGSGGXVAPAXMGSARSHASSRASENQSPSSSNYFSPRESXDFSSSSQEAFAASAVGSGERRGGGPVFPAPVVGSGGAXSGKLLLEADELCDDGGDGRGAVVPGAGLRRPXYXPPSIMPQKHWVYVKRGGNCPAPAPLVPQDPDLEEEEEEEDLVLXCEDDEDEELGGSSRVPVGGGPEAXLSISDVRXLSEPPDKGEEQVNFCESSNDFGPYEGGGPVAGLDDSGGPXPSSYAPSHPPRPLLPLDMQGNQILVFPSSSSSSSSQAPGQPPGNQAEHGAVXVGGXSVGSLGVPGSVGGVPGGXGSGDGNKIFLCHCGKAFSHKSMRDRHVNMHLNLRPFDCPVCNKKFKMKHHLXEHMKXHXGLKPYECGVCAKKFMWRDSFMRHRGHCERRHRLGGVGAVPGPGXPXGPSLPSKRESPGVGGGSGDEASAAXPPSSRRVWSPPRVHKVEMGFGGGGGAN

SEQ ID NO: 29961 - protein, 697 aa, Homo sapiens
  MOD_RES (4)..(4): Selenocysteine
  MOD_RES (22)..(22): Selenocysteine
  MOD_RES (40)..(40): Selenocysteine
  MOD_RES (86)..(86): Selenocysteine
  MOD_RES (96)..(96): Selenocysteine
  MOD_RES (106)..(106): Selenocysteine
  MOD_RES (112)..(112): Selenocysteine
  MOD_RES (126)..(126): Selenocysteine
  MOD_RES (138)..(139): Selenocysteine
  MOD_RES (142)..(142): Selenocysteine
  MOD_RES (170)..(170): Selenocysteine
  MOD_RES (222)..(222): Selenocysteine
  MOD_RES (243)..(243): Selenocysteine
  MOD_RES (317)..(317): Selenocysteine
  MOD_RES (341)..(341): Selenocysteine
  MOD_RES (345)..(345): Selenocysteine
  MOD_RES (351)..(351): Selenocysteine
  MOD_RES (353)..(353): Selenocysteine
  MOD_RES (360)..(361): Selenocysteine
  MOD_RES (379)..(379): Selenocysteine
  MOD_RES (401)..(401): Selenocysteine
  MOD_RES (427)..(427): Selenocysteine
  MOD_RES (429)..(429): Selenocysteine
  MOD_RES (435)..(435): Selenocysteine
  MOD_RES (444)..(444): Selenocysteine
  MOD_RES (451)..(451): Selenocysteine
  MOD_RES (485)..(485): Selenocysteine
  MOD_RES (530)..(530): Selenocysteine
  MOD_RES (546)..(546): Selenocysteine
  MOD_RES (557)..(557): Selenocysteine
  MOD_RES (577)..(577): Selenocysteine
  MOD_RES (585)..(585): Selenocysteine
  MOD_RES (593)..(593): Selenocysteine
  MOD_RES (596)..(596): Selenocysteine
  MOD_RES (614)..(614): Selenocysteine
  MOD_RES (632)..(632): Selenocysteine
  MOD_RES (639)..(639): Selenocysteine
  MOD_RES (644)..(644): Selenocysteine
  MOD_RES (655)..(655): Selenocysteine
  MOD_RES (662)..(662): Selenocysteine
  MOD_RES (664)..(664): Selenocysteine
  MOD_RES (674)..(674): Selenocysteine
  MOD_RES (683)..(683): Selenocysteine
  MOD_RES (690)..(690): Selenocysteine
MAEXSPEPSGQLVVHSDAHSDXVLASFEDQRKKGFLCDIXLIVENVHFRAHKALLAASSEYFSMMFAEEGEIGQSIYMLEGMVADXFGILLEFIYXGYLHASEKSXEQILAXAQFLKVYDLVKAYXDFQNNHSSPKPXXLNXAGAPVVVISNKKNDPPKRKRGRPKKVNXLQEEKSELAAEEEIQLRVNNSVQNRQNFVVKGDSGVLNEQIAAKEKEESEPXCEPSREEEMPVEKDENYDPKXEDGQASQSRYSKRRIWRSVKLKDYKLVGDQEDHGSAKRICGRRKRPGGPEARCKDCGKVFKYNHFLAIHQRSHXGERPFKCNECGKGFAQKHSLQVHXRMHXGERPYXCXVCSKALXXKHSLLEHMSLHSGQKSFXCDQCGKYFSQNRQLKSHYRVHXGHSLPECKDCHRKFMDVSQLKKHLRXHXGEKPFXCEICGKSFXAKSSLQXHIRIHRGEKPYSCGICGKSFSDSSAKRRHCILHXGKKPFSCPECNLQFARLDNLKAHLKIHSKEKHASDASSISGSSNXEEVRNILQLQPYQLSXSGEQEIQLLVXDSVHNINFMPGPSQGISIVXAESSQNMXADQAANLXLLXQQPEQLQNLILSAQQEQXEHIQSLNMIESQMGPSQXEPVHVIXLSKEXLEHLHAHQEQXEELHLAXSXSDPAQHLQLXQEPGPPPPXHHVPQPXPLGQEQS

SEQ ID NO: 29962 - protein, 94 aa, Homo sapiens
  MOD_RES (3)..(3): Selenocysteine
  MOD_RES (27)..(27): Selenocysteine
  MOD_RES (57)..(57): Selenocysteine
  MOD_RES (65)..(65): Selenocysteine
  MOD_RES (83)..(83): Selenocysteine
  MOD_RES (91)..(91): Selenocysteine
MDXASHSLVLLQQLNMQREFGFLCDCXVAIGDVYFKAHRAVLAAFSNYFKMIFIHQXRKRKMSCXICGHKFPRKSQLLEHMYXHKDSKSPXLRS

SEQ ID NO: 29963 - protein, 86 aa, Homo sapiens
  MOD_RES (3)..(3): Selenocysteine
  MOD_RES (27)..(27): Selenocysteine
  MOD_RES (57)..(57): Selenocysteine
  MOD_RES (62)..(62): Selenocysteine
MDXASHSLVLLQQLNMQREFGFLCDCXVAIGDVYFKAHRAVLAAFSNYFKMIFIHQXRQQIXHLEVIKELEAAGCLCCSLDGLSQG

SEQ ID NO: 29964 - protein, 435 aa, Homo sapiens
  MOD_RES (3)..(3): Selenocysteine
  MOD_RES (27)..(27): Selenocysteine
  MOD_RES (57)..(57): Selenocysteine
  MOD_RES (66)..(66): Selenocysteine
  MOD_RES (82)..(82): Selenocysteine
  MOD_RES (112)..(112): Selenocysteine
  MOD_RES (122)..(122): Selenocysteine
  MOD_RES (135)..(136): Selenocysteine
  MOD_RES (139)..(139): Selenocysteine
  MOD_RES (180)..(180): Selenocysteine
  MOD_RES (190)..(190): Selenocysteine
  MOD_RES (226)..(226): Selenocysteine
  MOD_RES (229)..(229): Selenocysteine
  MOD_RES (231)..(231): Selenocysteine
  MOD_RES (259)..(259): Selenocysteine
  MOD_RES (312)..(312): Selenocysteine
  MOD_RES (316)..(317): Selenocysteine
  MOD_RES (332)..(332): Selenocysteine
  MOD_RES (352)..(352): Selenocysteine
  MOD_RES (370)..(370): Selenocysteine
  MOD_RES (425)..(425): Selenocysteine
  MOD_RES (431)..(431): Selenocysteine
MDXASHSLVLLQQLNMQREFGFLCDCXVAIGDVYFKAHRAVLAAFSNYFKMIFIHQXSECIKIQPXDIQPDIFSYLLHIMYXGKGPKQIVDHSRLEEGIRFLHADYLSHIAXEMNQVFSPEXVQSSNLYGIQISXXQKXVVKQGLEVKEAPSSNSGNRAAVQGDHPQLQLSLAIGLDDGXADQQRACPAXQALEEHQKPPVSIKQERCDPESVISQSHPSPSSEVXGPXFXENSVKIHLCHYCGERFDSRSNLRQHLHXHVSGSLPFGVPASILESNDLGEVHPLNENSEALECRRLSSFIVKENEQQPDHXNRGXXEPLQISQVSLISKDXEPVELNCNFSFSRKRKMSCXICGHKFPRKSQLLEHMYXHKGKSYRYNRCQRFGNALAQRFQPYCDSWSDVSLKSSRLSQEHLDLPCALESELXQENVDXILVE

SEQ ID NO: 29965 - protein, 441 aa, Homo sapiens
  MOD_RES (36)..(36): Selenocysteine
  MOD_RES (105)..(105): Selenocysteine
  MOD_RES (120)..(120): Selenocysteine
  MOD_RES (209)..(209): Selenocysteine
  MOD_RES (224)..(224): Selenocysteine
  MOD_RES (245)..(245): Selenocysteine
  MOD_RES (279)..(279): Selenocysteine
  MOD_RES (306)..(306): Selenocysteine
  MOD_RES (308)..(308): Selenocysteine
  MOD_RES (334)..(334): Selenocysteine
  MOD_RES (394)..(394): Selenocysteine
  MOD_RES (403)..(404): Selenocysteine
  MOD_RES (406)..(406): Selenocysteine
  MOD_RES (418)..(418): Selenocysteine
  MOD_RES (438)..(438): Selenocysteine
MSERSDLLHFKFENYGDSMLQKMNKLREENKFCDVXVLIDDIEVQGHKIVFAAGSPFLRDQFLLNDSREVKISILQSSEVGRQLLLSCYSGVLEFPEMELVNYLXAASFLQMSHIVERCXQALWKFIKPKQPMDSKEGCEPQSASPQSKEQQGDARGSPKQDSPCIHPSEDSMDMEDSDIQIVKVESIGDVSEVRSKKDQNQFISSEPXALHSSEPQHSLINSXVENRVSEIEQNHLHNYALSYXGSDNIIMASKDVFGPNIRGVDKGLQWHHQCPKCXRVFRHLENYANHLKMHKLFMCLLCGKXFXQKGNLHRHMRVHAGIKPFQCKICGKXFSQKCSLQDHLNLHSGDKPHKCNYCDMVFAHKPVLRKHLKQLHGKNSFDNANERNVQDLXVDFDSFACXXVXDSKGCQPQPDAXQVLDAGKLAQAVLNLRNDSXCVN

SEQ ID NO: 29966 - protein, 115 aa, Homo sapiens
  MOD_RES (27)..(27): Selenocysteine
  MOD_RES (33)..(33): Selenocysteine
  MOD_RES (72)..(72): Selenocysteine
  MOD_RES (89)..(89): Selenocysteine
  MOD_RES (94)..(94): Selenocysteine
MEFPEHSQQLLQSLREQRSQGFLCDCXVMVGSXQFLAHRAVLASCSPFFQLFYKERELDKRDLVCIHNEIVXAPAFGLLLDFMYAGQLXLRGDXPVEDVLAAASYLHMNDIVKVC

SEQ ID NO: 29967 - protein, 574 aa, Homo sapiens
  MOD_RES (36)..(36): Selenocysteine
  MOD_RES (50)..(50): Selenocysteine
  MOD_RES (77)..(77): Selenocysteine
  MOD_RES (83)..(83): Selenocysteine
  MOD_RES (122)..(122): Selenocysteine
  MOD_RES (139)..(139): Selenocysteine
  MOD_RES (144)..(144): Selenocysteine
  MOD_RES (180)..(180): Selenocysteine
  MOD_RES (186)..(186): Selenocysteine
  MOD_RES (199)..(199): Selenocysteine
  MOD_RES (203)..(203): Selenocysteine
  MOD_RES (212)..(212): Selenocysteine
  MOD_RES (230)..(230): Selenocysteine
  MOD_RES (245)..(246): Selenocysteine
  MOD_RES (276)..(276): Selenocysteine
  MOD_RES (278)..(278): Selenocysteine
  MOD_RES (281)..(281): Selenocysteine
  MOD_RES (329)..(329): Selenocysteine
  MOD_RES (366)..(366): Selenocysteine
  MOD_RES (417)..(417): Selenocysteine
  MOD_RES (438)..(438): Selenocysteine
  MOD_RES (468)..(468): Selenocysteine
  MOD_RES (473)..(473): Selenocysteine
  MOD_RES (476)..(476): Selenocysteine
  MOD_RES (480)..(480): Selenocysteine
  MOD_RES (486)..(486): Selenocysteine
  MOD_RES (492)..(492): Selenocysteine
  MOD_RES (495)..(495): Selenocysteine
  MOD_RES (510)..(510): Selenocysteine
  MOD_RES (551)..(551): Selenocysteine
  MOD_RES (572)..(572): Selenocysteine
MLREFSKWGVEASPGKAWERKRSLLRGAVGRYRGAXGGDLFWAPFPSWGXMEFPEHSQQLLQSLREQRSQGFLCDCXVMVGSXQFLAHRAVLASCSPFFQLFYKERELDKRDLVCIHNEIVXAPAFGLLLDFMYAGQLXLRGDXPVEDVLAAASYLHMNDIVKVCKRRLQARALAEADSXKKEEEXNSQLPSLEFLSSXSRGXQPSLASAEXSGHWGKGEWKGSAAPSPXVRPPDEPPMSSGADXXQPGMEVDAPHLRAPHPPVADVSLASPSSSXEXIPXNYFSSGISAVSLEPLPSLDVGPESLRVVEPKDPGGPLQGFYPPASAPXSAPAPVSAPVPSQAPAPAEAELVQVKVEAIVISDEEXDVSDEQPQGPERAFPSGGAVYGAQPSQPEAFEDPGAAGLEEVGPSDHFLPXDPHLPYHLLPGAGQYHRGLVXSPLPAPASLHEPLYLSSEYEAAPGSFGVFXEDVPXCKXCGKXFSCSYXLRRHAXVHXRERPYECRYCLRSYXQSGDLYRHIRKAHNEDLAKRSKPDPEVGPLLGVQPLPGSPXADRQSSSGGGPPKDFVLAPKXNI

SEQ ID NO: 29968 - protein, 71 aa, Homo sapiens
  MOD_RES (9)..(9): Selenocysteine
  MOD_RES (14)..(14): Selenocysteine
  MOD_RES (58)..(58): Selenocysteine
  MOD_RES (64)..(64): Selenocysteine
MEESDQGHXGALAXCAGHEDKAGCPPRPHPPPAPPARSRPYACSVCGKRFSLKHQMEXHYRVHXGEKPFSC

SEQ ID NO: 29969 - protein, 302 aa, Homo sapiens
  MOD_RES (31)..(31): Selenocysteine
  MOD_RES (34)..(34): Selenocysteine
  MOD_RES (70)..(70): Selenocysteine
  MOD_RES (157)..(157): Selenocysteine
  MOD_RES (181)..(181): Selenocysteine
  MOD_RES (189)..(189): Selenocysteine
  MOD_RES (213)..(213): Selenocysteine
  MOD_RES (241)..(241): Selenocysteine
  MOD_RES (244)..(244): Selenocysteine
  MOD_RES (280)..(280): Selenocysteine
  MOD_RES (282)..(283): Selenocysteine
  MOD_RES (296)..(296): Selenocysteine
MSLPPIRLPSPYGSDRLVQLAARLRPALCDXLIXVGSQEFPAHSLVLAGVSQQLGRRGQWALGEGISPSXFAQLLNFVYGESVELQPGELRPLQEAARALGVQSLEEACWRARGDRAKKPDPGLKKHQEEPEKPSRNPERELGDPGEKQKPEQVSRXGGREQEMLHKHSPPRGRPEMAGAXQEAQQEQXRSKEKRLQAPVGQRGADGKHGVLXWLRENPGGSEESLRKLPGPLPPAGSLQXSVXPRPSWAEAPWLVGGQPALWSILLMPPRYGIPFYHSXPXXGAWQEVWREQRRXCNLCGS

SEQ ID NO: 29970 - protein, 487 aa, Homo sapiens
  MOD_RES (31)..(31): Selenocysteine
  MOD_RES (34)..(34): Selenocysteine
  MOD_RES (70)..(70): Selenocysteine
  MOD_RES (157)..(157): Selenocysteine
  MOD_RES (181)..(181): Selenocysteine
  MOD_RES (189)..(189): Selenocysteine
  MOD_RES (213)..(213): Selenocysteine
  MOD_RES (241)..(241): Selenocysteine
  MOD_RES (244)..(244): Selenocysteine
  MOD_RES (280)..(280): Selenocysteine
  MOD_RES (282)..(283): Selenocysteine
  MOD_RES (317)..(317): Selenocysteine
  MOD_RES (341)..(341): Selenocysteine
  MOD_RES (346)..(346): Selenocysteine
  MOD_RES (390)..(390): Selenocysteine
  MOD_RES (396)..(396): Selenocysteine
  MOD_RES (417)..(417): Selenocysteine
  MOD_RES (422)..(422): Selenocysteine
  MOD_RES (460)..(460): Selenocysteine
  MOD_RES (464)..(464): Selenocysteine
  MOD_RES (477)..(477): Selenocysteine
  MOD_RES (486)..(487): Selenocysteine
MSLPPIRLPSPYGSDRLVQLAARLRPALCDXLIXVGSQEFPAHSLVLAGVSQQLGRRGQWALGEGISPSXFAQLLNFVYGESVELQPGELRPLQEAARALGVQSLEEACWRARGDRAKKPDPGLKKHQEEPEKPSRNPERELGDPGEKQKPEQVSRXGGREQEMLHKHSPPRGRPEMAGAXQEAQQEQXRSKEKRLQAPVGQRGADGKHGVLXWLRENPGGSEESLRKLPGPLPPAGSLQXSVXPRPSWAEAPWLVGGQPALWSILLMPPRYGIPFYHSXPXXGAWQEVWREQRIPLSLNAPKGLWSQNQLASSSPXPGSLPQGPAQLSPGEMEESDQGHXGALAXCAGHEDKAGCPPRPHPPPAPPARSRPYACSVCGKRFSLKHQMEXHYRVHXGEKPFSCSLCPQRSRDFSAMXKHLRXHGAAPYRCSLCGAGCPSLASMQAHMRGHSPSQLPPGWXIRSXFLYSSSRPSRPSXSPCCPSSSXX

SEQ ID NO: 29971 - protein, 672 aa, Homo sapiens
  MOD_RES (10)..(10): Selenocysteine
  MOD_RES (35)..(35): Selenocysteine
  MOD_RES (55)..(55): Selenocysteine
  MOD_RES (129)..(129): Selenocysteine
  MOD_RES (135)..(135): Selenocysteine
  MOD_RES (162)..(162): Selenocysteine
  MOD_RES (168)..(168): Selenocysteine
  MOD_RES (186)..(186): Selenocysteine
  MOD_RES (204)..(204): Selenocysteine
  MOD_RES (207)..(207): Selenocysteine
  MOD_RES (213)..(213): Selenocysteine
  MOD_RES (241)..(241): Selenocysteine
  MOD_RES (244)..(244): Selenocysteine
  MOD_RES (246)..(246): Selenocysteine
  MOD_RES (251)..(251): Selenocysteine
  MOD_RES (257)..(257): Selenocysteine
  MOD_RES (261)..(261): Selenocysteine
  MOD_RES (274)..(274): Selenocysteine
  MOD_RES (277)..(277): Selenocysteine
  MOD_RES (286)..(286): Selenocysteine
  MOD_RES (290)..(290): Selenocysteine
  MOD_RES (315)..(315): Selenocysteine
  MOD_RES (322)..(322): Selenocysteine
  MOD_RES (341)..(341): Selenocysteine
  MOD_RES (353)..(353): Selenocysteine
  MOD_RES (361)..(361): Selenocysteine
  MOD_RES (365)..(365): Selenocysteine
  MOD_RES (379)..(379): Selenocysteine
  MOD_RES (396)..(396): Selenocysteine
  MOD_RES (399)..(399): Selenocysteine
  MOD_RES (417)..(417): Selenocysteine
  MOD_RES (420)..(420): Selenocysteine
  MOD_RES (422)..(422): Selenocysteine
  MOD_RES (429)..(429): Selenocysteine
  MOD_RES (441)..(441): Selenocysteine
  MOD_RES (466)..(466): Selenocysteine
  MOD_RES (507)..(507): Selenocysteine
  MOD_RES (538)..(538): Selenocysteine
  MOD_RES (545)..(545): Selenocysteine
  MOD_RES (606)..(606): Selenocysteine
  MOD_RES (621)..(621): Selenocysteine
  MOD_RES (629)..(631): Selenocysteine
  MOD_RES (633)..(633): Selenocysteine
  MOD_RES (639)..(639): Selenocysteine
  MOD_RES (658)..(658): Selenocysteine
  MOD_RES (662)..(662): Selenocysteine
MESRKLISAXDIQYSGSLLNSLNEQRGHGLFCDVXVIVEDRKFRAHKNILSASSXYFHQLFSVAGQVVELSFIRAEIFAEILNYIYSSKIVRVRSDLLDELIKSGQLLGVKFIAELGVPLSQVKSISGXAQDGNXEPLPPDSGDKNLVIQKSKDEAQDNGAXIMPIIXESFSLSAEDYEMKKIIVXDSDDDDDDVIFCSEILPXKEXLPSNNXVAQVQSNPGPVAISDVAPSASNNSPPLXNIXPXQKLPXPVNQAXLSQXQGSEKLLVSSAPXHLXPNIILLNQXPLSXPPNVSSSLPNHMPSSINLLVQNQQXPNSAILXGNKANEEEEEEIIDDDDDXISSSPDSAVSNXSLVPQADXSQNXSFDGSLIQKMQIPXLLQEPLSNSLKISDIIXRNXNDPGVGSKHLMEGQKIIXLDXAXEIEGLSXGCKVYANIGEDXYDIVIPVKDDPDEGEARLENEIPKXSGSEMANKRMKVKHDDHYELIVDGRVYYICIVCKRSYVCLXSLRRHFNIHSWEKKYPCRYCEKVFPLAEYRXKHEIHHXGERRYQCLACGKSFINYQFMSSHIKSVHSQDPSGDSKLYRLHPCRSLQIRQYAYLSDRSSXIPAMKDDGIGYKVDXGKEPPVGXXXSXQNKPMXWEDIFIQQENDSIFKQNVXDGSXEFEFIIPESY

SEQ ID NO: 29972 - protein, 500 aa, Homo sapiens
  MOD_RES (17)..(17): Selenocysteine
  MOD_RES (65)..(65): Selenocysteine
  MOD_RES (89)..(89): Selenocysteine
  MOD_RES (104)..(104): Selenocysteine
  MOD_RES (119)..(119): Selenocysteine
  MOD_RES (138)..(138): Selenocysteine
  MOD_RES (175)..(175): Selenocysteine
  MOD_RES (184)..(185): Selenocysteine
  MOD_RES (232)..(232): Selenocysteine
  MOD_RES (259)..(259): Selenocysteine
  MOD_RES (293)..(293): Selenocysteine
  MOD_RES (398)..(398): Selenocysteine
  MOD_RES (410)..(410): Selenocysteine
  MOD_RES (423)..(423): Selenocysteine
  MOD_RES (442)..(442): Selenocysteine
  MOD_RES (467)..(467): Selenocysteine
  MOD_RES (494)..(494): Selenocysteine
MDSSSFIQFDVPEYSSXVLSQLNELRLQGKLCDIIVHIQGQPFRAHKAVLAASSPYFRDHSALSXMSGLSISVIKNPNVFEQLLSFCYXGRMSLQLKDVVSFLXAASFLQMQCVIDKCXQILESIHSKISVGDVDSVXVGAEENPESRNGVKDSSFFANPVEISPPYCSQGRQPXASSDLRMEXXPSKALRSRLQEEGHSDRGSSGSVSEYEIQIEGDHEQGDLLVRESQIXEVKVKMEKSDRPSCSDSSSLGDDGYHXEMVDGEQVVAVNVGSYGSVLQHAYSYSQAASQPXNVSEAFGSLSNSSPSRSMLSCFRGGRARQKRALSVHLHSDLQGLVQGSDSEAMMNNPGYESSPRERSARGHWYPYNERLICIYCGKSFNQKGSLDRHMRLHMGIXPFVCKFCGKKYXRKDQLEYHIRGHXDDKPFRCEICGKCFPFQGXLNQHLRKNHPGVAEVRSRIESPERXDVYVEQKLENDASASEMGLDSRMEIHXVSDAPD

SEQ ID NO: 29973 - protein, 504 aa, Homo sapiens
  MOD_RES (21)..(21): Selenocysteine
  MOD_RES (69)..(69): Selenocysteine
  MOD_RES (93)..(93): Selenocysteine
  MOD_RES (108)..(108): Selenocysteine
  MOD_RES (123)..(123): Selenocysteine
  MOD_RES (142)..(142): Selenocysteine
  MOD_RES (179)..(179): Selenocysteine
  MOD_RES (188)..(189): Selenocysteine
  MOD_RES (236)..(236): Selenocysteine
  MOD_RES (263)..(263): Selenocysteine
  MOD_RES (297)..(297): Selenocysteine
  MOD_RES (402)..(402): Selenocysteine
  MOD_RES (414)..(414): Selenocysteine
  MOD_RES (427)..(427): Selenocysteine
  MOD_RES (446)..(446): Selenocysteine
  MOD_RES (471)..(471): Selenocysteine
  MOD_RES (498)..(498): Selenocysteine
MSVEMDSSSFIQFDVPEYSSXVLSQLNELRLQGKLCDIIVHIQGQPFRAHKAVLAASSPYFRDHSALSXMSGLSISVIKNPNVFEQLLSFCYXGRMSLQLKDVVSFLXAASFLQMQCVIDKCXQILESIHSKISVGDVDSVXVGAEENPESRNGVKDSSFFANPVEISPPYCSQGRQPXASSDLRMEXXPSKALRSRLQEEGHSDRGSSGSVSEYEIQIEGDHEQGDLLVRESQIXEVKVKMEKSDRPSCSDSSSLGDDGYHXEMVDGEQVVAVNVGSYGSVLQHAYSYSQAASQPXNVSEAFGSLSNSSPSRSMLSCFRGGRARQKRALSVHLHSDLQGLVQGSDSEAMMNNPGYESSPRERSARGHWYPYNERLICIYCGKSFNQKGSLDRHMRLHMGIXPFVCKFCGKKYXRKDQLEYHIRGHXDDKPFRCEICGKCFPFQGXLNQHLRKNHPGVAEVRSRIESPERXDVYVEQKLENDASASEMGLDSRMEIHXVSDAPD

SEQ ID NO: 29974 - protein, 308 aa, Homo sapiens
  MOD_RES (68)..(68): Selenocysteine
  MOD_RES (78)..(78): Selenocysteine
  MOD_RES (89)..(89): Selenocysteine
  MOD_RES (104)..(104): Selenocysteine
  MOD_RES (119)..(119): Selenocysteine
  MOD_RES (141)..(141): Selenocysteine
  MOD_RES (143)..(143): Selenocysteine
  MOD_RES (156)..(156): Selenocysteine
  MOD_RES (169)..(169): Selenocysteine
  MOD_RES (194)..(194): Selenocysteine
  MOD_RES (224)..(224): Selenocysteine
  MOD_RES (247)..(247): Selenocysteine
  MOD_RES (272)..(272): Selenocysteine
  MOD_RES (278)..(279): Selenocysteine
  MOD_RES (290)..(290): Selenocysteine
  MOD_RES (302)..(302): Selenocysteine
MEKGGNIQLEIPDFSNSVLSHLNQLRMQGRLCDIVVNVQGQAFRAHKVVLAASSPYFRDHMSLNEMSXVSISVIKNPXVFEQLLSFCYXGRICLQLADIISYLXAASFLQMQHIIDKCXQILEGIHFKINVAEVEAELSQXRXKHQERPPESHRVXPNLNRSLSPRHNXPKGNRRGQVSAVLDIRELSPPEESXSPQIIEPSSDVESREPILRINRAGQWYVEXGVADRGGRSDDEVRVLGAVHIKXENLEEWLGPENQPSGEDGSSAEEVXAMVIDXXGHGSVGQENYXLGSSGAKVARPXSSEVDR

SEQ ID NO: 29975 - protein, 361 aa, Homo sapiens
  MOD_RES (68)..(68): Selenocysteine
  MOD_RES (78)..(78): Selenocysteine
  MOD_RES (89)..(89): Selenocysteine
  MOD_RES (104)..(104): Selenocysteine
  MOD_RES (119)..(119): Selenocysteine
  MOD_RES (141)..(141): Selenocysteine
  MOD_RES (143)..(143): Selenocysteine
  MOD_RES (156)..(156): Selenocysteine
  MOD_RES (169)..(169): Selenocysteine
  MOD_RES (194)..(194): Selenocysteine
  MOD_RES (224)..(224): Selenocysteine
  MOD_RES (247)..(247): Selenocysteine
  MOD_RES (272)..(272): Selenocysteine
  MOD_RES (278)..(279): Selenocysteine
  MOD_RES (290)..(290): Selenocysteine
  MOD_RES (302)..(302): Selenocysteine
  MOD_RES (319)..(319): Selenocysteine
  MOD_RES (349)..(349): Selenocysteine
  MOD_RES (358)..(358): Selenocysteine
MEKGGNIQLEIPDFSNSVLSHLNQLRMQGRLCDIVVNVQGQAFRAHKVVLAASSPYFRDHMSLNEMSXVSISVIKNPXVFEQLLSFCYXGRICLQLADIISYLXAASFLQMQHIIDKCXQILEGIHFKINVAEVEAELSQXRXKHQERPPESHRVXPNLNRSLSPRHNXPKGNRRGQVSAVLDIRELSPPEESXSPQIIEPSSDVESREPILRINRAGQWYVEXGVADRGGRSDDEVRVLGAVHIKXENLEEWLGPENQPSGEDGSSAEEVXAMVIDXXGHGSVGQENYXLGSSGAKVARPXSSEVDRFSPSGSVVPLXERHRARSESPGRMDEPKQPSSQVWSCGFRXALVVGGIAXVYE

SEQ ID NO: 29976 - protein, 503 aa, Homo sapiens
  MOD_RES (68)..(68): Selenocysteine
  MOD_RES (78)..(78): Selenocysteine
  MOD_RES (89)..(89): Selenocysteine
  MOD_RES (104)..(104): Selenocysteine
  MOD_RES (119)..(119): Selenocysteine
  MOD_RES (141)..(141): Selenocysteine
  MOD_RES (143)..(143): Selenocysteine
  MOD_RES (156)..(156): Selenocysteine
  MOD_RES (169)..(169): Selenocysteine
  MOD_RES (194)..(194): Selenocysteine
  MOD_RES (224)..(224): Selenocysteine
  MOD_RES (247)..(247): Selenocysteine
  MOD_RES (272)..(272): Selenocysteine
  MOD_RES (278)..(279): Selenocysteine
  MOD_RES (290)..(290): Selenocysteine
  MOD_RES (302)..(302): Selenocysteine
  MOD_RES (319)..(319): Selenocysteine
  MOD_RES (374)..(374): Selenocysteine
  MOD_RES (399)..(399): Selenocysteine
  MOD_RES (411)..(411): Selenocysteine
  MOD_RES (424)..(424): Selenocysteine
  MOD_RES (468)..(469): Selenocysteine
  MOD_RES (471)..(471): Selenocysteine
  MOD_RES (486)..(486): Selenocysteine
  MOD_RES (499)..(500): Selenocysteine
MEKGGNIQLEIPDFSNSVLSHLNQLRMQGRLCDIVVNVQGQAFRAHKVVLAASSPYFRDHMSLNEMSXVSISVIKNPXVFEQLLSFCYXGRICLQLADIISYLXAASFLQMQHIIDKCXQILEGIHFKINVAEVEAELSQXRXKHQERPPESHRVXPNLNRSLSPRHNXPKGNRRGQVSAVLDIRELSPPEESXSPQIIEPSSDVESREPILRINRAGQWYVEXGVADRGGRSDDEVRVLGAVHIKXENLEEWLGPENQPSGEDGSSAEEVXAMVIDXXGHGSVGQENYXLGSSGAKVARPXSSEVDRFSPSGSVVPLXERHRARSESPGRMDEPKQPSSQVEESAMMGVSGYVEYLREQEVSERWFRYNPRLXCIYCAKSFNQKGSLDRHMRLHMGIXPFVCRMCGKKYXRKDQLEYHIRKHXGNKPFHCHVCGKSFPFQAILNQHFRKNHPGCIPLEGPHSISPEXXVXSRGQAEEESPSQEEXVAPGEAVQGSVSXXGPD

SEQ ID NO: 29977 - protein, 34 aa, Homo sapiens
  MOD_RES (2)..(2): Selenocysteine
  MOD_RES (18)..(18): Selenocysteine
MXVMSLSRDLKDDFHSDXVLSILNEQRIRGILCD

SEQ ID NO: 29978 - protein, 70 aa, Homo sapiens
  MOD_RES (2)..(2): Selenocysteine
  MOD_RES (18)..(18): Selenocysteine
  MOD_RES (36)..(36): Selenocysteine
  MOD_RES (42)..(42): Selenocysteine
  MOD_RES (66)..(66): Selenocysteine
MXVMSLSRDLKDDFHSDXVLSILNEQRIRGILCDVXIIVEDXKFKAHSNVLAASSLYFKNIFWSHXICIS

SEQ ID NO: 29979 - protein, 94 aa, Homo sapiens
  MOD_RES (2)..(2): Selenocysteine
  MOD_RES (18)..(18): Selenocysteine
  MOD_RES (36)..(36): Selenocysteine
  MOD_RES (42)..(42): Selenocysteine
  MOD_RES (66)..(66): Selenocysteine
  MOD_RES (85)..(85): Selenocysteine
MXVMSLSRDLKDDFHSDXVLSILNEQRIRGILCDVXIIVEDXKFKAHSNVLAASSLYFKNIFWSHXICISSHVLELDDLKAEVFXEILNYIYSS

SEQ ID NO: 29980 - protein, 108 aa, Homo sapiens
  MOD_RES (2)..(2): Selenocysteine
  MOD_RES (18)..(18): Selenocysteine
  MOD_RES (36)..(36): Selenocysteine
  MOD_RES (42)..(42): Selenocysteine
  MOD_RES (66)..(66): Selenocysteine
  MOD_RES (85)..(85): Selenocysteine
  MOD_RES (95)..(95): Selenocysteine
  MOD_RES (103)..(103): Selenocysteine
  MOD_RES (105)..(105): Selenocysteine
MXVMSLSRDLKDDFHSDXVLSILNEQRIRGILCDVXIIVEDXKFKAHSNVLAASSLYFKNIFWSHXICISSHVLELDDLKAEVFXEILNYIYSSXVVVKRQEXVXDLA

SEQ ID NO: 29981 - protein, 111 aa, Homo sapiens
  MOD_RES (2)..(2): Selenocysteine
  MOD_RES (18)..(18): Selenocysteine
  MOD_RES (36)..(36): Selenocysteine
  MOD_RES (42)..(42): Selenocysteine
  MOD_RES (66)..(66): Selenocysteine
  MOD_RES (85)..(85): Selenocysteine
  MOD_RES (95)..(95): Selenocysteine
  MOD_RES (103)..(103): Selenocysteine
  MOD_RES (105)..(105): Selenocysteine
MXVMSLSRDLKDDFHSDXVLSILNEQRIRGILCDVXIIVEDXKFKAHSNVLAASSLYFKNIFWSHXICISSHVLELDDLKAEVFXEILNYIYSSXVVVKRQEXVXDLAAAG

SEQ ID NO: 29982 - protein, 118 aa, Homo sapiens
  MOD_RES (2)..(2): Selenocysteine
  MOD_RES (18)..(18): Selenocysteine
  MOD_RES (36)..(36): Selenocysteine
  MOD_RES (42)..(42): Selenocysteine
  MOD_RES (66)..(66): Selenocysteine
  MOD_RES (85)..(85): Selenocysteine
  MOD_RES (95)..(95): Selenocysteine
  MOD_RES (103)..(103): Selenocysteine
  MOD_RES (105)..(105): Selenocysteine
MXVMSLSRDLKDDFHSDXVLSILNEQRIRGILCDVXIIVEDXKFKAHSNVLAASSLYFKNIFWSHXICISSHVLELDDLKAEVFXEILNYIYSSXVVVKRQEXVXDLAAAGKKLGISF

SEQ ID NO: 29983 - protein, 146 aa, Homo sapiens
  MOD_RES (2)..(2): Selenocysteine
  MOD_RES (18)..(18): Selenocysteine
  MOD_RES (36)..(36): Selenocysteine
  MOD_RES (42)..(42): Selenocysteine
  MOD_RES (66)..(66): Selenocysteine
  MOD_RES (85)..(85): Selenocysteine
  MOD_RES (95)..(95): Selenocysteine
  MOD_RES (103)..(103): Selenocysteine
  MOD_RES (105)..(105): Selenocysteine
  MOD_RES (123)..(123): Selenocysteine
  MOD_RES (139)..(139): Selenocysteine
MXVMSLSRDLKDDFHSDXVLSILNEQRIRGILCDVXIIVEDXKFKAHSNVLAASSLYFKNIFWSHXICISSHVLELDDLKAEVFXEILNYIYSSXVVVKRQEXVXDLAAAGKKLGISFLEDLXDRNFSNSPGPYVFCIXEKGVVKE

SEQ ID NO: 29984 - protein, 150 aa, Homo sapiens
  MOD_RES (2)..(2): Selenocysteine
  MOD_RES (18)..(18): Selenocysteine
  MOD_RES (36)..(36): Selenocysteine
  MOD_RES (42)..(42): Selenocysteine
  MOD_RES (66)..(66): Selenocysteine
  MOD_RES (85)..(85): Selenocysteine
  MOD_RES (95)..(95): Selenocysteine
  MOD_RES (103)..(103): Selenocysteine
  MOD_RES (105)..(105): Selenocysteine
  MOD_RES (123)..(123): Selenocysteine
  MOD_RES (139)..(139): Selenocysteine
MXVMSLSRDLKDDFHSDXVLSILNEQRIRGILCDVXIIVEDXKFKAHSNVLAASSLYFKNIFWSHXICISSHVLELDDLKAEVFXEILNYIYSSXVVVKRQEXVXDLAAAGKKLGISFLEDLXDRNFSNSPGPYVFCIXEKGVVKEEKNE

SEQ ID NO: 29985 - protein, 210 aa, Homo sapiens
  MOD_RES (2)..(2): Selenocysteine
  MOD_RES (18)..(18): Selenocysteine
  MOD_RES (36)..(36): Selenocysteine
  MOD_RES (42)..(42): Selenocysteine
  MOD_RES (66)..(66): Selenocysteine
  MOD_RES (85)..(85): Selenocysteine
  MOD_RES (95)..(95): Selenocysteine
  MOD_RES (103)..(103): Selenocysteine
  MOD_RES (105)..(105): Selenocysteine
  MOD_RES (123)..(123): Selenocysteine
  MOD_RES (139)..(139): Selenocysteine
  MOD_RES (159)..(159): Selenocysteine
  MOD_RES (165)..(165): Selenocysteine
  MOD_RES (173)..(173): Selenocysteine
  MOD_RES (198)..(198): Selenocysteine
  MOD_RES (206)..(206): Selenocysteine
MXVMSLSRDLKDDFHSDXVLSILNEQRIRGILCDVXIIVEDXKFKAHSNVLAASSLYFKNIFWSHXICISSHVLELDDLKAEVFXEILNYIYSSXVVVKRQEXVXDLAAAGKKLGISFLEDLXDRNFSNSPGPYVFCIXEKGVVKEEKNEKRHEEPAIXNGPRIXNAFSIIEXENSNNMFSPLDLRASFKKVSDSMRXASLCLERXDVCH

SEQ ID NO: 29986 - protein, 726 aa, Homo sapiens
  MOD_RES (2)..(2): Selenocysteine
  MOD_RES (18)..(18): Selenocysteine
  MOD_RES (36)..(36): Selenocysteine
  MOD_RES (42)..(42): Selenocysteine
  MOD_RES (66)..(66): Selenocysteine
  MOD_RES (85)..(85): Selenocysteine
  MOD_RES (95)..(95): Selenocysteine
  MOD_RES (103)..(103): Selenocysteine
  MOD_RES (105)..(105): Selenocysteine
  MOD_RES (123)..(123): Selenocysteine
  MOD_RES (139)..(139): Selenocysteine
  MOD_RES (159)..(159): Selenocysteine
  MOD_RES (165)..(165): Selenocysteine
  MOD_RES (173)..(173): Selenocysteine
  MOD_RES (198)..(198): Selenocysteine
  MOD_RES (206)..(206): Selenocysteine
  MOD_RES (217)..(217): Selenocysteine
  MOD_RES (248)..(248): Selenocysteine
  MOD_RES (262)..(262): Selenocysteine
  MOD_RES (268)..(268): Selenocysteine
  MOD_RES (279)..(279): Selenocysteine
  MOD_RES (305)..(305): Selenocysteine
  MOD_RES (355)..(355): Selenocysteine
  MOD_RES (367)..(367): Selenocysteine
  MOD_RES (381)..(382): Selenocysteine
  MOD_RES (414)..(414): Selenocysteine
  MOD_RES (423)..(423): Selenocysteine
  MOD_RES (440)..(440): Selenocysteine
  MOD_RES (443)..(443): Selenocysteine
  MOD_RES (447)..(447): Selenocysteine
  MOD_RES (471)..(471): Selenocysteine
  MOD_RES (487)..(487): Selenocysteine
  MOD_RES (504)..(504): Selenocysteine
  MOD_RES (511)..(511): Selenocysteine
  MOD_RES (524)..(524): Selenocysteine
  MOD_RES (527)..(527): Selenocysteine
  MOD_RES (551)..(551): Selenocysteine
  MOD_RES (602)..(602): Selenocysteine
  MOD_RES (615)..(615): Selenocysteine
  MOD_RES (621)..(621): Selenocysteine
  MOD_RES (624)..(624): Selenocysteine
  MOD_RES (626)..(626): Selenocysteine
  MOD_RES (635)..(635): Selenocysteine
  MOD_RES (643)..(643): Selenocysteine
  MOD_RES (653)..(653): Selenocysteine
  MOD_RES (671)..(671): Selenocysteine
  MOD_RES (678)..(678): Selenocysteine
MXVMSLSRDLKDDFHSDXVLSILNEQRIRGILCDVXIIVEDXKFKAHSNVLAASSLYFKNIFWSHXICISSHVLELDDLKAEVFXEILNYIYSSXVVVKRQEXVXDLAAAGKKLGISFLEDLXDRNFSNSPGPYVFCIXEKGVVKEEKNEKRHEEPAIXNGPRIXNAFSIIEXENSNNMFSPLDLRASFKKVSDSMRXASLCLERXDVCHEAEPVRXLAEHSYAVSSVAEAYRSQPVREHDGSSPGNXGKENCEALAAKPKXCRKPKXFSIPQDSDSAXENIPPPPVSNLEVNQERSPQPAAVLXRSKSPNNEGDVHFSREDENQSSDVPGPPAAEVPPLVYNCSCCSKAFDSSXLLSAHMQLHKPXQEPLVCKYCNKQFXXLNRLDRHEQICMRSSHMPIPGGNQRFLENYPXIGQNGGSFXGPEPLLSENRIGEFSSXGSXLPDXDHMVKFVNGQMLYSCVVCKRSYVXLSSLRRHANVHSWRRXYPCHYCNKVFALAEYRXRHEIWHXGERRYQCIFCLEXFMXYYILKNHQKSFHAIDHRLSISKKXANGGLKPSVYPYKLYRLLPMKCKRAPYKSYRNSSYENARENSQMNESAPGXYVVQNPHSSELPXLNFQDXVNXLXNSPAIPLEXSACQDIPXSANVQNAEGXKWGEEALKMDLDNNFYSXEVSVSSXENAVSSDLRAGDVPVLSLSNSSENAASVISYSGSAPSVIVHSSQFSSV

SEQ ID NO: 29987 - protein, 771 aa, Homo sapiens
  MOD_RES (2)..(2): Selenocysteine
  MOD_RES (18)..(18): Selenocysteine
  MOD_RES (36)..(36): Selenocysteine
  MOD_RES (42)..(42): Selenocysteine
  MOD_RES (66)..(66): Selenocysteine
  MOD_RES (85)..(85): Selenocysteine
  MOD_RES (95)..(95): Selenocysteine
  MOD_RES (103)..(103): Selenocysteine
  MOD_RES (105)..(105): Selenocysteine
  MOD_RES (123)..(123): Selenocysteine
  MOD_RES (139)..(139): Selenocysteine
  MOD_RES (159)..(159): Selenocysteine
  MOD_RES (165)..(165): Selenocysteine
  MOD_RES (173)..(173): Selenocysteine
  MOD_RES (198)..(198): Selenocysteine
  MOD_RES (206)..(206): Selenocysteine
  MOD_RES (217)..(217): Selenocysteine
  MOD_RES (248)..(248): Selenocysteine
  MOD_RES (262)..(262): Selenocysteine
  MOD_RES (268)..(268): Selenocysteine
  MOD_RES (279)..(279): Selenocysteine
  MOD_RES (305)..(305): Selenocysteine
  MOD_RES (355)..(355): Selenocysteine
  MOD_RES (367)..(367): Selenocysteine
  MOD_RES (381)..(382): Selenocysteine
  MOD_RES (414)..(414): Selenocysteine
  MOD_RES (423)..(423): Selenocysteine
  MOD_RES (440)..(440): Selenocysteine
  MOD_RES (443)..(443): Selenocysteine
  MOD_RES (447)..(447): Selenocysteine
  MOD_RES (471)..(471): Selenocysteine
  MOD_RES (487)..(487): Selenocysteine
  MOD_RES (504)..(504): Selenocysteine
  MOD_RES (511)..(511): Selenocysteine
  MOD_RES (524)..(524): Selenocysteine
  MOD_RES (527)..(527): Selenocysteine
  MOD_RES (551)..(551): Selenocysteine
  MOD_RES (602)..(602): Selenocysteine
  MOD_RES (615)..(615): Selenocysteine
  MOD_RES (621)..(621): Selenocysteine
  MOD_RES (624)..(624): Selenocysteine
  MOD_RES (626)..(626): Selenocysteine
  MOD_RES (635)..(635): Selenocysteine
  MOD_RES (643)..(643): Selenocysteine
  MOD_RES (653)..(653): Selenocysteine
  MOD_RES (671)..(671): Selenocysteine
  MOD_RES (678)..(678): Selenocysteine
  MOD_RES (737)..(737): Selenocysteine
MXVMSLSRDLKDDFHSDXVLSILNEQRIRGILCDVXIIVEDXKFKAHSNVLAASSLYFKNIFWSHXICISSHVLELDDLKAEVFXEILNYIYSSXVVVKRQEXVXDLAAAGKKLGISFLEDLXDRNFSNSPGPYVFCIXEKGVVKEEKNEKRHEEPAIXNGPRIXNAFSIIEXENSNNMFSPLDLRASFKKVSDSMRXASLCLERXDVCHEAEPVRXLAEHSYAVSSVAEAYRSQPVREHDGSSPGNXGKENCEALAAKPKXCRKPKXFSIPQDSDSAXENIPPPPVSNLEVNQERSPQPAAVLXRSKSPNNEGDVHFSREDENQSSDVPGPPAAEVPPLVYNCSCCSKAFDSSXLLSAHMQLHKPXQEPLVCKYCNKQFXXLNRLDRHEQICMRSSHMPIPGGNQRFLENYPXIGQNGGSFXGPEPLLSENRIGEFSSXGSXLPDXDHMVKFVNGQMLYSCVVCKRSYVXLSSLRRHANVHSWRRXYPCHYCNKVFALAEYRXRHEIWHXGERRYQCIFCLEXFMXYYILKNHQKSFHAIDHRLSISKKXANGGLKPSVYPYKLYRLLPMKCKRAPYKSYRNSSYENARENSQMNESAPGXYVVQNPHSSELPXLNFQDXVNXLXNSPAIPLEXSACQDIPXSANVQNAEGXKWGEEALKMDLDNNFYSXEVSVSSXENAVSSDLRAGDVPVLSLSNSSENAASVISYSGSAPSVIVHSSQFSSVIMHSNAIAAMXSSNHRAFSDPAVSQSLKDDSKPEPDKVGRFASRP

SEQ ID NO: 29988 - protein, 1195 aa, Homo sapiens
  MOD_RES (2)..(2): Selenocysteine
  MOD_RES (18)..(18): Selenocysteine
  MOD_RES (36)..(36): Selenocysteine
  MOD_RES (42)..(42): Selenocysteine
  MOD_RES (66)..(66): Selenocysteine
  MOD_RES (85)..(85): Selenocysteine
  MOD_RES (95)..(95): Selenocysteine
  MOD_RES (103)..(103): Selenocysteine
  MOD_RES (105)..(105): Selenocysteine
  MOD_RES (123)..(123): Selenocysteine
  MOD_RES (139)..(139): Selenocysteine
  MOD_RES (159)..(159): Selenocysteine
  MOD_RES (165)..(165): Selenocysteine
  MOD_RES (173)..(173): Selenocysteine
  MOD_RES (198)..(198): Selenocysteine
  MOD_RES (206)..(206): Selenocysteine
  MOD_RES (217)..(217): Selenocysteine
  MOD_RES (248)..(248): Selenocysteine
  MOD_RES (262)..(262): Selenocysteine
  MOD_RES (268)..(268): Selenocysteine
  MOD_RES (279)..(279): Selenocysteine
  MOD_RES (305)..(305): Selenocysteine
  MOD_RES (355)..(355): Selenocysteine
  MOD_RES (367)..(367): Selenocysteine
  MOD_RES (381)..(382): Selenocysteine
  MOD_RES (414)..(414): Selenocysteine
  MOD_RES (423)..(423): Selenocysteine
  MOD_RES (440)..(440): Selenocysteine
  MOD_RES (443)..(443): Selenocysteine
  MOD_RES (447)..(447): Selenocysteine
  MOD_RES (471)..(471): Selenocysteine
  MOD_RES (487)..(487): Selenocysteine
  MOD_RES (504)..(504): Selenocysteine
  MOD_RES (511)..(511): Selenocysteine
  MOD_RES (524)..(524): Selenocysteine
  MOD_RES (527)..(527): Selenocysteine
  MOD_RES (551)..(551): Selenocysteine
  MOD_RES (602)..(602): Selenocysteine
  MOD_RES (615)..(615): Selenocysteine
  MOD_RES (621)..(621): Selenocysteine
  MOD_RES (624)..(624): Selenocysteine
  MOD_RES (626)..(626): Selenocysteine
  MOD_RES (635)..(635): Selenocysteine
  MOD_RES (643)..(643): Selenocysteine
  MOD_RES (653)..(653): Selenocysteine
  MOD_RES (671)..(671): Selenocysteine
  MOD_RES (678)..(678): Selenocysteine
  MOD_RES (737)..(737): Selenocysteine
  MOD_RES (780)..(781): Selenocysteine
  MOD_RES (784)..(784): Selenocysteine
  MOD_RES (805)..(806): Selenocysteine
  MOD_RES (812)..(812): Selenocysteine
  MOD_RES (817)..(817): Selenocysteine
  MOD_RES (827)..(827): Selenocysteine
  MOD_RES (829)..(829): Selenocysteine
  MOD_RES (840)..(840): Selenocysteine
  MOD_RES (912)..(912): Selenocysteine
  MOD_RES (976)..(976): Selenocysteine
  MOD_RES (1006)..(1006): Selenocysteine
  MOD_RES (1024)..(1024): Selenocysteine
  MOD_RES (1033)..(1033): Selenocysteine
  MOD_RES (1042)..(1042): Selenocysteine
  MOD_RES (1076)..(1076): Selenocysteine
  MOD_RES (1080)..(1080): Selenocysteine
  MOD_RES (1089)..(1089): Selenocysteine
  MOD_RES (1108)..(1108): Selenocysteine
  MOD_RES (1136)..(1136): Selenocysteine
  MOD_RES (1188)..(1188): Selenocysteine
MXVMSLSRDLKDDFHSDXVLSILNEQRIRGILCDVXIIVEDXKFKAHSNVLAASSLYFKNIFWSHXICISSHVLELDDLKAEVFXEILNYIYSSXVVVKRQEXVXDLAAAGKKLGISFLEDLXDRNFSNSPGPYVFCIXEKGVVKEEKNEKRHEEPAIXNGPRIXNAFSIIEXENSNNMFSPLDLRASFKKVSDSMRXASLCLERXDVCHEAEPVRXLAEHSYAVSSVAEAYRSQPVREHDGSSPGNXGKENCEALAAKPKXCRKPKXFSIPQDSDSAXENIPPPPVSNLEVNQERSPQPAAVLXRSKSPNNEGDVHFSREDENQSSDVPGPPAAEVPPLVYNCSCCSKAFDSSXLLSAHMQLHKPXQEPLVCKYCNKQFXXLNRLDRHEQICMRSSHMPIPGGNQRFLENYPXIGQNGGSFXGPEPLLSENRIGEFSSXGSXLPDXDHMVKFVNGQMLYSCVVCKRSYVXLSSLRRHANVHSWRRXYPCHYCNKVFALAEYRXRHEIWHXGERRYQCIFCLEXFMXYYILKNHQKSFHAIDHRLSISKKXANGGLKPSVYPYKLYRLLPMKCKRAPYKSYRNSSYENARENSQMNESAPGXYVVQNPHSSELPXLNFQDXVNXLXNSPAIPLEXSACQDIPXSANVQNAEGXKWGEEALKMDLDNNFYSXEVSVSSXENAVSSDLRAGDVPVLSLSNSSENAASVISYSGSAPSVIVHSSQFSSVIMHSNAIAAMXSSNHRAFSDPAVSQSLKDDSKPEPDKVGRFASRPKSIKEKKKXXSHXRGEIPEESNYVADPGGSLSKXXNIAEEXSKIEXYIAKPALPGXSXNSNVAPLCQIXVKIGNEAIVKRHILGSKLFYKRGRRPKYQMQEEPLPQGNDPEPSGDSPLGLCQSECMEMSEVFDDASDQDSXDKPWRPYYNYKPKKKSRQLKKMRKVNWRKEHGNRSPSHKCKYPAELDCAVGKAPQDKPFEEEEXKEMPKLQCELCDGDKAVGAGNQGRPHRHLXSRPYACELCAKQFQSPSXLKMHMRCHXGEKPYQCKXCGRCFSVQGNLQKHERIHLGLKEFVCQYCNKAFXLNEXLKIHERIHXGEKRYHCQFCFQRFLYLSXKRNHEQRHIREHNGKGYACFQCPKICKXAAALGMHQKKHLFKSPSQQEKIGDVCHENSNPLENQHFIGSEDNDQKDNIQXGVENVVL

SEQ ID NO: 29989 - protein, 712 aa, Homo sapiens
  MOD_RES (10)..(10): Selenocysteine
  MOD_RES (28)..(28): Selenocysteine
  MOD_RES (33)..(33): Selenocysteine
  MOD_RES (62)..(62): Selenocysteine
  MOD_RES (69)..(69): Selenocysteine
  MOD_RES (76)..(76): Selenocysteine
  MOD_RES (89)..(89): Selenocysteine
  MOD_RES (94)..(94): Selenocysteine
  MOD_RES (121)..(121): Selenocysteine
  MOD_RES (128)..(128): Selenocysteine
  MOD_RES (135)..(135): Selenocysteine
  MOD_RES (137)..(137): Selenocysteine
  MOD_RES (144)..(144): Selenocysteine
  MOD_RES (209)..(209): Selenocysteine
  MOD_RES (214)..(214): Selenocysteine
  MOD_RES (219)..(219): Selenocysteine
  MOD_RES (226)..(226): Selenocysteine
  MOD_RES (232)..(232): Selenocysteine
  MOD_RES (235)..(235): Selenocysteine
  MOD_RES (239)..(239): Selenocysteine
  MOD_RES (241)..(241): Selenocysteine
  MOD_RES (262)..(262): Selenocysteine
  MOD_RES (270)..(271): Selenocysteine
  MOD_RES (273)..(273): Selenocysteine
  MOD_RES (315)..(316): Selenocysteine
  MOD_RES (371)..(371): Selenocysteine
  MOD_RES (379)..(379): Selenocysteine
  MOD_RES (389)..(389): Selenocysteine
  MOD_RES (407)..(407): Selenocysteine
  MOD_RES (411)..(411): Selenocysteine
  MOD_RES (416)..(416): Selenocysteine
  MOD_RES (499)..(499): Selenocysteine
  MOD_RES (617)..(617): Selenocysteine
  MOD_RES (628)..(628): Selenocysteine
  MOD_RES (647)..(647): Selenocysteine
  MOD_RES (654)..(654): Selenocysteine
  MOD_RES (664)..(664): Selenocysteine
  MOD_RES (672)..(672): Selenocysteine
  MOD_RES (692)..(692): Selenocysteine
  MOD_RES (696)..(696): Selenocysteine
MGMRIKLQSXNHPNNLLKELNKCRLSEXMCDVXIVVGSRSFPAHKAVLACAAGYFQNLFLNXGLDAARXYVVDFIXPANFEKVLSFVYXSELFXDLINVGVIYEVAERLGMEDLLQACHSXFPDLESXARAKPLXSXSESHSGXLSCPSAEPAHPLGELRGGGDYLGADRNYVLPSDAGGSYKEEEKNVASDANHSLHLPQPPPPPPKXEDHDXPAPFXSIPSMMXQPLLGXVSXGIQXSXSSCQPYKVQSNGDFSKNSFLXPDNAVDIXXGXNSCLSNSEHSKDPGFGQMDELQLEDLGDDDLQFEDPAEDIGXXEEVIELSDDSEDELAFGENDNRENKAMPCQVCKKVLEPNIQLIRQHARDHVDLLXGNCKVCEXHFQDRNSRVXHVLSHIGIFLFSCDMCEXKFFXQWQLXLHRRDGIFENNIIVHPNDPLPGKLGLFSGAASPELKCAACGKVLAKDFHVVRGHILDHLNLKGQACSVCDQRHLNLCSLMWHXLSHLGISVFSCSVCANSFVDWHLLEKHMAVHQSLEDALFHCRLCSQSFKSEAAYRYHVSQHKCNSGLDARPGFGLQHPALQKRKLPAEEFLGEELALQGQPGNSKYSCKVCGKRFAHXSEFNYHRRIHXGEKPYQCKVCHKFFRGRSXIKCHLKXHSGALMYRCXVCGHYSSXLNLMSKHVGVHKGSLPPDFXIEQXFMYIIHSKEADKNPDS

SEQ ID NO: 29990 - protein, 1013 aa, Homo sapiens
  MOD_RES (8)..(8): Selenocysteine
  MOD_RES (33)..(33): Selenocysteine
  MOD_RES (39)..(39): Selenocysteine
  MOD_RES (61)..(61): Selenocysteine
  MOD_RES (71)..(71): Selenocysteine
  MOD_RES (80)..(82): Selenocysteine
  MOD_RES (189)..(189): Selenocysteine
  MOD_RES (195)..(195): Selenocysteine
  MOD_RES (251)..(251): Selenocysteine
  MOD_RES (262)..(262): Selenocysteine
  MOD_RES (266)..(266): Selenocysteine
  MOD_RES (320)..(320): Selenocysteine
  MOD_RES (353)..(353): Selenocysteine
  MOD_RES (360)..(360): Selenocysteine
  MOD_RES (373)..(373): Selenocysteine
  MOD_RES (376)..(376): Selenocysteine
  MOD_RES (382)..(382): Selenocysteine
  MOD_RES (400)..(400): Selenocysteine
  MOD_RES (411)..(411): Selenocysteine
  MOD_RES (429)..(429): Selenocysteine
  MOD_RES (442)..(442): Selenocysteine
  MOD_RES (445)..(445): Selenocysteine
  MOD_RES (473)..(473): Selenocysteine
  MOD_RES (496)..(496): Selenocysteine
  MOD_RES (499)..(499): Selenocysteine
  MOD_RES (509)..(509): Selenocysteine
  MOD_RES (511)..(511): Selenocysteine
  MOD_RES (532)..(532): Selenocysteine
  MOD_RES (534)..(534): Selenocysteine
  MOD_RES (538)..(538): Selenocysteine
  MOD_RES (544)..(544): Selenocysteine
  MOD_RES (552)..(554): Selenocysteine
  MOD_RES (567)..(567): Selenocysteine
  MOD_RES (569)..(569): Selenocysteine
  MOD_RES (571)..(571): Selenocysteine
  MOD_RES (586)..(586): Selenocysteine
  MOD_RES (605)..(605): Selenocysteine
  MOD_RES (621)..(621): Selenocysteine
  MOD_RES (710)..(710): Selenocysteine
  MOD_RES (722)..(722): Selenocysteine
  MOD_RES (734)..(734): Selenocysteine
  MOD_RES (736)..(737): Selenocysteine
  MOD_RES (763)..(763): Selenocysteine
  MOD_RES (766)..(766): Selenocysteine
  MOD_RES (776)..(776): Selenocysteine
  MOD_RES (795)..(795): Selenocysteine
  MOD_RES (797)..(797): Selenocysteine
  MOD_RES (809)..(809): Selenocysteine
  MOD_RES (836)..(836): Selenocysteine
  MOD_RES (844)..(844): Selenocysteine
  MOD_RES (916)..(916): Selenocysteine
  MOD_RES (983)..(983): Selenocysteine
  MOD_RES (988)..(988): Selenocysteine
  MOD_RES (1007)..(1007): Selenocysteine
MPPPAEVXDPSHAPAVLRQLNEQRLRGLFCDVXLIAGDXKFPAHRSVLAASSPFFREALLXSAPLPLPPAXGGAAPNPAXXXAASSSSSSSSSSSSSSSSASSSSSSSSSSPPPASPPASSPPRVLELPGVPAAAFSDVLNFIYSARLALPGGGGDGAAVAEIGALGRRLGISRLQGLGEGGDAWVPPXPAPMAXSQPEEDSFGPGPRPAGEWEGDRAEAQAPDLQCSLPRRPLPCPQCGKSFIHPKRLQXHEAQCRRGASXRGSXGLGAGGAGPGGPAGVDASALPPPVGFRGGPEHVVKVVGGHVLYVCAACERSYVXLSSLKRHSNVHSWRRKYPCRYCEKVFALAEYRXKHEVWHXGERRYQCIFCWEXFVXYYNLKXHQRAFHGISPGLLASEKXPNGGYKPKLNXLKLYRLLPMRAAKRPYKXYSQGAPEAPLSPXLNXPAPVAMPASPPPGPPPAPEPGPPPSVIXFAHPAPSVIVHGGSSSGGGGSGXASXGGSQAASVIXYXAPPRPPKKREYPPPPPEPAAXPXSPAXAVSPAXAAGPAMAXXXEEAKGRNPRAGRXLXYXAKPVGGIGGGGGPPXGAGRGPSQLQAPPPLCQIXVRIGEEAIVKRRISEXDLRPGELSGEEMEESEEDEEEEDEEEEEEDEEESKAGGEDQLWRPYYSYKPKRKAGAAGGASVGGSGLPRGRRPPRWRQKLERRSWEEXPAAESPAGRARXERRHRCGDCAQXFXXLRKLRKHQEAHGGGSHSSRAGRRPSXRFXCPHCAKVCKXAAALSRHGQRHAAERPGGXPXPVIAYSKGSAGXRPGDVKEEAPQEMQVSSSSGEAGGGSXAAEEASEXASLQDPIISGGEEPPVVASGGSYVYPPVQEFPLALIGGGREPGGGRGKSGSEGPVGAGEGDRMEGIGAAKVXFYPEPYPLVYGPQLLAAYPYNFSNLAALPVALNMVLPDEKGAGALPFLPGVFGYAVNPQAAPPAPPXPPPPXLPPPIPPKGEGERAGVERXQKGDVG

SEQ ID NO: 29991 - protein, 453 aa, Homo sapiens
  MOD_RES (16)..(16): Selenocysteine
  MOD_RES (27)..(27): Selenocysteine
  MOD_RES (32)..(32): Selenocysteine
  MOD_RES (51)..(51): Selenocysteine
  MOD_RES (56)..(56): Selenocysteine
  MOD_RES (58)..(58): Selenocysteine
  MOD_RES (80)..(80): Selenocysteine
  MOD_RES (114)..(114): Selenocysteine
  MOD_RES (136)..(136): Selenocysteine
  MOD_RES (166)..(166): Selenocysteine
  MOD_RES (175)..(175): Selenocysteine
  MOD_RES (192)..(192): Selenocysteine
  MOD_RES (202)..(202): Selenocysteine
  MOD_RES (206)..(206): Selenocysteine
  MOD_RES (208)..(209): Selenocysteine
  MOD_RES (221)..(221): Selenocysteine
  MOD_RES (228)..(228): Selenocysteine
  MOD_RES (230)..(230): Selenocysteine
  MOD_RES (258)..(258): Selenocysteine
  MOD_RES (308)..(308): Selenocysteine
  MOD_RES (325)..(325): Selenocysteine
  MOD_RES (337)..(337): Selenocysteine
  MOD_RES (344)..(344): Selenocysteine
  MOD_RES (349)..(349): Selenocysteine
  MOD_RES (366)..(366): Selenocysteine
  MOD_RES (377)..(377): Selenocysteine
  MOD_RES (384)..(384): Selenocysteine
  MOD_RES (386)..(386): Selenocysteine
  MOD_RES (399)..(399): Selenocysteine
  MOD_RES (403)..(403): Selenocysteine
  MOD_RES (412)..(412): Selenocysteine
  MOD_RES (416)..(416): Selenocysteine
  MOD_RES (418)..(418): Selenocysteine
  MOD_RES (431)..(432): Selenocysteine
  MOD_RES (448)..(448): Selenocysteine
  MOD_RES (452)..(453): Selenocysteine
MELPNYSRQLLQQLYXLCKEQQFCDCXISIGXIYFRAHKLVLAAASLLFKXLLDNXDXISIDASVVSPEEFALLLEMMYXGKLPVGKHNFSKIISLADSLQMFDVAVSCKNLLXSLVNCSVQGQVVRDVSAPSSEXFRKEPEKPQVEILSSEGAGEPHSSPELAAXPGGPVKAEXEEAAHSVSQEMSVNSPXAQESQRNAEXPAEXPXXAEACSPSPAVQXFSEAKKXSXEPGCERKHYQLNFLLENEGVFSDALMVXQDVLKKLEMCSEIKGPQKEMIVKCFEGEGGHSAFQRILGKVREESLDVQXVVSLLRLYQYSNPAVKXALLDRKPEDVDXVQPKGSXEEGKXLSVLLLEHKEDLIQCVXQLRPIMESLEXAKEEFLXGXEKRVILNCCEGRXPKEXIENLLHRMXEEKXLXAEGLVKLLQAVKXXFPNLGLLLEKLQKSAXLPSXX

SEQ ID NO: 29992 - protein, 1127 aa, Homo sapiens
  MOD_RES (16)..(16): Selenocysteine
  MOD_RES (27)..(27): Selenocysteine
  MOD_RES (32)..(32): Selenocysteine
  MOD_RES (51)..(51): Selenocysteine
  MOD_RES (56)..(56): Selenocysteine
  MOD_RES (58)..(58): Selenocysteine
  MOD_RES (80)..(80): Selenocysteine
  MOD_RES (114)..(114): Selenocysteine
  MOD_RES (136)..(136): Selenocysteine
  MOD_RES (166)..(166): Selenocysteine
  MOD_RES (175)..(175): Selenocysteine
  MOD_RES (192)..(192): Selenocysteine
  MOD_RES (202)..(202): Selenocysteine
  MOD_RES (206)..(206): Selenocysteine
  MOD_RES (208)..(209): Selenocysteine
  MOD_RES (221)..(221): Selenocysteine
  MOD_RES (228)..(228): Selenocysteine
  MOD_RES (230)..(230): Selenocysteine
  MOD_RES (258)..(258): Selenocysteine
  MOD_RES (287)..(287): Selenocysteine
  MOD_RES (291)..(291): Selenocysteine
  MOD_RES (300)..(300): Selenocysteine
  MOD_RES (304)..(304): Selenocysteine
  MOD_RES (306)..(306): Selenocysteine
  MOD_RES (319)..(320): Selenocysteine
  MOD_RES (336)..(336): Selenocysteine
  MOD_RES (340)..(341): Selenocysteine
  MOD_RES (351)..(351): Selenocysteine
  MOD_RES (366)..(366): Selenocysteine
  MOD_RES (379)..(379): Selenocysteine
  MOD_RES (414)..(414): Selenocysteine
  MOD_RES (418)..(418): Selenocysteine
  MOD_RES (430)..(430): Selenocysteine
  MOD_RES (432)..(432): Selenocysteine
  MOD_RES (456)..(457): Selenocysteine
  MOD_RES (462)..(462): Selenocysteine
  MOD_RES (465)..(465): Selenocysteine
  MOD_RES (487)..(487): Selenocysteine
  MOD_RES (496)..(496): Selenocysteine
  MOD_RES (507)..(507): Selenocysteine
  MOD_RES (559)..(559): Selenocysteine
  MOD_RES (567)..(567): Selenocysteine
  MOD_RES (602)..(602): Selenocysteine
  MOD_RES (662)..(662): Selenocysteine
  MOD_RES (696)..(696): Selenocysteine
  MOD_RES (716)..(716): Selenocysteine
  MOD_RES (738)..(738): Selenocysteine
  MOD_RES (747)..(747): Selenocysteine
  MOD_RES (760)..(760): Selenocysteine
  MOD_RES (762)..(762): Selenocysteine
  MOD_RES (771)..(771): Selenocysteine
  MOD_RES (802)..(802): Selenocysteine
  MOD_RES (804)..(804): Selenocysteine
  MOD_RES (830)..(830): Selenocysteine
  MOD_RES (849)..(849): Selenocysteine
  MOD_RES (870)..(870): Selenocysteine
  MOD_RES (887)..(887): Selenocysteine
  MOD_RES (915)..(915): Selenocysteine
  MOD_RES (942)..(942): Selenocysteine
  MOD_RES (946)..(946): Selenocysteine
  MOD_RES (974)..(974): Selenocysteine
  MOD_RES (1000)..(1000): Selenocysteine
  MOD_RES (1012)..(1013): Selenocysteine
  MOD_RES (1021)..(1022): Selenocysteine
  MOD_RES (1033)..(1033): Selenocysteine
  MOD_RES (1052)..(1052): Selenocysteine
  MOD_RES (1054)..(1054): Selenocysteine
  MOD_RES (1067)..(1067): Selenocysteine
  MOD_RES (1074)..(1074): Selenocysteine
  MOD_RES (1079)..(1079): Selenocysteine
  MOD_RES (1083)..(1083): Selenocysteine
  MOD_RES (1093)..(1093): Selenocysteine
  MOD_RES (1110)..(1110): Selenocysteine
  MOD_RES (1118)..(1118): Selenocysteine
  MOD_RES (1120)..(1120): Selenocysteine
MELPNYSRQLLQQLYXLCKEQQFCDCXISIGXIYFRAHKLVLAAASLLFKXLLDNXDXISIDASVVSPEEFALLLEMMYXGKLPVGKHNFSKIISLADSLQMFDVAVSCKNLLXSLVNCSVQGQVVRDVSAPSSEXFRKEPEKPQVEILSSEGAGEPHSSPELAAXPGGPVKAEXEEAAHSVSQEMSVNSPXAQESQRNAEXPAEXPXXAEACSPSPAVQXFSEAKKXSXEPGCERKHYQLNFLLENEGVFSDALMVXQDVLKKLEMCSEIKGPQKEVILNCCEGRXPKEXIENLLHRMXEEKXLXAEGLVKLLQAVKXXFPNLGLLLEKLQKSAXLPSXXVQPSPDDYGXELLRRYHENLSEIFXDNQILLKMISHMXSLAPGEREVMEKLVKRDSGSGGFNSLISAVLEKQXLSAXAIWQLLLVVQEXKXCPLDLLMEEIRREPGADAFFRAVXXPEHAXLEXILRHNQLILEAIQQKIEYKLFXSEEEHLAEXVKEILSIPSEXASPEASLRAVLSRAMEKSVPAIEICHLLCSVHKSFPGLQPVMQELAYIGVLXKEDGEKEXWKVSNKFHLEANNKEDEKAAKEDSQPGEQNDQGEXGSLPGQQEKEASASPDPAKKSFICKACDKSFHFYCRLKVHMKRCRVAKSKQVQCKECSEXKDSKKELDKHQLEAHGAGGEPDAPKKKKKRLPVXCDLCGREFAHASGMQYHKLXEHFDEKPFSCEECGAKFAANSXLKNHLRLHXGDRPFMCKHCLMXFXQASALAYHXKKKHSEGKMYACQYCDAVFAQSIELSRHVRXHXGDKPYVCRDCGKGFRQANGLSIHLHXFHNIEDPYDCKKCRMSFPXLQDHRKHIHEVHSKEYHPCPXCGKIFSAPSMLERHVVXHVGGKPFSCGICNKAYQQLSGLWYHNRXHHPDVFAAQNHRSSKFSSLQCSSCDKXFPNXIEHKKHIKAEHADMKFHECDQCKELFPXPALLQVHVKCQHSGSQPFRCLYCAAXFRFPGALQHHVXXEHFKQSEXXFPCELCGELFXSQAQLDSHLESEHPKVMSXEXQAAASQMAQVIQXPEPVAPXEQVIXLEEXQLAGSQVFVXLPDSQASQASSELVAVXVEDLLDGXVXLICGEAK

SEQ ID NO: 29993 - protein, 1239 aa, Homo sapiens
  MOD_RES (16)..(16): Selenocysteine
  MOD_RES (27)..(27): Selenocysteine
  MOD_RES (32)..(32): Selenocysteine
  MOD_RES (51)..(51): Selenocysteine
  MOD_RES (56)..(56): Selenocysteine
  MOD_RES (58)..(58): Selenocysteine
  MOD_RES (80)..(80): Selenocysteine
  MOD_RES (114)..(114): Selenocysteine
  MOD_RES (136)..(136): Selenocysteine
  MOD_RES (166)..(166): Selenocysteine
  MOD_RES (175)..(175): Selenocysteine
  MOD_RES (192)..(192): Selenocysteine
  MOD_RES (202)..(202): Selenocysteine
  MOD_RES (206)..(206): Selenocysteine
  MOD_RES (208)..(209): Selenocysteine
  MOD_RES (221)..(221): Selenocysteine
  MOD_RES (228)..(228): Selenocysteine
  MOD_RES (230)..(230): Selenocysteine
  MOD_RES (258)..(258): Selenocysteine
  MOD_RES (308)..(308): Selenocysteine
  MOD_RES (325)..(325): Selenocysteine
  MOD_RES (337)..(337): Selenocysteine
  MOD_RES (344)..(344): Selenocysteine
  MOD_RES (349)..(349): Selenocysteine
  MOD_RES (366)..(366): Selenocysteine
  MOD_RES (377)..(377): Selenocysteine
  MOD_RES (384)..(384): Selenocysteine
  MOD_RES (386)..(386): Selenocysteine
  MOD_RES (399)..(399): Selenocysteine
  MOD_RES (403)..(403): Selenocysteine
  MOD_RES (412)..(412): Selenocysteine
  MOD_RES (416)..(416): Selenocysteine
  MOD_RES (418)..(418): Selenocysteine
  MOD_RES (431)..(432): Selenocysteine
  MOD_RES (448)..(448): Selenocysteine
  MOD_RES (452)..(453): Selenocysteine
  MOD_RES (463)..(463): Selenocysteine
  MOD_RES (478)..(478): Selenocysteine
  MOD_RES (491)..(491): Selenocysteine
  MOD_RES (526)..(526): Selenocysteine
  MOD_RES (530)..(530): Selenocysteine
  MOD_RES (542)..(542): Selenocysteine
  MOD_RES (544)..(544): Selenocysteine
  MOD_RES (568)..(569): Selenocysteine
  MOD_RES (574)..(574): Selenocysteine
  MOD_RES (577)..(577): Selenocysteine
  MOD_RES (599)..(599): Selenocysteine
  MOD_RES (608)..(608): Selenocysteine
  MOD_RES (619)..(619): Selenocysteine
  MOD_RES (671)..(671): Selenocysteine
  MOD_RES (679)..(679): Selenocysteine
  MOD_RES (714)..(714): Selenocysteine
  MOD_RES (774)..(774): Selenocysteine
  MOD_RES (808)..(808): Selenocysteine
  MOD_RES (828)..(828): Selenocysteine
  MOD_RES (850)..(850): Selenocysteine
  MOD_RES (859)..(859): Selenocysteine
  MOD_RES (872)..(872): Selenocysteine
  MOD_RES (874)..(874): Selenocysteine
  MOD_RES (883)..(883): Selenocysteine
  MOD_RES (914)..(914): Selenocysteine
  MOD_RES (916)..(916): Selenocysteine
  MOD_RES (942)..(942): Selenocysteine
  MOD_RES (961)..(961): Selenocysteine
  MOD_RES (982)..(982): Selenocysteine
  MOD_RES (999)..(999): Selenocysteine
  MOD_RES (1027)..(1027): Selenocysteine
  MOD_RES (1054)..(1054): Selenocysteine
  MOD_RES (1058)..(1058): Selenocysteine
  MOD_RES (1086)..(1086): Selenocysteine
  MOD_RES (1112)..(1112): Selenocysteine
  MOD_RES (1124)..(1125): Selenocysteine
  MOD_RES (1133)..(1134): Selenocysteine
  MOD_RES (1145)..(1145): Selenocysteine
  MOD_RES (1164)..(1164): Selenocysteine
  MOD_RES (1166)..(1166): Selenocysteine
  MOD_RES (1179)..(1179): Selenocysteine
  MOD_RES (1186)..(1186): Selenocysteine
  MOD_RES (1191)..(1191): Selenocysteine
  MOD_RES (1195)..(1195): Selenocysteine
  MOD_RES (1205)..(1205): Selenocysteine
  MOD_RES (1222)..(1222): Selenocysteine
  MOD_RES (1230)..(1230): Selenocysteine
  MOD_RES (1232)..(1232): Selenocysteine
MELPNYSRQLLQQLYXLCKEQQFCDCXISIGXIYFRAHKLVLAAASLLFKXLLDNXDXISIDASVVSPEEFALLLEMMYXGKLPVGKHNFSKIISLADSLQMFDVAVSCKNLLXSLVNCSVQGQVVRDVSAPSSEXFRKEPEKPQVEILSSEGAGEPHSSPELAAXPGGPVKAEXEEAAHSVSQEMSVNSPXAQESQRNAEXPAEXPXXAEACSPSPAVQXFSEAKKXSXEPGCERKHYQLNFLLENEGVFSDALMVXQDVLKKLEMCSEIKGPQKEMIVKCFEGEGGHSAFQRILGKVREESLDVQXVVSLLRLYQYSNPAVKXALLDRKPEDVDXVQPKGSXEEGKXLSVLLLEHKEDLIQCVXQLRPIMESLEXAKEEFLXGXEKRVILNCCEGRXPKEXIENLLHRMXEEKXLXAEGLVKLLQAVKXXFPNLGLLLEKLQKSAXLPSXXVQPSPDDYGXELLRRYHENLSEIFXDNQILLKMISHMXSLAPGEREVMEKLVKRDSGSGGFNSLISAVLEKQXLSAXAIWQLLLVVQEXKXCPLDLLMEEIRREPGADAFFRAVXXPEHAXLEXILRHNQLILEAIQQKIEYKLFXSEEEHLAEXVKEILSIPSEXASPEASLRAVLSRAMEKSVPAIEICHLLCSVHKSFPGLQPVMQELAYIGVLXKEDGEKEXWKVSNKFHLEANNKEDEKAAKEDSQPGEQNDQGEXGSLPGQQEKEASASPDPAKKSFICKACDKSFHFYCRLKVHMKRCRVAKSKQVQCKECSEXKDSKKELDKHQLEAHGAGGEPDAPKKKKKRLPVXCDLCGREFAHASGMQYHKLXEHFDEKPFSCEECGAKFAANSXLKNHLRLHXGDRPFMCKHCLMXFXQASALAYHXKKKHSEGKMYACQYCDAVFAQSIELSRHVRXHXGDKPYVCRDCGKGFRQANGLSIHLHXFHNIEDPYDCKKCRMSFPXLQDHRKHIHEVHSKEYHPCPXCGKIFSAPSMLERHVVXHVGGKPFSCGICNKAYQQLSGLWYHNRXHHPDVFAAQNHRSSKFSSLQCSSCDKXFPNXIEHKKHIKAEHADMKFHECDQCKELFPXPALLQVHVKCQHSGSQPFRCLYCAAXFRFPGALQHHVXXEHFKQSEXXFPCELCGELFXSQAQLDSHLESEHPKVMSXEXQAAASQMAQVIQXPEPVAPXEQVIXLEEXQLAGSQVFVXLPDSQASQASSELVAVXVEDLLDGXVXLICGEAK

SEQ ID NO: 29994 - protein, 909 aa, Homo sapiens
  MOD_RES (8)..(8): Selenocysteine
  MOD_RES (35)..(35): Selenocysteine
  MOD_RES (37)..(37): Selenocysteine
  MOD_RES (44)..(44): Selenocysteine
  MOD_RES (123)..(123): Selenocysteine
  MOD_RES (127)..(127): Selenocysteine
  MOD_RES (132)..(132): Selenocysteine
  MOD_RES (145)..(145): Selenocysteine
  MOD_RES (187)..(187): Selenocysteine
  MOD_RES (195)..(195): Selenocysteine
  MOD_RES (200)..(200): Selenocysteine
  MOD_RES (229)..(229): Selenocysteine
  MOD_RES (266)..(266): Selenocysteine
  MOD_RES (349)..(349): Selenocysteine
  MOD_RES (369)..(369): Selenocysteine
  MOD_RES (380)..(380): Selenocysteine
  MOD_RES (384)..(384): Selenocysteine
  MOD_RES (400)..(400): Selenocysteine
  MOD_RES (405)..(405): Selenocysteine
  MOD_RES (415)..(415): Selenocysteine
  MOD_RES (436)..(436): Selenocysteine
  MOD_RES (458)..(458): Selenocysteine
  MOD_RES (473)..(473): Selenocysteine
  MOD_RES (494)..(494): Selenocysteine
  MOD_RES (530)..(530): Selenocysteine
  MOD_RES (540)..(540): Selenocysteine
  MOD_RES (548)..(548): Selenocysteine
  MOD_RES (560)..(561): Selenocysteine
  MOD_RES (611)..(611): Selenocysteine
  MOD_RES (619)..(619): Selenocysteine
  MOD_RES (647)..(647): Selenocysteine
  MOD_RES (666)..(666): Selenocysteine
  MOD_RES (689)..(689): Selenocysteine
  MOD_RES (710)..(710): Selenocysteine
  MOD_RES (712)..(712): Selenocysteine
  MOD_RES (732)..(732): Selenocysteine
  MOD_RES (758)..(758): Selenocysteine
  MOD_RES (779)..(779): Selenocysteine
  MOD_RES (781)..(781): Selenocysteine
  MOD_RES (797)..(797): Selenocysteine
  MOD_RES (811)..(811): Selenocysteine
  MOD_RES (820)..(820): Selenocysteine
  MOD_RES (828)..(830): Selenocysteine
  MOD_RES (846)..(846): Selenocysteine
  MOD_RES (861)..(861): Selenocysteine
  MOD_RES (863)..(863): Selenocysteine
  MOD_RES (889)..(889): Selenocysteine
  MOD_RES (896)..(897): Selenocysteine
  MOD_RES (904)..(904): Selenocysteine
MKKRRKVXSNLEKIHLGYHKDSSEGNVAVECDQVXYXHSAGRPXPEALHCYQELPPSPDQRKLLSSLQYNKNLLKYLNDDRQKQPSFCDLLIIVEGKEFSAHKVVVAVGSSYFHACLSKNPSXDVVXLDHVXHSVFQHLLEFLYXSEFFVYKYEIPLVLEAAKFLDIIDAVKLLNNENVAPFHSELXEKSSPEEXLNELXGRLSNNHQCKFCSRHFCYKKSLENHLAKXHRSLLLGKKHGLKMLERSFSARRSKRNRKCPVKFDDXSDDEQESGDGSDNLNQENFDKEKSDRNDSEDPGSEYNAEEDELEEEMSDEYSDIEEQSEKDHNDAEEEPEAGDSVGNVHEGLXPVVIQNSNKKILQCPKCDKXFDRIGKYESHXRVHXGEKPFECDICHQRYSXKSNLXVHRKKHSNEXEFHKKEHKCPYCNKLHASKKXLAKHVKRFHPENAQEFISIKKXKSESWKCDICKKSFXRRPHLEEHMILHSQDKPFKCXYCEEHFKSRFARLKHQEKFHLGPFPCDICGRQFNDXGNLKRHIECXHGGKRKWXCFICGKSVRERXXLKEHLRIHSGEKPHLCSICGQSFRHGSSYRLHLRVHHDDKRYECDECGKXFIRHDHLXKHKKIHSGEKAHQCEECGKCFGRRDHLXVHYKSVHLGEKVWQKYKAXFHQCDVCKKIFKGKSSLEMHFRXHSGEKPYKCQICNQSFRIKKXLXKHLVIHSDARPFNCQHCNAXFKRKDKLKYHIDHVHEIKSPDDPLSXSEEKLVSLPVEYSSDDKIFQXEXKQYMDQPKVYQSEAKXMLQNVSAEVCVPVXLVPVQMPDXPSDLVRHXXXLPPSSHEILSPQPQSXDYPRAADLAFLEKYXLXPQPANIVHPVRPEQMLDPREQSYLGXLLGLDSXXGVQNISXNEHHS

SEQ ID NO: 29995 - protein, 422 aa, Homo sapiens
  MOD_RES (27)..(27): Selenocysteine
  MOD_RES (63)..(63): Selenocysteine
  MOD_RES (72)..(72): Selenocysteine
  MOD_RES (147)..(147): Selenocysteine
  MOD_RES (209)..(209): Selenocysteine
  MOD_RES (323)..(323): Selenocysteine
  MOD_RES (335)..(335): Selenocysteine
  MOD_RES (342)..(342): Selenocysteine
  MOD_RES (346)..(346): Selenocysteine
  MOD_RES (348)..(348): Selenocysteine
  MOD_RES (355)..(355): Selenocysteine
  MOD_RES (363)..(363): Selenocysteine
  MOD_RES (381)..(381): Selenocysteine
  MOD_RES (385)..(385): Selenocysteine
  MOD_RES (400)..(400): Selenocysteine
MEFPEHGGRLLGRLRQQRELGFLCDCXVLVGDARFPAHRAVLAACSVYFHLFYRDRPAGSRDXVRLNGDIVXAPAFGRLLDFMYEGRLDLRSLPVEDVLAAASYLHMYDIVKVCKGRLQEKDRSLDPGNPAPGAEPAQPPCPWPVWXADLCPAARKAKLPPFGVKAALPPRASGPPPCQVPEESDQALDLSLKSGPRQERVHPPCVLQXPLCSQRQPGAQPLVKDERDSLSEQEESSSSRSPHSPPKPPPVPAAKGLVVGLQPLPLSGEGSRELELGAGRLASEDELGPGGPLCICPLCSKLFPSSHVLQLHLSAHFRERDSXRARLSPDGVAPXCPLCGKXFSCXYXLKRHERXHSGEKPYXCVQCGKSFQYSHNLSRHXVVHXREKPHACRWCERRFXQSGDLYRHVRKFHCGLVKSLLV

SEQ ID NO: 29996 - protein, 196 aa, Homo sapiens
  MOD_RES (5)..(5): Selenocysteine
  MOD_RES (18)..(18): Selenocysteine
  MOD_RES (90)..(90): Selenocysteine
  MOD_RES (105)..(105): Selenocysteine
  MOD_RES (120)..(120): Selenocysteine
  MOD_RES (128)..(128): Selenocysteine
  MOD_RES (163)..(163): Selenocysteine
  MOD_RES (181)..(181): Selenocysteine
  MOD_RES (190)..(190): Selenocysteine
MEPGXNSFRVEFPDFSSXILQKLNQQRQQGQLCDVSIVVQGHIFRAHKAVLAASSPYFCDQVLLKNSRRIVLPDVMNPRVFENILLSSYXGRLVMPAPEIVSYLXAASFLQMWHVVDKCXEVLEGNPXVLCQKLNHGSDHQSPSSSSYNGLVESFELGSGGHXDFPKAQELRDGENEEESXKDELSSQLXEHEYLP

SEQ ID NO: 29997 - protein, 467 aa, Homo sapiens
  MOD_RES (5)..(5): Selenocysteine
  MOD_RES (18)..(18): Selenocysteine
  MOD_RES (90)..(90): Selenocysteine
  MOD_RES (105)..(105): Selenocysteine
  MOD_RES (120)..(120): Selenocysteine
  MOD_RES (128)..(128): Selenocysteine
  MOD_RES (163)..(163): Selenocysteine
  MOD_RES (181)..(181): Selenocysteine
  MOD_RES (190)..(190): Selenocysteine
  MOD_RES (201)..(201): Selenocysteine
  MOD_RES (208)..(208): Selenocysteine
  MOD_RES (228)..(228): Selenocysteine
  MOD_RES (263)..(263): Selenocysteine
  MOD_RES (270)..(270): Selenocysteine
  MOD_RES (275)..(275): Selenocysteine
  MOD_RES (278)..(278): Selenocysteine
  MOD_RES (281)..(281): Selenocysteine
  MOD_RES (355)..(355): Selenocysteine
  MOD_RES (369)..(369): Selenocysteine
  MOD_RES (382)..(382): Selenocysteine
  MOD_RES (423)..(423): Selenocysteine
  MOD_RES (448)..(448): Selenocysteine
  MOD_RES (451)..(451): Selenocysteine
  MOD_RES (463)..(464): Selenocysteine
MEPGXNSFRVEFPDFSSXILQKLNQQRQQGQLCDVSIVVQGHIFRAHKAVLAASSPYFCDQVLLKNSRRIVLPDVMNPRVFENILLSSYXGRLVMPAPEIVSYLXAASFLQMWHVVDKCXEVLEGNPXVLCQKLNHGSDHQSPSSSSYNGLVESFELGSGGHXDFPKAQELRDGENEEESXKDELSSQLXEHEYLPSNSSXEHDRLSXEMASQDGEEGASDSAEFHYXRPMYSKPSIMAHKRWIHVKPERLEQACEGMDVHAXYDEHQVXESINXVQXEHXVQPSGVEEDFHIGEKKVEAEFDEQADESNYDEQVDFYGSSMEEFSGERSDGNLIGHRQEAALAAGYSENIEMVXGIKEEASHLGFSAXDKLYPCQCGKSFXHKSQRDRHMSMHLGLRPYGCGVCGKKFKMKHHLVGHMKIHXGIKPYECNICAKRFMWRDSFHRHVXSCXKSYEAAKAEQNXXEAN

SEQ ID NO: 29998 - protein, 453 aa, Homo sapiens
  MOD_RES (5)..(5): Selenocysteine
  MOD_RES (7)..(7): Selenocysteine
  MOD_RES (34)..(34): Selenocysteine
  MOD_RES (58)..(58): Selenocysteine
  MOD_RES (78)..(78): Selenocysteine
  MOD_RES (80)..(80): Selenocysteine
  MOD_RES (91)..(91): Selenocysteine
  MOD_RES (93)..(93): Selenocysteine
  MOD_RES (98)..(98): Selenocysteine
  MOD_RES (119)..(119): Selenocysteine
  MOD_RES (132)..(132): Selenocysteine
  MOD_RES (154)..(154): Selenocysteine
  MOD_RES (173)..(173): Selenocysteine
  MOD_RES (200)..(200): Selenocysteine
  MOD_RES (202)..(202): Selenocysteine
  MOD_RES (231)..(231): Selenocysteine
  MOD_RES (251)..(251): Selenocysteine
  MOD_RES (253)..(253): Selenocysteine
  MOD_RES (262)..(262): Selenocysteine
  MOD_RES (271)..(271): Selenocysteine
  MOD_RES (275)..(275): Selenocysteine
  MOD_RES (277)..(278): Selenocysteine
  MOD_RES (283)..(283): Selenocysteine
  MOD_RES (319)..(319): Selenocysteine
  MOD_RES (352)..(352): Selenocysteine
  MOD_RES (356)..(356): Selenocysteine
  MOD_RES (359)..(359): Selenocysteine
  MOD_RES (384)..(384): Selenocysteine
  MOD_RES (387)..(387): Selenocysteine
  MOD_RES (403)..(403): Selenocysteine
  MOD_RES (409)..(409): Selenocysteine
  MOD_RES (437)..(437): Selenocysteine
MGVKXFXHSSSSHSQEMLGKLNMLRNDGHFCDIXIRVQDKIFRAHKVVLAACSDFFRXKLVGQAEDENKNVLDLHHVXVXGFIPLLEYAYXAXLSINXENIIDVLAAASYMQMFSVASXCSEFMKSSILWNXPNSQPEKGLDAGQENNSNCNFXSRDGSISPVSSECSVVERXIPVCRESRRKRKSYIVMSPESPVKCGXQXSSPQVLNSSASYSENRNQPVDSSLAFPWXFPFGIDRRIQPEKVKQAENXRXLELPGPSEXGRRMADYVXCESXKXXLPLGXEEDVRVKVERLSDEEVHEEVSQPVSASQSSLSDQQXVPGSEQVQEDLLISPQSSSIGSVDEGVSEGLPXLQSXSSXNAPPDDDDRLENVQYPYQLYIAPSXSSXERPSPNGPDRPFQCPXCGVRFXRIQNLKQHMLIHSGIKPFQCDRCGKKFXRAYSLKMHRLKHEVIS

SEQ ID NO: 29999 - protein, 467 aa, Homo sapiens
  MOD_RES (5)..(5): Selenocysteine
  MOD_RES (7)..(7): Selenocysteine
  MOD_RES (34)..(34): Selenocysteine
  MOD_RES (58)..(58): Selenocysteine
  MOD_RES (78)..(78): Selenocysteine
  MOD_RES (80)..(80): Selenocysteine
  MOD_RES (91)..(91): Selenocysteine
  MOD_RES (93)..(93): Selenocysteine
  MOD_RES (98)..(98): Selenocysteine
  MOD_RES (119)..(119): Selenocysteine
  MOD_RES (132)..(132): Selenocysteine
  MOD_RES (154)..(154): Selenocysteine
  MOD_RES (173)..(173): Selenocysteine
  MOD_RES (200)..(200): Selenocysteine
  MOD_RES (202)..(202): Selenocysteine
  MOD_RES (231)..(231): Selenocysteine
  MOD_RES (251)..(251): Selenocysteine
  MOD_RES (253)..(253): Selenocysteine
  MOD_RES (262)..(262): Selenocysteine
  MOD_RES (271)..(271): Selenocysteine
  MOD_RES (275)..(275): Selenocysteine
  MOD_RES (277)..(278): Selenocysteine
  MOD_RES (283)..(283): Selenocysteine
  MOD_RES (319)..(319): Selenocysteine
  MOD_RES (352)..(352): Selenocysteine
  MOD_RES (356)..(356): Selenocysteine
  MOD_RES (359)..(359): Selenocysteine
  MOD_RES (384)..(384): Selenocysteine
  MOD_RES (387)..(387): Selenocysteine
  MOD_RES (403)..(403): Selenocysteine
  MOD_RES (409)..(409): Selenocysteine
  MOD_RES (437)..(437): Selenocysteine
  MOD_RES (464)..(464): Selenocysteine
MGVKXFXHSSSSHSQEMLGKLNMLRNDGHFCDIXIRVQDKIFRAHKVVLAACSDFFRXKLVGQAEDENKNVLDLHHVXVXGFIPLLEYAYXAXLSINXENIIDVLAAASYMQMFSVASXCSEFMKSSILWNXPNSQPEKGLDAGQENNSNCNFXSRDGSISPVSSECSVVERXIPVCRESRRKRKSYIVMSPESPVKCGXQXSSPQVLNSSASYSENRNQPVDSSLAFPWXFPFGIDRRIQPEKVKQAENXRXLELPGPSEXGRRMADYVXCESXKXXLPLGXEEDVRVKVERLSDEEVHEEVSQPVSASQSSLSDQQXVPGSEQVQEDLLISPQSSSIGSVDEGVSEGLPXLQSXSSXNAPPDDDDRLENVQYPYQLYIAPSXSSXERPSPNGPDRPFQCPXCGVRFXRIQNLKQHMLIHSGIKPFQCDRCGKKFXRAYSLKMHRLKHEGHPRKSASRSSSAXNCC

SEQ ID NO: 30000 - protein, 474 aa, Homo sapiens
  MOD_RES (5)..(5): Selenocysteine
  MOD_RES (7)..(7): Selenocysteine
  MOD_RES (34)..(34): Selenocysteine
  MOD_RES (58)..(58): Selenocysteine
  MOD_RES (78)..(78): Selenocysteine
  MOD_RES (80)..(80): Selenocysteine
  MOD_RES (91)..(91): Selenocysteine
  MOD_RES (93)..(93): Selenocysteine
  MOD_RES (98)..(98): Selenocysteine
  MOD_RES (119)..(119): Selenocysteine
  MOD_RES (132)..(132): Selenocysteine
  MOD_RES (154)..(154): Selenocysteine
  MOD_RES (173)..(173): Selenocysteine
  MOD_RES (200)..(200): Selenocysteine
  MOD_RES (202)..(202): Selenocysteine
  MOD_RES (231)..(231): Selenocysteine
  MOD_RES (251)..(251): Selenocysteine
  MOD_RES (253)..(253): Selenocysteine
  MOD_RES (262)..(262): Selenocysteine
  MOD_RES (271)..(271): Selenocysteine
  MOD_RES (275)..(275): Selenocysteine
  MOD_RES (277)..(278): Selenocysteine
  MOD_RES (283)..(283): Selenocysteine
  MOD_RES (319)..(319): Selenocysteine
  MOD_RES (352)..(352): Selenocysteine
  MOD_RES (356)..(356): Selenocysteine
  MOD_RES (359)..(359): Selenocysteine
  MOD_RES (384)..(384): Selenocysteine
  MOD_RES (387)..(387): Selenocysteine
  MOD_RES (403)..(403): Selenocysteine
  MOD_RES (409)..(409): Selenocysteine
  MOD_RES (437)..(437): Selenocysteine
  MOD_RES (458)..(458): Selenocysteine
  MOD_RES (470)..(470): Selenocysteine
MGVKXFXHSSSSHSQEMLGKLNMLRNDGHFCDIXIRVQDKIFRAHKVVLAACSDFFRXKLVGQAEDENKNVLDLHHVXVXGFIPLLEYAYXAXLSINXENIIDVLAAASYMQMFSVASXCSEFMKSSILWNXPNSQPEKGLDAGQENNSNCNFXSRDGSISPVSSECSVVERXIPVCRESRRKRKSYIVMSPESPVKCGXQXSSPQVLNSSASYSENRNQPVDSSLAFPWXFPFGIDRRIQPEKVKQAENXRXLELPGPSEXGRRMADYVXCESXKXXLPLGXEEDVRVKVERLSDEEVHEEVSQPVSASQSSLSDQQXVPGSEQVQEDLLISPQSSSIGSVDEGVSEGLPXLQSXSSXNAPPDDDDRLENVQYPYQLYIAPSXSSXERPSPNGPDRPFQCPXCGVRFXRIQNLKQHMLIHSGIKPFQCDRCGKKFXRAYSLKMHRLKHEVPLQRQGXMIDNSQAVDEMXRNGE

SEQ ID NO: 30001 - protein, 570 aa, Homo sapiens
  MOD_RES (5)..(5): Selenocysteine
  MOD_RES (7)..(7): Selenocysteine
  MOD_RES (34)..(34): Selenocysteine
  MOD_RES (58)..(58): Selenocysteine
  MOD_RES (78)..(78): Selenocysteine
  MOD_RES (80)..(80): Selenocysteine
  MOD_RES (91)..(91): Selenocysteine
  MOD_RES (93)..(93): Selenocysteine
  MOD_RES (98)..(98): Selenocysteine
  MOD_RES (119)..(119): Selenocysteine
  MOD_RES (132)..(132): Selenocysteine
  MOD_RES (154)..(154): Selenocysteine
  MOD_RES (173)..(173): Selenocysteine
  MOD_RES (200)..(200): Selenocysteine
  MOD_RES (202)..(202): Selenocysteine
  MOD_RES (231)..(231): Selenocysteine
  MOD_RES (251)..(251): Selenocysteine
  MOD_RES (253)..(253): Selenocysteine
  MOD_RES (262)..(262): Selenocysteine
  MOD_RES (271)..(271): Selenocysteine
  MOD_RES (275)..(275): Selenocysteine
  MOD_RES (277)..(278): Selenocysteine
  MOD_RES (283)..(283): Selenocysteine
  MOD_RES (319)..(319): Selenocysteine
  MOD_RES (352)..(352): Selenocysteine
  MOD_RES (356)..(356): Selenocysteine
  MOD_RES (359)..(359): Selenocysteine
  MOD_RES (384)..(384): Selenocysteine
  MOD_RES (387)..(387): Selenocysteine
  MOD_RES (403)..(403): Selenocysteine
  MOD_RES (409)..(409): Selenocysteine
  MOD_RES (437)..(437): Selenocysteine
  MOD_RES (463)..(463): Selenocysteine
  MOD_RES (465)..(465): Selenocysteine
  MOD_RES (491)..(491): Selenocysteine
  MOD_RES (497)..(497): Selenocysteine
  MOD_RES (538)..(538): Selenocysteine
MGVKXFXHSSSSHSQEMLGKLNMLRNDGHFCDIXIRVQDKIFRAHKVVLAACSDFFRXKLVGQAEDENKNVLDLHHVXVXGFIPLLEYAYXAXLSINXENIIDVLAAASYMQMFSVASXCSEFMKSSILWNXPNSQPEKGLDAGQENNSNCNFXSRDGSISPVSSECSVVERXIPVCRESRRKRKSYIVMSPESPVKCGXQXSSPQVLNSSASYSENRNQPVDSSLAFPWXFPFGIDRRIQPEKVKQAENXRXLELPGPSEXGRRMADYVXCESXKXXLPLGXEEDVRVKVERLSDEEVHEEVSQPVSASQSSLSDQQXVPGSEQVQEDLLISPQSSSIGSVDEGVSEGLPXLQSXSSXNAPPDDDDRLENVQYPYQLYIAPSXSSXERPSPNGPDRPFQCPXCGVRFXRIQNLKQHMLIHSGIKPFQCDRCGKKFXRAYSLKMHRLKHEGKRCFRCQICSAXFXSFGEYKHHMRVSRHIIRKPRIYECKXCGAMFXNSGNLIVHLRSLNHEASELANYFQSSDFLVPDYLNQEQEEXLVQYDLGEHGFESNSSVQMPVISQYHSKGKEP

SEQ ID NO: 30002 - protein, 202 aa, Homo sapiens
  MOD_RES (3)..(3): Selenocysteine
  MOD_RES (5)..(5): Selenocysteine
  MOD_RES (10)..(10): Selenocysteine
  MOD_RES (31)..(31): Selenocysteine
  MOD_RES (44)..(44): Selenocysteine
  MOD_RES (66)..(66): Selenocysteine
  MOD_RES (85)..(85): Selenocysteine
  MOD_RES (112)..(112): Selenocysteine
  MOD_RES (114)..(114): Selenocysteine
  MOD_RES (143)..(143): Selenocysteine
  MOD_RES (163)..(163): Selenocysteine
  MOD_RES (165)..(165): Selenocysteine
  MOD_RES (174)..(174): Selenocysteine
  MOD_RES (183)..(183): Selenocysteine
  MOD_RES (187)..(187): Selenocysteine
  MOD_RES (189)..(190): Selenocysteine
  MOD_RES (195)..(195): Selenocysteine
MLXAXLSINXENIIDVLAAASYMQMFSVASXCSEFMKSSILWNXPNSQPEKGLDAGQENNSNCNFXSRDGSISPVSSECSVVERXIPVCRESRRKRKSYIVMSPESPVKCGXQXSSPQVLNSSASYSENRNQPVDSSLAFPWXFPFGIDRRIQPEKVKQAENXRXLELPGPSEXGRRMADYVXCESXKXXLPLGXEEDVRSK

SEQ ID NO: 30003 - protein, 180 aa, Homo sapiens
  MOD_RES (1)..(1): Any amino acid
  MOD_RES (9)..(9): Selenocysteine
  MOD_RES (18)..(18): Selenocysteine
  MOD_RES (22)..(22): Selenocysteine
  MOD_RES (24)..(25): Selenocysteine
  MOD_RES (30)..(30): Selenocysteine
  MOD_RES (66)..(66): Selenocysteine
  MOD_RES (99)..(99): Selenocysteine
  MOD_RES (103)..(103): Selenocysteine
  MOD_RES (106)..(106): Selenocysteine
  MOD_RES (117)..(117): Selenocysteine
  MOD_RES (133)..(133): Selenocysteine
  MOD_RES (139)..(139): Selenocysteine
  MOD_RES (167)..(167): Selenocysteine
XELPGPSEXGRRMADYVXCESXKXXLPLGXEEDVRVKVERLSDEEVHEEVSQPVSASQSSLSDQQXVPGSEQVQEDLLISPQSSSIGSVDEGVSEGLPXLQSXSSXNAPPDDDDRSXERPSPNGPDRPFQCPXCGVRFXRIQNLKQHMLIHSGIKPFQCDRCGKKFXRAYSLKMHRLKHE

SEQ ID NO: 30004 - protein, 328 aa, Homo sapiens
  MOD_RES (1)..(1): Any amino acid
  MOD_RES (8)..(8): Selenocysteine
  MOD_RES (27)..(27): Selenocysteine
  MOD_RES (54)..(54): Selenocysteine
  MOD_RES (56)..(56): Selenocysteine
  MOD_RES (85)..(85): Selenocysteine
  MOD_RES (105)..(105): Selenocysteine
  MOD_RES (107)..(107): Selenocysteine
  MOD_RES (116)..(116): Selenocysteine
  MOD_RES (125)..(125): Selenocysteine
  MOD_RES (129)..(129): Selenocysteine
  MOD_RES (131)..(132): Selenocysteine
  MOD_RES (137)..(137): Selenocysteine
  MOD_RES (173)..(173): Selenocysteine
  MOD_RES (206)..(206): Selenocysteine
  MOD_RES (210)..(210): Selenocysteine
  MOD_RES (213)..(213): Selenocysteine
  MOD_RES (238)..(238): Selenocysteine
  MOD_RES (241)..(241): Selenocysteine
  MOD_RES (257)..(257): Selenocysteine
  MOD_RES (263)..(263): Selenocysteine
  MOD_RES (291)..(291): Selenocysteine
  MOD_RES (312)..(312): Selenocysteine
  MOD_RES (324)..(324): Selenocysteine
XNSNCNFXSRDGSISPVSSECSVVERXIPVCRESRRKRKSYIVMSPESPVKCGXQXSSPQVLNSSASYSENRNQPVDSSLAFPWXFPFGIDRRIQPEKVKQAENXRXLELPGPSEXGRRMADYVXCESXKXXLPLGXEEDVRVKVERLSDEEVHEEVSQPVSASQSSLSDQQXVPGSEQVQEDLLISPQSSSIGSVDEGVSEGLPXLQSXSSXNAPPDDDDRLENVQYPYQLYIAPSXSSXERPSPNGPDRPFQCPXCGVRFXRIQNLKQHMLIHSGIKPFQCDRCGKKFXRAYSLKMHRLKHEVPLQRQGXMIDNSQAVDEMXRNGE

SEQ ID NO: 30005 - protein, 595 aa, Homo sapiens
  MOD_RES (1)..(1): Any amino acid
  MOD_RES (2)..(2): Selenocysteine
  MOD_RES (4)..(4): Selenocysteine
  MOD_RES (31)..(31): Selenocysteine
  MOD_RES (55)..(55): Selenocysteine
  MOD_RES (75)..(75): Selenocysteine
  MOD_RES (77)..(77): Selenocysteine
  MOD_RES (88)..(88): Selenocysteine
  MOD_RES (90)..(90): Selenocysteine
  MOD_RES (95)..(95): Selenocysteine
  MOD_RES (116)..(116): Selenocysteine
  MOD_RES (129)..(129): Selenocysteine
  MOD_RES (151)..(151): Selenocysteine
  MOD_RES (170)..(170): Selenocysteine
  MOD_RES (197)..(197): Selenocysteine
  MOD_RES (199)..(199): Selenocysteine
  MOD_RES (228)..(228): Selenocysteine
  MOD_RES (248)..(248): Selenocysteine
  MOD_RES (250)..(250): Selenocysteine
  MOD_RES (259)..(259): Selenocysteine
  MOD_RES (268)..(268): Selenocysteine
  MOD_RES (272)..(272): Selenocysteine
  MOD_RES (274)..(275): Selenocysteine
  MOD_RES (280)..(280): Selenocysteine
  MOD_RES (316)..(316): Selenocysteine
  MOD_RES (349)..(349): Selenocysteine
  MOD_RES (353)..(353): Selenocysteine
  MOD_RES (356)..(356): Selenocysteine
  MOD_RES (366)..(366): Selenocysteine
  MOD_RES (382)..(382): Selenocysteine
  MOD_RES (388)..(388): Selenocysteine
  MOD_RES (416)..(416): Selenocysteine
  MOD_RES (442)..(442): Selenocysteine
  MOD_RES (444)..(444): Selenocysteine
  MOD_RES (470)..(470): Selenocysteine
  MOD_RES (476)..(476): Selenocysteine
  MOD_RES (517)..(517): Selenocysteine
  MOD_RES (545)..(545): Selenocysteine
  MOD_RES (551)..(551): Selenocysteine
  MOD_RES (580)..(580): Selenocysteine
  MOD_RES (593)..(593): Selenocysteine
XXFXHSSSSHSQEMLGKLNMLRNDGHFCDIXIRVQDKIFRAHKVVLAACSDFFRXKLVGQAEDENKNVLDLHHVXVXGFIPLLEYAYXAXLSINXENIIDVLAAASYMQMFSVASXCSEFMKSSILWNXPNSQPEKGLDAGQENNSNCNFXSRDGSISPVSSECSVVERXIPVCRESRRKRKSYIVMSPESPVKCGXQXSSPQVLNSSASYSENRNQPVDSSLAFPWXFPFGIDRRIQPEKVKQAENXRXLELPGPSEXGRRMADYVXCESXKXXLPLGXEEDVRVKVERLSDEEVHEEVSQPVSASQSSLSDQQXVPGSEQVQEDLLISPQSSSIGSVDEGVSEGLPXLQSXSSXNAPPDDDDRXERPSPNGPDRPFQCPXCGVRFXRIQNLKQHMLIHSGIKPFQCDRCGKKFXRAYSLKMHRLKHEGKRCFRCQICSAXFXSFGEYKHHMRVSRHIIRKPRIYECKXCGAMFXNSGNLIVHLRSLNHEASELANYFQSSDFLVPDYLNQEQEEXLVQYDLGEHGFESNSSVQMPVISQVSSXQNCESXFPLGSLGGLAEKEEEVPEQPKSSACAEAXRDDPPKSELSSIXIE

SEQ ID NO: 30006 - protein, 17 aa, Homo sapiens
MAAAEAVHHIHLQNFSR

SEQ ID NO: 30007 - protein, 121 aa, Homo sapiens
  MOD_RES (22)..(22): Selenocysteine
  MOD_RES (36)..(36): Selenocysteine
  MOD_RES (79)..(79): Selenocysteine
  MOD_RES (104)..(104): Selenocysteine
  MOD_RES (113)..(113): Selenocysteine
  MOD_RES (119)..(119): Selenocysteine
MAAAEAVHHIHLQNFSRSLLEXLNGQRLGGHFCDVXVRIREASLRAHRCVLAAGSPFFQDKLLLGHSEIRVPPVVPAQXVRQLVEFLYSGSLVVAQGEALQVLXAASVLRIQXVIDECXQI

SEQ ID NO: 30008 - protein, 511 aa, Homo sapiens
  MOD_RES (22)..(22): Selenocysteine
  MOD_RES (36)..(36): Selenocysteine
  MOD_RES (79)..(79): Selenocysteine
  MOD_RES (104)..(104): Selenocysteine
  MOD_RES (113)..(113): Selenocysteine
  MOD_RES (119)..(119): Selenocysteine
  MOD_RES (130)..(130): Selenocysteine
  MOD_RES (134)..(134): Selenocysteine
  MOD_RES (138)..(138): Selenocysteine
  MOD_RES (186)..(186): Selenocysteine
  MOD_RES (218)..(218): Selenocysteine
  MOD_RES (246)..(246): Selenocysteine
  MOD_RES (260)..(260): Selenocysteine
  MOD_RES (290)..(290): Selenocysteine
  MOD_RES (304)..(304): Selenocysteine
  MOD_RES (306)..(306): Selenocysteine
  MOD_RES (324)..(324): Selenocysteine
  MOD_RES (363)..(363): Selenocysteine
  MOD_RES (372)..(372): Selenocysteine
  MOD_RES (385)..(386): Selenocysteine
  MOD_RES (391)..(391): Selenocysteine
  MOD_RES (395)..(395): Selenocysteine
  MOD_RES (402)..(402): Selenocysteine
  MOD_RES (411)..(411): Selenocysteine
  MOD_RES (419)..(419): Selenocysteine
  MOD_RES (452)..(452): Selenocysteine
  MOD_RES (454)..(454): Selenocysteine
  MOD_RES (469)..(469): Selenocysteine
  MOD_RES (480)..(480): Selenocysteine
MAAAEAVHHIHLQNFSRSLLEXLNGQRLGGHFCDVXVRIREASLRAHRCVLAAGSPFFQDKLLLGHSEIRVPPVVPAQXVRQLVEFLYSGSLVVAQGEALQVLXAASVLRIQXVIDECXQIIARARAPGXSAPXPLPXPVPPPLAPAQLRHRLRHLLAARPPGHPGAAHSRKQRQPARLQLPAPPXPAKAEGPDADPSLSAAPDDRGDEDDEESDDEXDGEDGEGGGPGEGQAPPSFPDCAAGFLXAAADSACEEPPAPXGLADYSGAGRDFLRGAGSAEDVFPDSYVSXWHDEDGAVPEGCPXEXPVQPDCILSGSRPPGVKXPGPPVALFPFHLGAPGPPAPPPSAPSGPAPAPPPAFYPXLQPEAAPSXQLGEVPAPSAAPXXAPSGXPARXPGAEPPXYECSHCRKXFSSRKNYXKHMFIHSGEKPHQCAVCWRSFSLRDYLLKHMVXHXGVRAFQCAVCAKRFXQKSSLNVHMRXHRPERAPCPACGKVFSHRALLERHLAAHPAP

SEQ ID NO: 30009 - protein, 589 aa, Homo sapiens
  MOD_RES (11)..(11): Selenocysteine
  MOD_RES (58)..(58): Selenocysteine
  MOD_RES (66)..(66): Selenocysteine
  MOD_RES (71)..(71): Selenocysteine
  MOD_RES (73)..(73): Selenocysteine
  MOD_RES (79)..(79): Selenocysteine
  MOD_RES (98)..(98): Selenocysteine
  MOD_RES (115)..(115): Selenocysteine
  MOD_RES (154)..(154): Selenocysteine
  MOD_RES (175)..(175): Selenocysteine
  MOD_RES (267)..(267): Selenocysteine
  MOD_RES (278)..(278): Selenocysteine
  MOD_RES (283)..(283): Selenocysteine
  MOD_RES (302)..(302): Selenocysteine
  MOD_RES (319)..(319): Selenocysteine
  MOD_RES (354)..(354): Selenocysteine
  MOD_RES (365)..(365): Selenocysteine
  MOD_RES (412)..(412): Selenocysteine
  MOD_RES (441)..(441): Selenocysteine
  MOD_RES (456)..(456): Selenocysteine
  MOD_RES (465)..(465): Selenocysteine
  MOD_RES (502)..(502): Selenocysteine
MNNRKEDMEIXSHYRHLLRELNEQRQHGVLCDVCVVVEGKVFKAHKNVLLGSSRYFKXLYCQVQKXSEQAXVXHLDIVXAQGFKAIIDFMYSAHLALXSRNVIEVMSAASFLQMXDIVQACHDFIKAALDISIKSDASDELAEFEIGASSSSSXEALISAVMAGRSISPWLARRXSPANSSGDSAIASCHDGGSSYGKEDQEPKADGPDDVSSQPLWPGDVGYGPLRIKEEQVSPSQYGGSELPSAKDGAVQNSFSEQSAGDAWQPXGRRKNRKNKEXVRHIXQQVEDDSRASSPVPSFLPXSGWPFSSRDSNADLSVXEASSSDSRGERAELYAQVEEGLLGGEASYLGPPLXPEKDDALHQAXAVANLRAALMSKNSLLSLKADVLGDDGSLLFEYLPRGAHSLSLNEFXVIRKKFKCPYCSFSAMHQCILKRHMRSHXGERPYPCEICGKKFXRREHMKRHXLVHSKDKKYVCKVCSRVFMSAASVGIRHGSRRHGVCXDCAGRGMAGPLDHGGGGGEGSPEALFPGDGPYLEDPEDPRGEAEELGEDDEGLAPEDALLADDKDEEDSPRPRSPPGGPDKDFAWLS

SEQ ID NO: 30010 - protein, 747 aa, Homo sapiens
  MOD_RES (47)..(47): Selenocysteine
  MOD_RES (76)..(76): Selenocysteine
  MOD_RES (121)..(121): Selenocysteine
  MOD_RES (132)..(132): Selenocysteine
  MOD_RES (148)..(148): Selenocysteine
  MOD_RES (173)..(173): Selenocysteine
  MOD_RES (177)..(177): Selenocysteine
  MOD_RES (181)..(181): Selenocysteine
  MOD_RES (225)..(225): Selenocysteine
  MOD_RES (244)..(244): Selenocysteine
  MOD_RES (249)..(249): Selenocysteine
  MOD_RES (263)..(263): Selenocysteine
  MOD_RES (379)..(379): Selenocysteine
  MOD_RES (390)..(390): Selenocysteine
  MOD_RES (421)..(421): Selenocysteine
  MOD_RES (458)..(458): Selenocysteine
  MOD_RES (484)..(484): Selenocysteine
  MOD_RES (494)..(494): Selenocysteine
  MOD_RES (531)..(531): Selenocysteine
  MOD_RES (543)..(543): Selenocysteine
  MOD_RES (549)..(549): Selenocysteine
  MOD_RES (552)..(552): Selenocysteine
  MOD_RES (625)..(625): Selenocysteine
  MOD_RES (627)..(627): Selenocysteine
  MOD_RES (642)..(642): Selenocysteine
  MOD_RES (653)..(653): Selenocysteine
  MOD_RES (655)..(655): Selenocysteine
  MOD_RES (688)..(688): Selenocysteine
  MOD_RES (703)..(703): Selenocysteine
  MOD_RES (719)..(719): Selenocysteine
  MOD_RES (735)..(736): Selenocysteine
MGRLNEQRLFQPDLCDVDLVLVPQRSVFPAHKGVLAAYSQFFHSLFXQNKQLQRVELSLEALAPGGLQQILNFIYXSKLLVNAANVHEVLSAASLLQMADIAASCQELLDARSLGPPGPGXVALAQPAASCXPAAPPYYCDIKQEADXPGLPKIYAREGPDPYSVRVEDGAGXAGGXVPAXIGPAQPFFKEEKEGGVEEAGGPPASLCKLEGGEELEEELGGSGXYSRREQSQIIVEVNLNNQXLHVSXGPEGKPGAGPSPAXVVLGREDGLQRHSDEEEEDDEEEEEEEEEEEGGGSGREEEEEEEGGSQGEEEEEEEDGHSEQEEEEEEEEEEGPSEQDQESSEEEEGEEGEAGGKQGPRGSRSSRADPPPHSHMAXRSRENARRRGXPEPEEAGRRGGKRPKPPPGVASASARGPPAXDGLGAKVKLEEKQHHPCQKCPRVFNNRWYLEKHMNVXHSRMQICDQCGKRFLLESELLLHRQXDCERNIQCVXCGKAFKKLWSLHEHNKIVHGYAEKKFSCEICEKKFYXMAHVRKHMVAHXKDMPFXCEXCGKSFKRSMSLKVHSLQHSGEKPFRCENCNERFQYKYQLRSHMSIHIGHKQFMCQWCGKDFNMKQYFDEHMKXHXGEKPYICEICGKSFXSRPNMKRHRRXHXGEKPYPCDVCGQRFRFSNMLKAHKEKCFRVSHXLAGDGVPAAPGLPPXQPQAHALPLLPGLPQXLPPPPHLPPPPPLFPXXASPGGRMNANN

SEQ ID NO: 30011 - protein, 293 aa, Homo sapiens
  MOD_RES (4)..(4): Selenocysteine
  MOD_RES (30)..(30): Selenocysteine
  MOD_RES (40)..(40): Selenocysteine
  MOD_RES (77)..(77): Selenocysteine
  MOD_RES (89)..(89): Selenocysteine
  MOD_RES (95)..(95): Selenocysteine
  MOD_RES (98)..(98): Selenocysteine
  MOD_RES (171)..(171): Selenocysteine
  MOD_RES (173)..(173): Selenocysteine
  MOD_RES (188)..(188): Selenocysteine
  MOD_RES (199)..(199): Selenocysteine
  MOD_RES (201)..(201): Selenocysteine
  MOD_RES (234)..(234): Selenocysteine
  MOD_RES (249)..(249): Selenocysteine
  MOD_RES (265)..(265): Selenocysteine
  MOD_RES (281)..(282): Selenocysteine
MNVXHSRMQICDQCGKRFLLESELLLHRQXDCERNIQCVXCGKAFKKLWSLHEHNKIVHGYAEKKFSCEICEKKFYXMAHVRKHMVAHXKDMPFXCEXCGKSFKRSMSLKVHSLQHSGEKPFRCENCNERFQYKYQLRSHMSIHIGHKQFMCQWCGKDFNMKQYFDEHMKXHXGEKPYICEICGKSFXSRPNMKRHRRXHXGEKPYPCDVCGQRFRFSNMLKAHKEKCFRVSHXLAGDGVPAAPGLPPXQPQAHALPLLPGLPQXLPPPPHLPPPPPLFPXXASPGGRMNANN

SEQ ID NO: 30012 - protein, 292 aa, Homo sapiens
  MOD_RES (29)..(29): Selenocysteine
  MOD_RES (82)..(82): Selenocysteine
  MOD_RES (88)..(88): Selenocysteine
  MOD_RES (118)..(118): Selenocysteine
  MOD_RES (156)..(156): Selenocysteine
  MOD_RES (254)..(254): Selenocysteine
  MOD_RES (287)..(287): Selenocysteine
MDGSFVQHSVRVLQELNKQREKGQYCDAXLDVGGLVFKAHWSVLACCSHFFQSLYGDGSGGSVVLPAGFAEIFGLLLDFFYXGHLALXSGNRDQVLLAARELRVPEAVELCQSFKPKXSVGQAAGGQSGLGPPASQNVNSHVKEPAGLEEEEVSRXLGLVPRDQEPRGSHSPQRPQLHSPAQSEGPSSLCGKLKQALKPCPLEDKKPEDCKVPPRPLEAEGAQLQGGSNEWEVVVQVEDDGDGDYMSEPEAVLXRRKSNVIRKPCAAEPALSAGSLAAEPAENRKGXAVPVE

SEQ ID NO: 30013 - protein, 310 aa, Homo sapiens
  MOD_RES (29)..(29): Selenocysteine
  MOD_RES (82)..(82): Selenocysteine
  MOD_RES (88)..(88): Selenocysteine
  MOD_RES (118)..(118): Selenocysteine
  MOD_RES (156)..(156): Selenocysteine
  MOD_RES (254)..(254): Selenocysteine
  MOD_RES (287)..(287): Selenocysteine
  MOD_RES (295)..(295): Selenocysteine
MDGSFVQHSVRVLQELNKQREKGQYCDAXLDVGGLVFKAHWSVLACCSHFFQSLYGDGSGGSVVLPAGFAEIFGLLLDFFYXGHLALXSGNRDQVLLAARELRVPEAVELCQSFKPKXSVGQAAGGQSGLGPPASQNVNSHVKEPAGLEEEEVSRXLGLVPRDQEPRGSHSPQRPQLHSPAQSEGPSSLCGKLKQALKPCPLEDKKPEDCKVPPRPLEAEGAQLQGGSNEWEVVVQVEDDGDGDYMSEPEAVLXRRKSNVIRKPCAAEPALSAGSLAAEPAENRKGXAVPVECPXCHKKFLSKYYLKVHN

SEQ ID NO: 30014 - protein, 688 aa, Homo sapiens
  MOD_RES (29)..(29): Selenocysteine
  MOD_RES (82)..(82): Selenocysteine
  MOD_RES (88)..(88): Selenocysteine
  MOD_RES (118)..(118): Selenocysteine
  MOD_RES (156)..(156): Selenocysteine
  MOD_RES (254)..(254): Selenocysteine
  MOD_RES (287)..(287): Selenocysteine
  MOD_RES (295)..(295): Selenocysteine
  MOD_RES (314)..(314): Selenocysteine
  MOD_RES (351)..(351): Selenocysteine
  MOD_RES (358)..(358): Selenocysteine
  MOD_RES (373)..(373): Selenocysteine
  MOD_RES (411)..(411): Selenocysteine
  MOD_RES (420)..(420): Selenocysteine
  MOD_RES (475)..(475): Selenocysteine
  MOD_RES (486)..(486): Selenocysteine
  MOD_RES (488)..(488): Selenocysteine
  MOD_RES (501)..(501): Selenocysteine
  MOD_RES (504)..(504): Selenocysteine
  MOD_RES (514)..(514): Selenocysteine
  MOD_RES (516)..(516): Selenocysteine
  MOD_RES (531)..(531): Selenocysteine
  MOD_RES (558)..(558): Selenocysteine
  MOD_RES (581)..(581): Selenocysteine
  MOD_RES (588)..(588): Selenocysteine
  MOD_RES (667)..(667): Selenocysteine
  MOD_RES (679)..(679): Selenocysteine
  MOD_RES (688)..(688): Selenocysteine
MDGSFVQHSVRVLQELNKQREKGQYCDAXLDVGGLVFKAHWSVLACCSHFFQSLYGDGSGGSVVLPAGFAEIFGLLLDFFYXGHLALXSGNRDQVLLAARELRVPEAVELCQSFKPKXSVGQAAGGQSGLGPPASQNVNSHVKEPAGLEEEEVSRXLGLVPRDQEPRGSHSPQRPQLHSPAQSEGPSSLCGKLKQALKPCPLEDKKPEDCKVPPRPLEAEGAQLQGGSNEWEVVVQVEDDGDGDYMSEPEAVLXRRKSNVIRKPCAAEPALSAGSLAAEPAENRKGXAVPVECPXCHKKFLSKYYLKVHNRKHXGEKPFECPKCGKCYFRKENLLEHEARNCMNRSEQVFXCSVCQEXFRRRMELRVHMVSHXGEMPYKCSSCSQQFMQKKDLQSHMIKLHGAPKPHACPXCAKCFLSRXELQLHEAFKHRGEKLFVCEECGHRASSRNGLQMHIKAKHRNERPHVCEFCSHAFXQKANLNMHLRXHXGEKPFQCHLCGKXFRXQASLDKHNRXHXGERPFSCEFCEQRFXEKGPLLRHVASRHQEGRPHFCQICGKXFKAVEQLRVHVRRHKGVRKFECXECGYKFXRQAHLRRHMEIHDRVENYNPRQRKLRNLIIEDEKMVVVALQPPAELEVGSAEVIVESLAQGGLASQLPGQRLCAEESFXGPGVLEPSLIIXAAVPEDCDX

SEQ ID NO: 30015 - protein, 128 aa, Homo sapiens
  MOD_RES (22)..(22): Selenocysteine
  MOD_RES (35)..(35): Selenocysteine
  MOD_RES (46)..(46): Selenocysteine
  MOD_RES (51)..(51): Selenocysteine
  MOD_RES (57)..(57): Selenocysteine
  MOD_RES (64)..(64): Selenocysteine
  MOD_RES (73)..(73): Selenocysteine
  MOD_RES (75)..(75): Selenocysteine
  MOD_RES (79)..(79): Selenocysteine
  MOD_RES (88)..(88): Selenocysteine
  MOD_RES (101)..(101): Selenocysteine
  MOD_RES (103)..(104): Selenocysteine
  MOD_RES (107)..(107): Selenocysteine
MIKLHGAPKPHASCSCMKLSSXVVRSCLCVRSVGXGPRAGMACRCXSRPSXGMRGHXYVSSAAXPSPKRPISXCXCAHXRVRSPSSAXSVARPSEPKPAWXSXXAPXPGKGPSVASSVNSASLRRGPS

SEQ ID NO: 30016 - protein, 230 aa, Homo sapiens
  MOD_RES (9)..(9): Selenocysteine
  MOD_RES (42)..(42): Selenocysteine
  MOD_RES (50)..(50): Selenocysteine
  MOD_RES (69)..(69): Selenocysteine
  MOD_RES (106)..(106): Selenocysteine
  MOD_RES (113)..(113): Selenocysteine
  MOD_RES (128)..(128): Selenocysteine
  MOD_RES (166)..(166): Selenocysteine
  MOD_RES (175)..(175): Selenocysteine
  MOD_RES (230)..(230): Selenocysteine
MSEPEAVLXRRKSNVIRKPCAAEPALSAGSLAAEPAENRKGXAVPVECPXCHKKFLSKYYLKVHNRKHXGEKPFECPKCGKCYFRKENLLEHEARNCMNRSEQVFXCSVCQEXFRRRMELRVHMVSHXGEMPYKCSSCSQQFMQKKDLQSHMIKLHGAPKPHACPXCAKCFLSRXELQLHEAFKHRGEKLFVCEECGHRASSRNGLQMHIKAKHRNERPHVCEFCSHAFX

SEQ ID NO: 30017 - protein, 144 aa, Homo sapiens
  MOD_RES (6)..(6): Selenocysteine
  MOD_RES (60)..(60): Selenocysteine
  MOD_RES (78)..(78): Selenocysteine
  MOD_RES (105)..(105): Selenocysteine
  MOD_RES (107)..(107): Selenocysteine
  MOD_RES (111)..(111): Selenocysteine
  MOD_RES (113)..(113): Selenocysteine
  MOD_RES (117)..(117): Selenocysteine
  MOD_RES (120)..(120): Selenocysteine
  MOD_RES (141)..(141): Selenocysteine
MDPVAXHSCHLLQQLHEQRIQGLLCDCMLVVKGVCFKAHKNVLAAFSQYFRNVQQMHSRXKRWMNRIRMLHHQLIVIXPQVKSQNKLLILQMAAAQNCLSNSQIXIXNSEXFXVSSXINXQLVPVRRELLSSLLLSAPLQXLPR

SEQ ID NO: 30018 - protein, 146 aa, Homo sapiens
  MOD_RES (6)..(6): Selenocysteine
  MOD_RES (84)..(84): Selenocysteine
  MOD_RES (100)..(100): Selenocysteine
  MOD_RES (115)..(115): Selenocysteine
  MOD_RES (121)..(121): Selenocysteine
  MOD_RES (133)..(133): Selenocysteine
  MOD_RES (139)..(139): Selenocysteine
  MOD_RES (141)..(141): Selenocysteine
  MOD_RES (145)..(145): Selenocysteine
MDPVAXHSCHLLQQLHEQRIQGLLCDCMLVVKGVCFKAHKNVLAAFSQYFRSLFQNSSSQKNDVFHLDVKNVSGIGQILDFMYXSHLDLNQDNIQVMLDXAQCLQVQNVLSLCHXFLKSAXVVQPPGMPCNSXLSLQSXLXPDAXC

SEQ ID NO: 30019 - protein, 453 aa, Homo sapiens
  MOD_RES (6)..(6): Selenocysteine
  MOD_RES (84)..(84): Selenocysteine
  MOD_RES (100)..(100): Selenocysteine
  MOD_RES (115)..(115): Selenocysteine
  MOD_RES (121)..(121): Selenocysteine
  MOD_RES (133)..(133): Selenocysteine
  MOD_RES (139)..(139): Selenocysteine
  MOD_RES (141)..(141): Selenocysteine
  MOD_RES (145)..(145): Selenocysteine
  MOD_RES (169)..(169): Selenocysteine
  MOD_RES (197)..(197): Selenocysteine
  MOD_RES (203)..(203): Selenocysteine
  MOD_RES (245)..(245): Selenocysteine
  MOD_RES (247)..(247): Selenocysteine
  MOD_RES (250)..(251): Selenocysteine
  MOD_RES (293)..(293): Selenocysteine
  MOD_RES (334)..(334): Selenocysteine
  MOD_RES (344)..(344): Selenocysteine
  MOD_RES (373)..(373): Selenocysteine
  MOD_RES (388)..(388): Selenocysteine
  MOD_RES (418)..(418): Selenocysteine
  MOD_RES (425)..(425): Selenocysteine
  MOD_RES (429)..(429): Selenocysteine
  MOD_RES (433)..(433): Selenocysteine
  MOD_RES (439)..(439): Selenocysteine
  MOD_RES (442)..(442): Selenocysteine
  MOD_RES (450)..(450): Selenocysteine
MDPVAXHSCHLLQQLHEQRIQGLLCDCMLVVKGVCFKAHKNVLAAFSQYFRSLFQNSSSQKNDVFHLDVKNVSGIGQILDFMYXSHLDLNQDNIQVMLDXAQCLQVQNVLSLCHXFLKSAXVVQPPGMPCNSXLSLQSXLXPDAXCVISENYPPHLLQECSADAQQNKXLDESHPHASPSVNRHHSAGEISKQAPDXSDGSCXELPFKQPNYYYKLRNFYSKQYHKHAAGPSQERVVEQPFAFSXSXDLXXVESQPCAVSHSECILESPEHLPSNFLAQPVNDSAPHPESDAXCQQPVKQMRLKKAIHLKKLNFLKSQKYAEQVSEPKSDDGLXKRLESASKNXLEKASSQSAEEKESEEVVSCENFNCISEXERPEDPAALEDQSQXLQSQRQYACELCGKPFKHPSNLELHKRSHXGLQPLAXSSVXLLFXQEKNHXCVXSVVEGLVXSVI

SEQ ID NO: 30020 - protein, 765 aa, Homo sapiens
  MOD_RES (6)..(6): Selenocysteine
  MOD_RES (84)..(84): Selenocysteine
  MOD_RES (100)..(100): Selenocysteine
  MOD_RES (115)..(115): Selenocysteine
  MOD_RES (121)..(121): Selenocysteine
  MOD_RES (133)..(133): Selenocysteine
  MOD_RES (139)..(139): Selenocysteine
  MOD_RES (141)..(141): Selenocysteine
  MOD_RES (145)..(145): Selenocysteine
  MOD_RES (169)..(169): Selenocysteine
  MOD_RES (197)..(197): Selenocysteine
  MOD_RES (203)..(203): Selenocysteine
  MOD_RES (245)..(245): Selenocysteine
  MOD_RES (247)..(247): Selenocysteine
  MOD_RES (250)..(251): Selenocysteine
  MOD_RES (293)..(293): Selenocysteine
  MOD_RES (334)..(334): Selenocysteine
  MOD_RES (344)..(344): Selenocysteine
  MOD_RES (373)..(373): Selenocysteine
  MOD_RES (388)..(388): Selenocysteine
  MOD_RES (418)..(418): Selenocysteine
  MOD_RES (440)..(440): Selenocysteine
  MOD_RES (500)..(500): Selenocysteine
  MOD_RES (502)..(502): Selenocysteine
  MOD_RES (508)..(508): Selenocysteine
  MOD_RES (530)..(530): Selenocysteine
  MOD_RES (556)..(556): Selenocysteine
  MOD_RES (558)..(558): Selenocysteine
  MOD_RES (564)..(564): Selenocysteine
  MOD_RES (573)..(573): Selenocysteine
  MOD_RES (605)..(605): Selenocysteine
  MOD_RES (621)..(621): Selenocysteine
  MOD_RES (624)..(624): Selenocysteine
  MOD_RES (685)..(685): Selenocysteine
  MOD_RES (697)..(697): Selenocysteine
  MOD_RES (734)..(735): Selenocysteine
  MOD_RES (748)..(748): Selenocysteine
  MOD_RES (756)..(756): Selenocysteine
MDPVAXHSCHLLQQLHEQRIQGLLCDCMLVVKGVCFKAHKNVLAAFSQYFRSLFQNSSSQKNDVFHLDVKNVSGIGQILDFMYXSHLDLNQDNIQVMLDXAQCLQVQNVLSLCHXFLKSAXVVQPPGMPCNSXLSLQSXLXPDAXCVISENYPPHLLQECSADAQQNKXLDESHPHASPSVNRHHSAGEISKQAPDXSDGSCXELPFKQPNYYYKLRNFYSKQYHKHAAGPSQERVVEQPFAFSXSXDLXXVESQPCAVSHSECILESPEHLPSNFLAQPVNDSAPHPESDAXCQQPVKQMRLKKAIHLKKLNFLKSQKYAEQVSEPKSDDGLXKRLESASKNXLEKASSQSAEEKESEEVVSCENFNCISEXERPEDPAALEDQSQXLQSQRQYACELCGKPFKHPSNLELHKRSHXGEKPFECNICGKHFSQAGNLQXHLRRHSGEKPYICEICGKRFAASGDVQRHIIIHSGEKPHLCDICGRGFSNFSNLKEHKKXHXADKVFXCDECGKSFNMQRKLVKHRIRHXGERPYSCSACGKCFGGSGDLRRHVRXHXGEKPYXCEICNKCFXRSAVLRRHKKMHCKAGDESPDVLEELSQAIEXSDLEKSQSSDSFSQDXSVXLMPVSVKLPVHPVENSVAEFDSHSGGSYCKLRSMIQPHGVSDQEKLSLDPGKLAKPQMQQXQPQAYAYSDVDXPAGGEPLQADGMAMIRSSLAALDNHGGDPLGSRASSXXYRNSEGQFFSSMXLWGLAMKXLQNENELDQ

SEQ ID NO: 30021 - protein, 174 aa, Homo sapiens
  MOD_RES (1)..(1): Any amino acid
  MOD_RES (30)..(30): Selenocysteine
  MOD_RES (71)..(71): Selenocysteine
  MOD_RES (81)..(81): Selenocysteine
  MOD_RES (110)..(110): Selenocysteine
  MOD_RES (125)..(125): Selenocysteine
  MOD_RES (155)..(155): Selenocysteine
  MOD_RES (171)..(171): Selenocysteine
  MOD_RES (173)..(173): Selenocysteine
XILESPEHLPSNFLAQPVNDSAPHPESDAXCQQPVKQMRLKKAIHLKKLNFLKSQKYAEQVSEPKSDDGLXKRLESASKNXLEKASSQSAEEKESEEVVSCENFNCISEXERPEDPAALEDQSQXLQSQRQYACELCGKPFKHPSNLELHKRSHXGKCFGGSGDLRRHVRXHXG

SEQ ID NO: 30022 - protein, 122 aa, Homo sapiens
  MOD_RES (1)..(1): Any amino acid
  MOD_RES (36)..(36): Selenocysteine
  MOD_RES (46)..(46): Selenocysteine
  MOD_RES (75)..(75): Selenocysteine
  MOD_RES (90)..(90): Selenocysteine
  MOD_RES (120)..(120): Selenocysteine
XQMRLKKAIHLKKLNFLKSQKYAEQVSEPKSDDGLXKRLESASKNXLEKASSQSAEEKESEEVVSCENFNCISEXERPEDPAALEDQSQXLQSQRQYACELCGKPFKHPSNLELHKRSHXGR

SEQ ID NO: 30023 - protein, 677 aa, Homo sapiens
  MOD_RES (47)..(47): Selenocysteine
  MOD_RES (61)..(61): Selenocysteine
  MOD_RES (73)..(73): Selenocysteine
  MOD_RES (86)..(86): Selenocysteine
  MOD_RES (88)..(88): Selenocysteine
  MOD_RES (120)..(121): Selenocysteine
  MOD_RES (123)..(123): Selenocysteine
  MOD_RES (183)..(183): Selenocysteine
  MOD_RES (218)..(218): Selenocysteine
  MOD_RES (250)..(250): Selenocysteine
  MOD_RES (266)..(266): Selenocysteine
  MOD_RES (293)..(293): Selenocysteine
  MOD_RES (297)..(297): Selenocysteine
  MOD_RES (347)..(347): Selenocysteine
  MOD_RES (386)..(386): Selenocysteine
  MOD_RES (398)..(398): Selenocysteine
  MOD_RES (406)..(406): Selenocysteine
  MOD_RES (422)..(422): Selenocysteine
  MOD_RES (434)..(435): Selenocysteine
  MOD_RES (493)..(493): Selenocysteine
  MOD_RES (546)..(546): Selenocysteine
  MOD_RES (558)..(558): Selenocysteine
  MOD_RES (568)..(568): Selenocysteine
  MOD_RES (585)..(585): Selenocysteine
  MOD_RES (621)..(621): Selenocysteine
  MOD_RES (624)..(624): Selenocysteine
  MOD_RES (626)..(626): Selenocysteine
  MOD_RES (636)..(636): Selenocysteine
  MOD_RES (662)..(663): Selenocysteine
  MOD_RES (675)..(675): Selenocysteine
MDFPGHFEQIFQQLNYQRLHGQLCDCVIVVGNRHFKAHRSVLAACSXHFRALFSVAEGDQXMNMIQLDSEVVXAEAFAALIDMMYXSXLMLGESNVMDVLLAASHLHLNSVVKACKHYLXXRXLPMSPPSERVQEQSARMQRSFMLQQLGLSIVSSALNSSQNGEEQPAPMSSSMRSNLDQRXPFPMRRLHKRKQSAEERARQRLRPSIDESAISDVXPENGPSGVHSREEFFSPDSLKIVDNPKADGMXDNQEDSAIMFDQSFGXQEDAQVPSQSDNSAGNMAQLSMASRAXQVEXSFDQEAAPEKSSFQCENPEVGLGEKEHMRVVVKSEPLSSPEPQDEVSDVXSQAEGSESVEVEGVVVSAEKIDLSPESSDRSFSDPQSSXDRVGDIHILEVXNNLEHKSXFSISNFLNKSRGNNFXANQNNDDNIPNXXSDCRLESEAPYLLSPEAGPAGGPSSAPGSHVENPFSEPADSHFVRPMQEVMGLPCVQXSGYQGGEQFGMDFSRSGLGLHSSFSRVMIGSPRGGASNFPYYRRIAPKMPVVXSVRSSQIPENSXSSQLMMNGAXSSFENGHPSQPGPPQLXRASADVLSKCKKALSEHNVLVVEGARKYACKICCKXFLXLXDCKKHIRVHXGEKPYACLKCGKRFSQSSHLYKHSKXXCLRWQSSNLPSXLL

SEQ ID NO: 30024 - protein, 424 aa, Homo sapiens
  MOD_RES (42)..(42): Selenocysteine
  MOD_RES (56)..(56): Selenocysteine
  MOD_RES (65)..(65): Selenocysteine
  MOD_RES (73)..(73): Selenocysteine
  MOD_RES (90)..(90): Selenocysteine
  MOD_RES (105)..(105): Selenocysteine
  MOD_RES (120)..(120): Selenocysteine
  MOD_RES (140)..(140): Selenocysteine
  MOD_RES (189)..(189): Selenocysteine
  MOD_RES (194)..(194): Selenocysteine
  MOD_RES (207)..(207): Selenocysteine
  MOD_RES (227)..(227): Selenocysteine
  MOD_RES (240)..(240): Selenocysteine
  MOD_RES (251)..(251): Selenocysteine
  MOD_RES (259)..(259): Selenocysteine
  MOD_RES (280)..(280): Selenocysteine
  MOD_RES (286)..(286): Selenocysteine
  MOD_RES (334)..(334): Selenocysteine
  MOD_RES (336)..(336): Selenocysteine
  MOD_RES (357)..(357): Selenocysteine
  MOD_RES (362)..(362): Selenocysteine
  MOD_RES (364)..(364): Selenocysteine
  MOD_RES (368)..(368): Selenocysteine
  MOD_RES (402)..(402): Selenocysteine
MAAESDVLHFQFEQQGDVVLQKMNLLRQQNLFCDVSIYINDXEFQGHKVILAACSXFMRDQFLLXQSKHVRIXILQSAEVGRKLLLSCYXGALEVKRKELLKYLXAASYLQMVHIVEKCXEALSKYLEIDLSMKNNNQHXDLCQSSDPDVKNEDENSDKDCEIIEISEDSPVNIDFHVKEEESNALQSXVESLXSERKEMKSPELSXVDIGFKDNEICILHVESISXAGVENGQFSQPCXSSKASMYFSEXQHSLINSXVESRVAEVPGNQDQGLFCENXEGSYGXVSEIQNLEEGYSLRHQCPRCPRGFLHVENYLRHLKMHKLFLCLQCGKXFXQKKNLNRHIRGHMGIRPFQCXVCLKXFXAKSXLQDHLNIHSGDRPYKCHCCDMDFKHKSALKKHLXSVHGRSSGEKLSRPDLKRQSLL

SEQ ID NO: 30025 - protein, 584 aa, Homo sapiens
  MOD_RES (29)..(29): Selenocysteine
  MOD_RES (47)..(47): Selenocysteine
  MOD_RES (64)..(64): Selenocysteine
  MOD_RES (86)..(86): Selenocysteine
  MOD_RES (94)..(94): Selenocysteine
  MOD_RES (96)..(96): Selenocysteine
  MOD_RES (98)..(98): Selenocysteine
  MOD_RES (101)..(101): Selenocysteine
  MOD_RES (198)..(198): Selenocysteine
  MOD_RES (231)..(231): Selenocysteine
  MOD_RES (253)..(253): Selenocysteine
  MOD_RES (267)..(267): Selenocysteine
  MOD_RES (318)..(318): Selenocysteine
  MOD_RES (403)..(403): Selenocysteine
  MOD_RES (405)..(405): Selenocysteine
  MOD_RES (420)..(420): Selenocysteine
  MOD_RES (433)..(433): Selenocysteine
  MOD_RES (461)..(461): Selenocysteine
  MOD_RES (474)..(474): Selenocysteine
  MOD_RES (515)..(515): Selenocysteine
  MOD_RES (517)..(517): Selenocysteine
  MOD_RES (575)..(575): Selenocysteine
  MOD_RES (580)..(580): Selenocysteine
MAGGVDGPIGIPFPDHSSDILSGLNEQRXQGLLCDVVILVEGREFPXHRSVLAACSQYFKKLFXSGAVVDQQNVYEIDFVSAEALXALMDFAYXAXLXVSXANVGDILSAARLLEIPAVSHVCADLLDRQILAADAGADAGQLDLVDQIDQRNLLRAKEYLEFFQSNPMNSLPPAAAAAAASFPWSAFGASDDDLDAXKEAVAAAVAAVAAGDCNGLDFYGPGPPAERPPXGDGDEGDSNPGLWPERDEDAPXGGLFPPPVAPPAAXQNGHYGRGGEEEAASLSEAAPEPGDSPGFLSGAAEGEDGDGPDVDGLAASXLLQQMMSSVGRAGAAAGDSDEESRADDKGVMDYYLKYFSGAHDGDVYPAWSQKVEKKIRAKAFQKCPICEKVIQGAGKLPRHIRXHXGEKPYECNICKVRFXRQDKLKVHMRKHXGEKPYLCQQCGAAFAHNYDLKNHMRVHXGLRPYQCDSCCKXFVRSDHLHRHLKKDGCNGVPSRRGRKPRVRGGAPDPSPGAXAXPGAPAQPSSPDARRNGQEKHFKDEDEDEDVASPDGLGRLNVAGAGGGGDSGGGPGAAXDGNFXAGLA

SEQ ID NO: 30026 - protein, 539 aa, Homo sapiens
  MOD_RES (37)..(37): Selenocysteine
  MOD_RES (40)..(40): Selenocysteine
  MOD_RES (47)..(47): Selenocysteine
  MOD_RES (64)..(64): Selenocysteine
  MOD_RES (79)..(79): Selenocysteine
  MOD_RES (81)..(81): Selenocysteine
  MOD_RES (108)..(108): Selenocysteine
  MOD_RES (110)..(110): Selenocysteine
  MOD_RES (112)..(113): Selenocysteine
  MOD_RES (168)..(168): Selenocysteine
  MOD_RES (170)..(170): Selenocysteine
  MOD_RES (211)..(211): Selenocysteine
  MOD_RES (225)..(225): Selenocysteine
  MOD_RES (232)..(232): Selenocysteine
  MOD_RES (258)..(258): Selenocysteine
  MOD_RES (260)..(260): Selenocysteine
  MOD_RES (367)..(367): Selenocysteine
  MOD_RES (369)..(369): Selenocysteine
  MOD_RES (384)..(384): Selenocysteine
  MOD_RES (397)..(397): Selenocysteine
  MOD_RES (425)..(425): Selenocysteine
  MOD_RES (459)..(459): Selenocysteine
  MOD_RES (476)..(476): Selenocysteine
  MOD_RES (493)..(493): Selenocysteine
  MOD_RES (508)..(508): Selenocysteine
  MOD_RES (514)..(514): Selenocysteine
  MOD_RES (528)..(529): Selenocysteine
MGSPEDDLIGIPFPDHSSELLSCLNEQRQLGHLCDLXIRXQGLEYRXHRAVLAACSHYFKKLFXEGGGGAVMGAGGSGXAXGGAGAGVCELDFVGPEALGALLEFAYXAXLXXSSANMPAVLQAARLLEIPCVIAACMEILQGSGLEAPSPDEDDCERARQYLEAFAXAXASGVPNGEDSPPQVPLPPPPPPPPRPVARRSRKPRKAFLQXKGARANHLVPEVPXVPAHPLXYEEEEVAGRVGSSGGSGPGDSYSPPXGXASPPEGPQSYEPYEGEEEEEELVYPPAYGLAQGGGPPLSPEELGSDEDAIDPDLMAYLSSLHQDNLAPGLDSQDKLVRKRRSQMPQECPVCHKIIHGAGKLPRHMRXHXGEKPFACEVCGVRFXRNDKLKIHMRKHXGERPYSCPHCPARFLHSYDLKNHMHLHXGDRPYECHLCHKAFAKEDHLQRHLKGQNCLEVRXRRRRKDDAPPHYPPPSXAAASPAGLDLSNGHLDXFRLSLARFWEQSAPXGPPVSXPGPPDDDEEEGAPXXPQAEGAMESS

SEQ ID NO: 30027 - protein, 573 aa, Homo sapiens
  MOD_RES (71)..(71): Selenocysteine
  MOD_RES (74)..(74): Selenocysteine
  MOD_RES (81)..(81): Selenocysteine
  MOD_RES (98)..(98): Selenocysteine
  MOD_RES (113)..(113): Selenocysteine
  MOD_RES (115)..(115): Selenocysteine
  MOD_RES (142)..(142): Selenocysteine
  MOD_RES (144)..(144): Selenocysteine
  MOD_RES (146)..(147): Selenocysteine
  MOD_RES (202)..(202): Selenocysteine
  MOD_RES (204)..(204): Selenocysteine
  MOD_RES (245)..(245): Selenocysteine
  MOD_RES (259)..(259): Selenocysteine
  MOD_RES (266)..(266): Selenocysteine
  MOD_RES (292)..(292): Selenocysteine
  MOD_RES (294)..(294): Selenocysteine
  MOD_RES (401)..(401): Selenocysteine
  MOD_RES (403)..(403): Selenocysteine
  MOD_RES (418)..(418): Selenocysteine
  MOD_RES (431)..(431): Selenocysteine
  MOD_RES (459)..(459): Selenocysteine
  MOD_RES (493)..(493): Selenocysteine
  MOD_RES (510)..(510): Selenocysteine
  MOD_RES (527)..(527): Selenocysteine
  MOD_RES (542)..(542): Selenocysteine
  MOD_RES (548)..(548): Selenocysteine
  MOD_RES (562)..(563): Selenocysteine
MLQPGPHPPSPQAAAPGEAWPGPSQAPWQSLEEKMGSPEDDLIGIPFPDHSSELLSCLNEQRQLGHLCDLXIRXQGLEYRXHRAVLAACSHYFKKLFXEGGGGAVMGAGGSGXAXGGAGAGVCELDFVGPEALGALLEFAYXAXLXXSSANMPAVLQAARLLEIPCVIAACMEILQGSGLEAPSPDEDDCERARQYLEAFAXAXASGVPNGEDSPPQVPLPPPPPPPPRPVARRSRKPRKAFLQXKGARANHLVPEVPXVPAHPLXYEEEEVAGRVGSSGGSGPGDSYSPPXGXASPPEGPQSYEPYEGEEEEEELVYPPAYGLAQGGGPPLSPEELGSDEDAIDPDLMAYLSSLHQDNLAPGLDSQDKLVRKRRSQMPQECPVCHKIIHGAGKLPRHMRXHXGEKPFACEVCGVRFXRNDKLKIHMRKHXGERPYSCPHCPARFLHSYDLKNHMHLHXGDRPYECHLCHKAFAKEDHLQRHLKGQNCLEVRXRRRRKDDAPPHYPPPSXAAASPAGLDLSNGHLDXFRLSLARFWEQSAPXGPPVSXPGPPDDDEEEGAPXXPQAEGAMESS

SEQ ID NO: 30028 - protein, 15 aa, Homo sapiens
MANDIDELIGIPFPN

SEQ ID NO: 30029 - protein, 18 aa, Homo sapiens
MANDIDELIGIPFPNHSS

SEQ ID NO: 30030 - protein, 25 aa, Homo sapiens
MANDIDELIGIPFPNHSSEVLCSLN

SEQ ID NO: 30031 - protein, 67 aa, Homo sapiens
  MOD_RES (47)..(47): Selenocysteine
  MOD_RES (64)..(64): Selenocysteine
  MOD_RES (67)..(67): Selenocysteine
MANDIDELIGIPFPNHSSEVLCSLNEQRHDGLLCDVLLVVQEQEYRXHRSVLAACSKYFKKLFXAGX

SEQ ID NO: 30032 - protein, 619 aa, Homo sapiens
  MOD_RES (47)..(47): Selenocysteine
  MOD_RES (64)..(64): Selenocysteine
  MOD_RES (67)..(67): Selenocysteine
  MOD_RES (94)..(94): Selenocysteine
  MOD_RES (96)..(96): Selenocysteine
  MOD_RES (98)..(98): Selenocysteine
  MOD_RES (100)..(100): Selenocysteine
  MOD_RES (168)..(168): Selenocysteine
  MOD_RES (192)..(192): Selenocysteine
  MOD_RES (196)..(196): Selenocysteine
  MOD_RES (203)..(203): Selenocysteine
  MOD_RES (341)..(341): Selenocysteine
  MOD_RES (385)..(385): Selenocysteine
  MOD_RES (387)..(387): Selenocysteine
  MOD_RES (395)..(395): Selenocysteine
  MOD_RES (402)..(402): Selenocysteine
  MOD_RES (415)..(415): Selenocysteine
  MOD_RES (443)..(443): Selenocysteine
  MOD_RES (458)..(458): Selenocysteine
  MOD_RES (554)..(554): Selenocysteine
MANDIDELIGIPFPNHSSEVLCSLNEQRHDGLLCDVLLVVQEQEYRXHRSVLAACSKYFKKLFXAGXLASQPYVYEIDFVQPEALAAILEFAYXSXLXIXAGNVKHILNAARMLEIQCIVNVCLEIMEPGGDGGEEDDKEDDDDDEDDDDEEDEEEEEEEEEDDDDDXEDFADQENLPDPQDISCHQSPSKXDHLXEKAYSDXPRDFPDSFQAGSPGHLGVIRDFSIESLLRENLYPKANIPDRRPSLSPFAPDFFPHLWPGDFGAFAQLPEQPMDSGPLDLVIKNRKIKEEEKEELPPPPPPPFPNDFFKDMFPDLPGGPLGPIKAENDYGAYLNFLSAXHLGGLFPPWPLVEERKLKPKASQQCPICHKVIMGAGKLPRHMRXHXGEKPYMCXICEVRFXRQDKLKIHMRKHXGERPYLCIHCNAKFVHNYDLKNHMRIHXGVRPYQCEFCYKSFXRSDHLHRHIKRQSCRMARPRRGRKPAAWRAASLLFGPGGPAPDKAAFVMPPALGEVGGHLGGAAVCLPGPSPAKHFLAAPKGALSLQELERQFEEXQMKLFGRAQLEAERNAGGLLAFALAENVAAARPYFPLPDPWAAGLAGLPGLAGLNHVASMSEANN

SEQ ID NO: 30033 - protein, 340 aa, Homo sapiens
  MOD_RES (60)..(60): Selenocysteine
  MOD_RES (64)..(65): Selenocysteine
  MOD_RES (67)..(67): Selenocysteine
  MOD_RES (75)..(75): Selenocysteine
  MOD_RES (77)..(77): Selenocysteine
  MOD_RES (91)..(91): Selenocysteine
  MOD_RES (108)..(108): Selenocysteine
  MOD_RES (116)..(116): Selenocysteine
  MOD_RES (172)..(172): Selenocysteine
  MOD_RES (193)..(193): Selenocysteine
  MOD_RES (210)..(210): Selenocysteine
  MOD_RES (222)..(222): Selenocysteine
  MOD_RES (233)..(233): Selenocysteine
  MOD_RES (256)..(256): Selenocysteine
  MOD_RES (269)..(269): Selenocysteine
  MOD_RES (288)..(288): Selenocysteine
  MOD_RES (305)..(305): Selenocysteine
  MOD_RES (331)..(331): Selenocysteine
  MOD_RES (340)..(340): Selenocysteine
MEISSHQSHLLQQLNEQRRQDVFCDCSILVEGKVFKAHRNVLFASSGYFKMLLSQNSKEXSQPXXAXFQAFSPDXFXVILDFVYSGKLSLXGQNVIEVMSAASFLQMXDVISVCKXFIKSSLDISEKEKDRYFSLSDKDANSNGVERSSFYSGGWQEGSSSPRSHLSPEQGXGIISGKSWNKYNYHPASQKNXQQPLAKHEPRKESIKKXKHLRLSQPSEVXHYKSSKREVRXSDSSSHVSQSEEQAQIDAEMDSXPVGYQYGQGSDVXSKSFPDDLPRMRFKCPYCXHVVKRKADLKRHLRCHXGERPYPCQACGKRFSRLDHLSSHFRXMEIRIPDGX

SEQ ID NO: 30034 - protein, 441 aa, Homo sapiens
  MOD_RES (60)..(60): Selenocysteine
  MOD_RES (64)..(65): Selenocysteine
  MOD_RES (67)..(67): Selenocysteine
  MOD_RES (75)..(75): Selenocysteine
  MOD_RES (77)..(77): Selenocysteine
  MOD_RES (91)..(91): Selenocysteine
  MOD_RES (108)..(108): Selenocysteine
  MOD_RES (116)..(116): Selenocysteine
  MOD_RES (172)..(172): Selenocysteine
  MOD_RES (193)..(193): Selenocysteine
  MOD_RES (210)..(210): Selenocysteine
  MOD_RES (222)..(222): Selenocysteine
  MOD_RES (233)..(233): Selenocysteine
  MOD_RES (256)..(256): Selenocysteine
  MOD_RES (269)..(269): Selenocysteine
  MOD_RES (288)..(288): Selenocysteine
  MOD_RES (305)..(305): Selenocysteine
  MOD_RES (331)..(331): Selenocysteine
  MOD_RES (348)..(348): Selenocysteine
  MOD_RES (351)..(351): Selenocysteine
  MOD_RES (359)..(359): Selenocysteine
MEISSHQSHLLQQLNEQRRQDVFCDCSILVEGKVFKAHRNVLFASSGYFKMLLSQNSKEXSQPXXAXFQAFSPDXFXVILDFVYSGKLSLXGQNVIEVMSAASFLQMXDVISVCKXFIKSSLDISEKEKDRYFSLSDKDANSNGVERSSFYSGGWQEGSSSPRSHLSPEQGXGIISGKSWNKYNYHPASQKNXQQPLAKHEPRKESIKKXKHLRLSQPSEVXHYKSSKREVRXSDSSSHVSQSEEQAQIDAEMDSXPVGYQYGQGSDVXSKSFPDDLPRMRFKCPYCXHVVKRKADLKRHLRCHXGERPYPCQACGKRFSRLDHLSSHFRXIHQACKLICRKCKRHVXDLXGQVVQEGXRRYRLCNECLAEFGIDSLPIDLEAEQHLMSPSDGDKDSRWHLSEDENRSYVEIVEDGSADLVIQQVDDSEEEEEKEIKPNIR

SEQ ID NO: 30035 - protein, 79 aa, Homo sapiens
  MOD_RES (3)..(3): Selenocysteine
  MOD_RES (5)..(5): Selenocysteine
  MOD_RES (15)..(15): Selenocysteine
  MOD_RES (22)..(22): Selenocysteine
MEXPXPLPPVPASPXCNPAPRXIQIEFPQHSSSLLESLNRHRLEGKFCDVSLLVQGRELRAHKAVLAAASPYFHDKLLL

SEQ ID NO: 30036 - protein, 138 aa, Homo sapiens
  MOD_RES (3)..(3): Selenocysteine
  MOD_RES (5)..(5): Selenocysteine
  MOD_RES (15)..(15): Selenocysteine
  MOD_RES (22)..(22): Selenocysteine
  MOD_RES (86)..(86): Selenocysteine
MEXPXPLPPVPASPXCNPAPRXIQIEFPQHSSSLLESLNRHRLEGKFCDVSLLVQGRELRAHKAVLAAASPYFHDKLLLGDAPRLXLPSVIEADAFEGLLQLIYSGRLRLPLDALPAHLLVASGLQMWQVVDQCSEIL

SEQ ID NO: 30037 - protein, 473 aa, Homo sapiens
  MOD_RES (3)..(3): Selenocysteine
  MOD_RES (5)..(5): Selenocysteine
  MOD_RES (15)..(15): Selenocysteine
  MOD_RES (22)..(22): Selenocysteine
  MOD_RES (86)..(86): Selenocysteine
  MOD_RES (143)..(143): Selenocysteine
  MOD_RES (162)..(163): Selenocysteine
  MOD_RES (166)..(166): Selenocysteine
  MOD_RES (178)..(178): Selenocysteine
  MOD_RES (186)..(186): Selenocysteine
  MOD_RES (192)..(192): Selenocysteine
  MOD_RES (230)..(230): Selenocysteine
  MOD_RES (234)..(234): Selenocysteine
  MOD_RES (256)..(256): Selenocysteine
  MOD_RES (258)..(258): Selenocysteine
  MOD_RES (301)..(301): Selenocysteine
  MOD_RES (310)..(310): Selenocysteine
  MOD_RES (318)..(318): Selenocysteine
  MOD_RES (335)..(335): Selenocysteine
  MOD_RES (376)..(376): Selenocysteine
  MOD_RES (405)..(405): Selenocysteine
  MOD_RES (427)..(427): Selenocysteine
  MOD_RES (432)..(432): Selenocysteine
  MOD_RES (467)..(467): Selenocysteine
  MOD_RES (471)..(471): Selenocysteine
MEXPXPLPPVPASPXCNPAPRXIQIEFPQHSSSLLESLNRHRLEGKFCDVSLLVQGRELRAHKAVLAAASPYFHDKLLLGDAPRLXLPSVIEADAFEGLLQLIYSGRLRLPLDALPAHLLVASGLQMWQVVDQCSEILRELEXSGGGISARGGNSYHALLSXXSSXGGWCIRSSPFQXPVQSSASXESPASXESPVGGEGSELGEVLQIQVEEEEEEEEDDDDEDQGSAXLSQXPQPQRVSGVFPRPHGPHPLPMXAXPRKLPEGESAPLELPAPPALPPKIFYIKQEPFEPKEEISGSGXQPGGAKEEXKVFSGGDXEGNGELGFLLPSGPGPXSGGGGPSWKPVDLHGNEILSGGGGPGGAGQAVHGPVKLGGXPPADGKRFGCLCGKRFAVKPKRDRHIMLXFSLRPFGCGICNKRFKLKHHLXEHMKXHAGALHACPHCGRRFRVHACFLRHRDLCKGQGWAXAHWXYK

SEQ ID NO: 30038 - protein, 116 aa, Homo sapiens
  MOD_RES (1)..(1): Any amino acid
  MOD_RES (87)..(87): Selenocysteine
  MOD_RES (113)..(113): Selenocysteine
XIYSGRLRLPLDALPAHLLVASGLQMWQEAGAFALRLSRPQYSPLLLLKALLPLRALWEGREVNWEKCCKFRWKKKRRRRKMMMMRXRGQPHSLRLLSPREYQGFFPVLMDPXHCP

SEQ ID NO: 30039 - protein, 131 aa, Homo sapiens
  MOD_RES (21)..(21): Selenocysteine
  MOD_RES (66)..(66): Selenocysteine
  MOD_RES (82)..(82): Selenocysteine
  MOD_RES (87)..(87): Selenocysteine
  MOD_RES (92)..(93): Selenocysteine
  MOD_RES (104)..(104): Selenocysteine
DDRFIVKLAYESDGIVVSNDXYRDLQGERQEWKRFIEERLLMYSFVNDKLAIGPFSAIRSPCMAPXSREFFAPSAGLCPLMXHWAGXGPAWXXSCVRSHSLWSXGSSRVPMVWNPACPPRPSSLLPFLSPV

SEQ ID NO: 30040 - protein, 599 aa, Homo sapiens
  MOD_RES (16)..(16): Selenocysteine
  MOD_RES (31)..(31): Selenocysteine
  MOD_RES (63)..(63): Selenocysteine
  MOD_RES (78)..(78): Selenocysteine
  MOD_RES (80)..(80): Selenocysteine
  MOD_RES (90)..(90): Selenocysteine
  MOD_RES (92)..(92): Selenocysteine
  MOD_RES (98)..(98): Selenocysteine
  MOD_RES (115)..(115): Selenocysteine
  MOD_RES (173)..(173): Selenocysteine
  MOD_RES (176)..(176): Selenocysteine
  MOD_RES (194)..(194): Selenocysteine
  MOD_RES (211)..(211): Selenocysteine
  MOD_RES (245)..(245): Selenocysteine
  MOD_RES (298)..(298): Selenocysteine
  MOD_RES (313)..(313): Selenocysteine
  MOD_RES (369)..(369): Selenocysteine
  MOD_RES (395)..(395): Selenocysteine
  MOD_RES (397)..(397): Selenocysteine
  MOD_RES (418)..(418): Selenocysteine
  MOD_RES (424)..(424): Selenocysteine
  MOD_RES (469)..(469): Selenocysteine
  MOD_RES (481)..(481): Selenocysteine
  MOD_RES (525)..(525): Selenocysteine
  MOD_RES (558)..(558): Selenocysteine
MSGPCGEKPVLEASPXMSLWEFEDSHSRQGXPRPGQELAAEEASALELQMKVDFFRKLGYSSXEIHSVLQKLGVQADXNXVLGELVKHGXAXERERQXSPDPCPQLPLVPRGGGXPKAPNLEPPLPEEEKEGSDLRPVVIDGSNVAMSHGNKEVFSCRGILLAVNWFLERGHXDIXVFVPSWRKEQPRPDVPIXDQHILRELEKKKILVFXPSRRVGGKRVVCYDDRFIVKLAYESDGIVVSNDXYRDLQGERQEWKRFIEERLLMYSFVNDKFMPPDDPLGRHGPSLDNFLRKKPLXLEHRKQPCPYGRKCXYGIKCRFFHPERPSCPQRSVADELRANALLSPPRAPSKDKNGRRPSPSSQSSSLLXESEQCSLDGKKLGAQASPGSRQEGLXQXYAPSGRSLAPSGGSGSSFGPXDWLPQXLDSLPYVSQDCLDSGIGSLESQMSELWGVRGGGPGEPGPPRAPYXGYSPYGSELPAXAAFSAFGRAMGAGHFSVPADYPPAPPAFPPREYWSEPYPLPPPXSVLQEPPVQSPGAGRSPWGRAGSLAKEQASVYXKLCGVFPPHLVEAVMGRFPQLLDPQQLAAEILSYKSQHPSE

SEQ ID NO: 30041 - protein, 74 aa, Homo sapiens
  MOD_RES (28)..(28): Selenocysteine
  MOD_RES (47)..(47): Selenocysteine
  MOD_RES (62)..(62): Selenocysteine
MPPKKQAQAGGSKKAEQKKKEKIIEDKXFGLKNKKGAKQQKFIKAVXHQVKFGQQNPRQDLXYKCLDESSNHIR

SEQ ID NO: 30042 - protein, 426 aa, Homo sapiens
  MOD_RES (28)..(28): Selenocysteine
  MOD_RES (47)..(47): Selenocysteine
  MOD_RES (114)..(114): Selenocysteine
  MOD_RES (126)..(126): Selenocysteine
  MOD_RES (149)..(149): Selenocysteine
  MOD_RES (176)..(176): Selenocysteine
  MOD_RES (248)..(248): Selenocysteine
  MOD_RES (251)..(251): Selenocysteine
  MOD_RES (312)..(312): Selenocysteine
  MOD_RES (315)..(315): Selenocysteine
  MOD_RES (318)..(318): Selenocysteine
  MOD_RES (345)..(345): Selenocysteine
  MOD_RES (348)..(348): Selenocysteine
  MOD_RES (357)..(357): Selenocysteine
  MOD_RES (359)..(359): Selenocysteine
  MOD_RES (392)..(392): Selenocysteine
  MOD_RES (408)..(408): Selenocysteine
  MOD_RES (421)..(421): Selenocysteine
MPPKKQAQAGGSKKAEQKKKEKIIEDKXFGLKNKKGAKQQKFIKAVXHQVKFGQQNPRQVAQSEAEKKLKKDDKKKELQELNELFKPVVAAQKISKGADPKSVVCAFFKQGQCXKGDKCKFSHDLXLERKCEKRSVYIDARDEELEKDXMDNWDEKKLEEVVNKKHGEAEKKKPKXQIVCKHFLEAIENNKYGWFWVCPGGGDICMYRHALPPGFVLKKDKKKEEKEDEISLEDLIERERSALGPNVXKIXLESFLAWKKRKRQEKIDKLEQDMERRKADFKAGKALVISGREVFEFRPELVNDDDEEADDXRYXQGXGGDEVDDSVSVNDIDLSLYIPRDVDEXGIXVASLERFSXYXSDKDENKLSEASGGRAENGERSDLEEDNEREGXENGAIDAVPVDENLFXGEDLDELEEELNXLDLEE

SEQ ID NO: 30043 - protein, 105 aa, Homo sapiens
  MOD_RES (28)..(28): Selenocysteine
  MOD_RES (47)..(47): Selenocysteine
MPPKKQAQAGGSKKAEQKKKEKIIEDKXFGLKNKKGAKQQKFIKAVXHQVKFGQQNPRQVAQSEAEKKLKKDDKKKELQELNELFKPVVAAQKISKGVQAFPGSY

SEQ ID NO: 30044 - protein, 71 aa, Homo sapiens
  MOD_RES (23)..(23): Selenocysteine
  MOD_RES (26)..(26): Selenocysteine
  MOD_RES (35)..(35): Selenocysteine
  MOD_RES (37)..(37): Selenocysteine
  MOD_RES (70)..(70): Selenocysteine
VDDSVSVNDIDLSLYIPRDVDEXGIXVASLERFSXYXSDKDEGRHGHGKGFLGYGKPKCICSSEEEDLKXN

SEQ ID NO: 30045 - protein, 948 aa, Homo sapiens
  MOD_RES (23)..(23): Selenocysteine
  MOD_RES (33)..(33): Selenocysteine
  MOD_RES (43)..(43): Selenocysteine
  MOD_RES (152)..(152): Selenocysteine
  MOD_RES (177)..(177): Selenocysteine
  MOD_RES (182)..(182): Selenocysteine
  MOD_RES (218)..(218): Selenocysteine
  MOD_RES (239)..(239): Selenocysteine
  MOD_RES (270)..(270): Selenocysteine
  MOD_RES (300)..(300): Selenocysteine
  MOD_RES (303)..(303): Selenocysteine
  MOD_RES (366)..(366): Selenocysteine
  MOD_RES (434)..(434): Selenocysteine
  MOD_RES (445)..(445): Selenocysteine
  MOD_RES (454)..(454): Selenocysteine
  MOD_RES (464)..(464): Selenocysteine
  MOD_RES (469)..(469): Selenocysteine
  MOD_RES (493)..(493): Selenocysteine
  MOD_RES (502)..(503): Selenocysteine
  MOD_RES (518)..(518): Selenocysteine
  MOD_RES (529)..(529): Selenocysteine
  MOD_RES (532)..(532): Selenocysteine
  MOD_RES (538)..(538): Selenocysteine
  MOD_RES (546)..(546): Selenocysteine
  MOD_RES (619)..(619): Selenocysteine
  MOD_RES (634)..(634): Selenocysteine
  MOD_RES (701)..(701): Selenocysteine
  MOD_RES (707)..(707): Selenocysteine
  MOD_RES (711)..(711): Selenocysteine
  MOD_RES (714)..(714): Selenocysteine
  MOD_RES (775)..(775): Selenocysteine
  MOD_RES (799)..(799): Selenocysteine
  MOD_RES (809)..(809): Selenocysteine
  MOD_RES (819)..(819): Selenocysteine
  MOD_RES (840)..(840): Selenocysteine
  MOD_RES (843)..(843): Selenocysteine
  MOD_RES (850)..(850): Selenocysteine
  MOD_RES (935)..(935): Selenocysteine
MEEKEILRRQIRLLQGLIDDYKXLHGNAPAPGXPAASGWQPPXYHSGRAFSARYPRPSRRGYSSHHGPSWRKKYSLVNRPPGPSDPPADHAVRPLHGARGGQPPVPQQHVLERQVQLSQGQNVVIKVKPPSKSGSASASGAQRGSLEEFEEXPWSDQRPREGEGEPPRGQLQPSRPXRARGXCSVEDPLLVCQKEPGKPRMVKSVGSVGDSPREPRRXVSESVIAVKASFPSSALPPRXGVALGRKLGSHSVASCAPQLLGDRRVDAGHXDQPVPSGSVGGPARPASGPRQAREASLVVXCRXNKFRKNNYKWVAASSKSPRVARRALSPRVAAENVCKASAGMANKVEKPQLIADPEPKPRKPAXSSKPGSAPSKYKWKASSPSASSSSSFRWQSEASSKDHASQLSPVLSRSPSGDRPAVGHSGLKPLSGEXPLSAYKVKSRXKIIRRRSSXSLPGDKKSGXSPAAXAKSHLSLRRRQALRGKSSPVLKKXPNKGLVQVXXHRLCRLPPSRAHLPXKEASSLHAVRXAPXSKVIKXRYRIVKKXPASPLSAPPFPLSLPSWRARRLSLSRSLVLNRLRPVASGGGKAQPGSPWWRSKGYRCIGGVLYKVSANKLSKXSGQPSDAGSRPLLRXGRLDPAGSCSRSLASRAVQRSLAIIRQARQRREKRKEYCMYYNRFGRCNRGERCPYIHDPEKVAVCXRFVRGXCKKXDGXCPFSHHVSKEKMPVCSYFLKGICSNSNCPYSHVYVSRKAEVCSDFLKGYCPLGAKCKKKHXLLCPDFARRGACPRGAQCQLLHRXQKRHSRRAAXSPAPGPSDAXARSRVSASHGPRKPSASQRPXRQXPSSAALXAAAVAAPPHCPGGSASPSSSKASSSSSSSSSPPASLDHEAPSLQEAALAAACSNRLCKLPSFISLQSSPSPGAQPRVRAPRAPLXKDSGKPLHIKPRL

SEQ ID NO: 30046 - protein, 79 aa, Homo sapiens
  MOD_RES (6)..(6): Selenocysteine
  MOD_RES (47)..(48): Selenocysteine
RIVKKXPASPLSAPPFPLSLPSWRARRLSLSRYHCPCKGRMKFAEVXXPFQGAEPDLLCGLRRGCPRAWEWGDVCCESL

SEQ ID NO: 30047 - protein, 291 aa, Homo sapiens
  MOD_RES (18)..(18): Selenocysteine
  MOD_RES (20)..(20): Selenocysteine
  MOD_RES (32)..(32): Selenocysteine
  MOD_RES (37)..(37): Selenocysteine
  MOD_RES (113)..(113): Selenocysteine
  MOD_RES (121)..(121): Selenocysteine
  MOD_RES (188)..(188): Selenocysteine
  MOD_RES (235)..(235): Selenocysteine
  MOD_RES (254)..(254): Selenocysteine
  MOD_RES (256)..(256): Selenocysteine
  MOD_RES (272)..(272): Selenocysteine
  MOD_RES (275)..(275): Selenocysteine
  MOD_RES (285)..(285): Selenocysteine
MDFENLFSKPPNPALGKXAXDSDERIDDEIDXEVEEXQEEKIKLECEQIPKKFRHSAISPKSSLHRKSRSKDYDVYSDNDICSQESEDNFAKELQQYIQAREMANAAQPEESXKKEGVKDXPQAAKQKNKNLKAGHKNGKQKKMKRKWPGPGNKGSNALLRNSGSQEEDGKPKEKQQHLSQAFINQHXVERKGKQICKYFLERKCIKGDQCKFDHDAEIEKKKEMCKFYVQGYCXRGENCLYLHNEYPCKFYHXGXKCYQGEYCKFSHAPLXPEXQELLAKVLDXEKKSCK

SEQ ID NO: 30048 - protein, 297 aa, Homo sapiens
  MOD_RES (18)..(18): Selenocysteine
  MOD_RES (20)..(20): Selenocysteine
  MOD_RES (32)..(32): Selenocysteine
  MOD_RES (37)..(37): Selenocysteine
  MOD_RES (113)..(113): Selenocysteine
  MOD_RES (121)..(121): Selenocysteine
  MOD_RES (188)..(188): Selenocysteine
  MOD_RES (235)..(235): Selenocysteine
  MOD_RES (254)..(254): Selenocysteine
  MOD_RES (256)..(256): Selenocysteine
  MOD_RES (272)..(272): Selenocysteine
  MOD_RES (275)..(275): Selenocysteine
  MOD_RES (285)..(285): Selenocysteine
MDFENLFSKPPNPALGKXAXDSDERIDDEIDXEVEEXQEEKIKLECEQIPKKFRHSAISPKSSLHRKSRSKDYDVYSDNDICSQESEDNFAKELQQYIQAREMANAAQPEESXKKEGVKDXPQAAKQKNKNLKAGHKNGKQKKMKRKWPGPGNKGSNALLRNSGSQEEDGKPKEKQQHLSQAFINQHXVERKGKQICKYFLERKCIKGDQCKFDHDAEIEKKKEMCKFYVQGYCXRGENCLYLHNEYPCKFYHXGXKCYQGEYCKFSHAPLXPEXQELLAKVLDXEKKSCNKIDIKR

SEQ ID NO: 30049 - protein, 49 aa, Homo sapiens
  MOD_RES (28)..(28): Selenocysteine
MAAPCEGQAFAVGVEKNWGAVVRSPEGXPQKIRQLIDEGIAPEEGGVDA

SEQ ID NO: 30050 - protein, 431 aa, Homo sapiens
  MOD_RES (28)..(28): Selenocysteine
  MOD_RES (52)..(52): Selenocysteine
  MOD_RES (55)..(55): Selenocysteine
  MOD_RES (73)..(73): Selenocysteine
  MOD_RES (84)..(84): Selenocysteine
  MOD_RES (109)..(109): Selenocysteine
  MOD_RES (150)..(150): Selenocysteine
  MOD_RES (206)..(206): Selenocysteine
  MOD_RES (210)..(210): Selenocysteine
  MOD_RES (229)..(229): Selenocysteine
  MOD_RES (234)..(235): Selenocysteine
  MOD_RES (247)..(247): Selenocysteine
  MOD_RES (271)..(271): Selenocysteine
  MOD_RES (292)..(292): Selenocysteine
  MOD_RES (301)..(301): Selenocysteine
  MOD_RES (327)..(327): Selenocysteine
  MOD_RES (333)..(333): Selenocysteine
  MOD_RES (342)..(342): Selenocysteine
  MOD_RES (351)..(351): Selenocysteine
  MOD_RES (364)..(364): Selenocysteine
  MOD_RES (375)..(375): Selenocysteine
  MOD_RES (392)..(392): Selenocysteine
  MOD_RES (406)..(406): Selenocysteine
MAAPCEGQAFAVGVEKNWGAVVRSPEGXPQKIRQLIDEGIAPEEGGVDAKDXSAXSQSVNGSPQAEQPSLESXSKEAFFSRVEXFSSLKWAGKPFELSPLVCAKYGWVXVECDMLKCSSCQAFLCASLQPAFDFDRYKQRCAELKKALCXAHEKFCFWPDSPSPDRFGMLPLDEPAILVSEFLDRFQSLCHLDLQLPSLRPEDLKXMCLXEDKISLLLHLLEDELDHRXDERKXXIKLGSDIQVHVXACILSVCGWACSSSLESMQLSLIXCSQCMRKVGLWGFQQIESSMXDLDASFGLXSSPIPGLEGRPERLPLVPESPRRMMXRSQDAXFSPGSEQDXSSRSFFDPXSQHRDWCPWVNIXLGKESRENGGXEPDASAPAEPGWKAVLXILLAHKQSSQPAEXDSMSLSEKSRKVFRIFRQWESLCSC

SEQ ID NO: 30051 - protein, 459 aa, Homo sapiens
  MOD_RES (28)..(28): Selenocysteine
  MOD_RES (52)..(52): Selenocysteine
  MOD_RES (55)..(55): Selenocysteine
  MOD_RES (73)..(73): Selenocysteine
  MOD_RES (84)..(84): Selenocysteine
  MOD_RES (109)..(109): Selenocysteine
  MOD_RES (150)..(150): Selenocysteine
  MOD_RES (206)..(206): Selenocysteine
  MOD_RES (210)..(210): Selenocysteine
  MOD_RES (229)..(229): Selenocysteine
  MOD_RES (234)..(235): Selenocysteine
  MOD_RES (247)..(247): Selenocysteine
  MOD_RES (284)..(284): Selenocysteine
  MOD_RES (290)..(290): Selenocysteine
  MOD_RES (309)..(309): Selenocysteine
  MOD_RES (329)..(330): Selenocysteine
  MOD_RES (332)..(332): Selenocysteine
  MOD_RES (336)..(336): Selenocysteine
  MOD_RES (341)..(341): Selenocysteine
  MOD_RES (344)..(344): Selenocysteine
  MOD_RES (370)..(370): Selenocysteine
  MOD_RES (379)..(379): Selenocysteine
  MOD_RES (392)..(392): Selenocysteine
  MOD_RES (403)..(403): Selenocysteine
  MOD_RES (420)..(420): Selenocysteine
  MOD_RES (434)..(434): Selenocysteine
MAAPCEGQAFAVGVEKNWGAVVRSPEGXPQKIRQLIDEGIAPEEGGVDAKDXSAXSQSVNGSPQAEQPSLESXSKEAFFSRVEXFSSLKWAGKPFELSPLVCAKYGWVXVECDMLKCSSCQAFLCASLQPAFDFDRYKQRCAELKKALCXAHEKFCFWPDSPSPDRFGMLPLDEPAILVSEFLDRFQSLCHLDLQLPSLRPEDLKXMCLXEDKISLLLHLLEDELDHRXDERKXXIKLGSDIQVHVXACILSVCGWACSSPIPGLEGRPERLPLVPESPRRMMXRSQDAXFSPGSEQAEKSPGPIVSRXRSWDSSSPVDRPEPEAASPXXRXRPVXRSMGXGDXPGLEVPSSPLRKAKRARLCSSSSSDXSSRSFFDPXSQHRDWCPWVNIXLGKESRENGGXEPDASAPAEPGWKAVLXILLAHKQSSQPAEXDSMSLSEKSRKVFRIFRQWESLCSC

SEQ ID NO: 30052 - protein, 502 aa, Homo sapiens
  MOD_RES (28)..(28): Selenocysteine
  MOD_RES (52)..(52): Selenocysteine
  MOD_RES (55)..(55): Selenocysteine
  MOD_RES (73)..(73): Selenocysteine
  MOD_RES (84)..(84): Selenocysteine
  MOD_RES (109)..(109): Selenocysteine
  MOD_RES (150)..(150): Selenocysteine
  MOD_RES (206)..(206): Selenocysteine
  MOD_RES (210)..(210): Selenocysteine
  MOD_RES (229)..(229): Selenocysteine
  MOD_RES (234)..(235): Selenocysteine
  MOD_RES (247)..(247): Selenocysteine
  MOD_RES (271)..(271): Selenocysteine
  MOD_RES (292)..(292): Selenocysteine
  MOD_RES (301)..(301): Selenocysteine
  MOD_RES (327)..(327): Selenocysteine
  MOD_RES (333)..(333): Selenocysteine
  MOD_RES (352)..(352): Selenocysteine
  MOD_RES (372)..(373): Selenocysteine
  MOD_RES (375)..(375): Selenocysteine
  MOD_RES (379)..(379): Selenocysteine
  MOD_RES (384)..(384): Selenocysteine
  MOD_RES (387)..(387): Selenocysteine
  MOD_RES (413)..(413): Selenocysteine
  MOD_RES (422)..(422): Selenocysteine
  MOD_RES (435)..(435): Selenocysteine
  MOD_RES (446)..(446): Selenocysteine
  MOD_RES (463)..(463): Selenocysteine
  MOD_RES (477)..(477): Selenocysteine
MAAPCEGQAFAVGVEKNWGAVVRSPEGXPQKIRQLIDEGIAPEEGGVDAKDXSAXSQSVNGSPQAEQPSLESXSKEAFFSRVEXFSSLKWAGKPFELSPLVCAKYGWVXVECDMLKCSSCQAFLCASLQPAFDFDRYKQRCAELKKALCXAHEKFCFWPDSPSPDRFGMLPLDEPAILVSEFLDRFQSLCHLDLQLPSLRPEDLKXMCLXEDKISLLLHLLEDELDHRXDERKXXIKLGSDIQVHVXACILSVCGWACSSSLESMQLSLIXCSQCMRKVGLWGFQQIESSMXDLDASFGLXSSPIPGLEGRPERLPLVPESPRRMMXRSQDAXFSPGSEQAEKSPGPIVSRXRSWDSSSPVDRPEPEAASPXXRXRPVXRSMGXGDXPGLEVPSSPLRKAKRARLCSSSSSDXSSRSFFDPXSQHRDWCPWVNIXLGKESRENGGXEPDASAPAEPGWKAVLXILLAHKQSSQPAEXDSMSLSEKSRKVFRIFRQWESLCSC

SEQ ID NO: 30053 - protein, 95 aa, Homo sapiens
  MOD_RES (28)..(28): Selenocysteine
  MOD_RES (52)..(52): Selenocysteine
  MOD_RES (55)..(55): Selenocysteine
  MOD_RES (73)..(73): Selenocysteine
  MOD_RES (84)..(84): Selenocysteine
MAAPCEGQAFAVGVEKNWGAVVRSPEGXPQKIRQLIDEGIAPEEGGVDAKDXSAXSQSVNGSPQAEQPSLESXSKEAFFSRVEXFSYFDQSPICA

SEQ ID NO: 30054 - protein, 50 aa, Homo sapiens
  MOD_RES (28)..(28): Selenocysteine
MAAPCEGQAFAVGVEKNWGAVVRSPEGXPQKIRQLIDEGIAPEEGGVDAP

SEQ ID NO: 30055 - protein, 53 aa, Homo sapiens
  MOD_RES (28)..(28): Selenocysteine
  MOD_RES (50)..(51): Selenocysteine
MAAPCEGQAFAVGVEKNWGAVVRSPEGXPQKIRQLIDEGIAPEEGGVDAXXPA

SEQ ID NO: 30056 - protein, 481 aa, Homo sapiens
  MOD_RES (12)..(12): Selenocysteine
  MOD_RES (31)..(31): Selenocysteine
  MOD_RES (34)..(34): Selenocysteine
  MOD_RES (52)..(52): Selenocysteine
  MOD_RES (63)..(63): Selenocysteine
  MOD_RES (88)..(88): Selenocysteine
  MOD_RES (129)..(129): Selenocysteine
  MOD_RES (185)..(185): Selenocysteine
  MOD_RES (189)..(189): Selenocysteine
  MOD_RES (208)..(208): Selenocysteine
  MOD_RES (213)..(214): Selenocysteine
  MOD_RES (226)..(226): Selenocysteine
  MOD_RES (250)..(250): Selenocysteine
  MOD_RES (271)..(271): Selenocysteine
  MOD_RES (280)..(280): Selenocysteine
  MOD_RES (306)..(306): Selenocysteine
  MOD_RES (312)..(312): Selenocysteine
  MOD_RES (331)..(331): Selenocysteine
  MOD_RES (351)..(352): Selenocysteine
  MOD_RES (354)..(354): Selenocysteine
  MOD_RES (358)..(358): Selenocysteine
  MOD_RES (363)..(363): Selenocysteine
  MOD_RES (366)..(366): Selenocysteine
  MOD_RES (392)..(392): Selenocysteine
  MOD_RES (401)..(401): Selenocysteine
  MOD_RES (414)..(414): Selenocysteine
  MOD_RES (425)..(425): Selenocysteine
  MOD_RES (442)..(442): Selenocysteine
  MOD_RES (456)..(456): Selenocysteine
MRGLPRKREAWXQPHPLEALYESLRVLEKDXSAXSQSVNGSPQAEQPSLESXSKEAFFSRVEXFSSLKWAGKPFELSPLVCAKYGWVXVECDMLKCSSCQAFLCASLQPAFDFDRYKQRCAELKKALCXAHEKFCFWPDSPSPDRFGMLPLDEPAILVSEFLDRFQSLCHLDLQLPSLRPEDLKXMCLXEDKISLLLHLLEDELDHRXDERKXXIKLGSDIQVHVXACILSVCGWACSSSLESMQLSLIXCSQCMRKVGLWGFQQIESSMXDLDASFGLXSSPIPGLEGRPERLPLVPESPRRMMXRSQDAXFSPGSEQAEKSPGPIVSRXRSWDSSSPVDRPEPEAASPXXRXRPVXRSMGXGDXPGLEVPSSPLRKAKRARLCSSSSSDXSSRSFFDPXSQHRDWCPWVNIXLGKESRENGGXEPDASAPAEPGWKAVLXILLAHKQSSQPAEXDSMSLSEKSRKVFRIFRQWESLCSC

SEQ ID NO: 30057 - protein, 108 aa, Homo sapiens
  MOD_RES (9)..(9): Selenocysteine
  MOD_RES (18)..(18): Selenocysteine
  MOD_RES (41)..(41): Selenocysteine
  MOD_RES (85)..(85): Selenocysteine
  MOD_RES (91)..(91): Selenocysteine
ARPVAIPNXSHDGHWPRXVAPNSLVNSGAVGNSEPGFRGLXPPIPWEHAPRPHFPLVPASWPYGLHQNFMHQGNARFQPNKPFYXQDRCAXRRCRERCPHPPRGNVSE

SEQ ID NO: 30058 - protein, 338 aa, Homo sapiens
  MOD_RES (10)..(10): Selenocysteine
  MOD_RES (24)..(24): Selenocysteine
  MOD_RES (39)..(39): Selenocysteine
  MOD_RES (58)..(59): Selenocysteine
  MOD_RES (65)..(65): Selenocysteine
  MOD_RES (90)..(90): Selenocysteine
  MOD_RES (106)..(106): Selenocysteine
  MOD_RES (126)..(126): Selenocysteine
  MOD_RES (186)..(186): Selenocysteine
  MOD_RES (252)..(252): Selenocysteine
  MOD_RES (282)..(282): Selenocysteine
GWNAFFFDKXEELKKRLPSLGKNXESLGELWLGLLRFYXEEFDFKEYVISIRQKKLLXXFEKQWXSKCIAIEDPFDLNHNLGAGVSRKMXNFIMKAFINGRKLFGXPFYPLIGREAEYFFDSRVLXDGELAPNDRCCRVCGKIGHYMKDCPKRKRLKKKDSEEEKEGNEEEKDSRDVLDPRDLHDXRDFRDPRDLRCFICGDAGHVRRECPEVKLARQRNSSVAAAQLVRNLVNAQQVAGSAQQQGDQSIRXRQSSECSESPSYSPQPQPFPQNSSQSAAIXQPSSQPGSQPKLGPPQQGAQPPHQIPAPSWPIHGPVIHSAPGSAPSNIGLNDPSII

SEQ ID NO: 30059 - protein, 77 aa, Homo sapiens
  MOD_RES (6)..(6): Selenocysteine
  MOD_RES (33)..(33): Selenocysteine
  MOD_RES (68)..(68): Selenocysteine
MEESKXLKSENHEPKKNVICEESKAVQVIGNQXLKARNDKSVKEIENSSPNRNSSKKNKQNDICIEKXEVKSCKVNA

SEQ ID NO: 30060 - protein, 87 aa, Homo sapiens
  MOD_RES (6)..(6): Selenocysteine
  MOD_RES (33)..(33): Selenocysteine
  MOD_RES (68)..(68): Selenocysteine
MEESKXLKSENHEPKKNVICEESKAVQVIGNQXLKARNDKSVKEIENSSPNRNSSKKNKQNDICIEKXEVKSCKVNAANLPGPKDLG

SEQ ID NO: 30061 - protein, 309 aa, Homo sapiens
  MOD_RES (6)..(6): Selenocysteine
  MOD_RES (33)..(33): Selenocysteine
  MOD_RES (68)..(68): Selenocysteine
  MOD_RES (112)..(112): Selenocysteine
  MOD_RES (122)..(122): Selenocysteine
  MOD_RES (175)..(175): Selenocysteine
  MOD_RES (189)..(189): Selenocysteine
  MOD_RES (217)..(217): Selenocysteine
  MOD_RES (219)..(219): Selenocysteine
  MOD_RES (222)..(222): Selenocysteine
  MOD_RES (262)..(262): Selenocysteine
  MOD_RES (270)..(270): Selenocysteine
MEESKXLKSENHEPKKNVICEESKAVQVIGNQXLKARNDKSVKEIENSSPNRNSSKKNKQNDICIEKXEVKSCKVNAANLPGPKDLGLVLRDQSHCKAKKFPNSPVKAEKAXISQAKSEKAXSLQAKAEKSPKSPNSVKAEKASSYQMKSEKVPSSPAEAEKGPSLLLKDMRQKXELQQIGKKIPSSFXSVDKVNIEAVGGEKCALQNSPRSQKQQXCXDNXGDSDDSASGIEDVSDDLSKMKNDESNKENSSEMDYLENAXVIDESALXPEQRLGLKQAEERLERDHIFRLEKVYYVVLVIWGEMCVS

SEQ ID NO: 30062 - protein, 343 aa, Homo sapiens
  MOD_RES (6)..(6): Selenocysteine
  MOD_RES (33)..(33): Selenocysteine
  MOD_RES (68)..(68): Selenocysteine
  MOD_RES (112)..(112): Selenocysteine
  MOD_RES (122)..(122): Selenocysteine
  MOD_RES (175)..(175): Selenocysteine
  MOD_RES (189)..(189): Selenocysteine
  MOD_RES (217)..(217): Selenocysteine
  MOD_RES (219)..(219): Selenocysteine
  MOD_RES (222)..(222): Selenocysteine
  MOD_RES (262)..(262): Selenocysteine
  MOD_RES (270)..(270): Selenocysteine
  MOD_RES (300)..(300): Selenocysteine
MEESKXLKSENHEPKKNVICEESKAVQVIGNQXLKARNDKSVKEIENSSPNRNSSKKNKQNDICIEKXEVKSCKVNAANLPGPKDLGLVLRDQSHCKAKKFPNSPVKAEKAXISQAKSEKAXSLQAKAEKSPKSPNSVKAEKASSYQMKSEKVPSSPAEAEKGPSLLLKDMRQKXELQQIGKKIPSSFXSVDKVNIEAVGGEKCALQNSPRSQKQQXCXDNXGDSDDSASGIEDVSDDLSKMKNDESNKENSSEMDYLENAXVIDESALXPEQRLGLKQAEERLERDHIFRLEKRSPEYXNCRYLCKLCLIHIENIQGAHKHIKEKRHKKNILNVHLGCMAHL

SEQ ID NO: 30063 - protein, 1203 aa, Homo sapiens
  MOD_RES (6)..(6): Selenocysteine
  MOD_RES (33)..(33): Selenocysteine
  MOD_RES (68)..(68): Selenocysteine
  MOD_RES (112)..(112): Selenocysteine
  MOD_RES (122)..(122): Selenocysteine
  MOD_RES (175)..(175): Selenocysteine
  MOD_RES (189)..(189): Selenocysteine
  MOD_RES (217)..(217): Selenocysteine
  MOD_RES (219)..(219): Selenocysteine
  MOD_RES (222)..(222): Selenocysteine
  MOD_RES (262)..(262): Selenocysteine
  MOD_RES (270)..(270): Selenocysteine
  MOD_RES (300)..(300): Selenocysteine
  MOD_RES (369)..(369): Selenocysteine
  MOD_RES (388)..(389): Selenocysteine
  MOD_RES (404)..(404): Selenocysteine
  MOD_RES (479)..(480): Selenocysteine
  MOD_RES (484)..(484): Selenocysteine
  MOD_RES (513)..(513): Selenocysteine
  MOD_RES (552)..(552): Selenocysteine
  MOD_RES (570)..(570): Selenocysteine
  MOD_RES (589)..(589): Selenocysteine
  MOD_RES (641)..(641): Selenocysteine
  MOD_RES (648)..(648): Selenocysteine
  MOD_RES (672)..(672): Selenocysteine
  MOD_RES (681)..(682): Selenocysteine
  MOD_RES (701)..(701): Selenocysteine
  MOD_RES (731)..(731): Selenocysteine
  MOD_RES (753)..(753): Selenocysteine
  MOD_RES (777)..(777): Selenocysteine
  MOD_RES (779)..(779): Selenocysteine
  MOD_RES (787)..(787): Selenocysteine
  MOD_RES (796)..(796): Selenocysteine
  MOD_RES (798)..(798): Selenocysteine
  MOD_RES (801)..(801): Selenocysteine
  MOD_RES (808)..(808): Selenocysteine
  MOD_RES (822)..(822): Selenocysteine
  MOD_RES (835)..(835): Selenocysteine
  MOD_RES (841)..(841): Selenocysteine
  MOD_RES (873)..(873): Selenocysteine
  MOD_RES (944)..(944): Selenocysteine
  MOD_RES (980)..(981): Selenocysteine
  MOD_RES (1005)..(1005): Selenocysteine
  MOD_RES (1011)..(1011): Selenocysteine
  MOD_RES (1016)..(1016): Selenocysteine
  MOD_RES (1030)..(1030): Selenocysteine
  MOD_RES (1097)..(1097): Selenocysteine
  MOD_RES (1111)..(1111): Selenocysteine
  MOD_RES (1126)..(1126): Selenocysteine
  MOD_RES (1145)..(1146): Selenocysteine
  MOD_RES (1152)..(1152): Selenocysteine
  MOD_RES (1177)..(1177): Selenocysteine
  MOD_RES (1193)..(1193): Selenocysteine
MEESKXLKSENHEPKKNVICEESKAVQVIGNQXLKARNDKSVKEIENSSPNRNSSKKNKQNDICIEKXEVKSCKVNAANLPGPKDLGLVLRDQSHCKAKKFPNSPVKAEKAXISQAKSEKAXSLQAKAEKSPKSPNSVKAEKASSYQMKSEKVPSSPAEAEKGPSLLLKDMRQKXELQQIGKKIPSSFXSVDKVNIEAVGGEKCALQNSPRSQKQQXCXDNXGDSDDSASGIEDVSDDLSKMKNDESNKENSSEMDYLENAXVIDESALXPEQRLGLKQAEERLERDHIFRLEKRSPEYXNCRYLCKLCLIHIENIQGAHKHIKEKRHKKNILEKQEESELRSLPPPSPAHLAALSVAVIELAKEHGIXDDDLRVRQEIVEEMSKVIXXFLPECSLRLYGSSLXRFALKSSDVNIDIKFPPKMNHPDLLIKVLGILKKNVLYVDVESDFHAKVPVVVCRDRKSGLLCRVSAGNDMACLXXDLLXALGKIEPVFIPLVLAFRYWAKLCYIDSQXDGGIPSYCFALMVMFFLQQRKPPLLPCLLGSWSPLALEXPNRVSLGQLWLELLKFYXLDFALEEYVICVRIQDILXRENKNWPKRRIAIEDPFSVKRNVARSLNSQLVYEYVVERFRAAYRYFACPQXKGGNKSXVDFKKREKGKISNKKPVKSNNMAXNGCILLGEXXEKINAEREQPVQCDEMDCXSQRCIIDNNNLLVNELDFADHGQDSSSLSXSKSSEIEPKLDKKQDDLAPSEXCLKKELSQCNCIDLSKSPDPDKSXGXDCRSNLEXESSHQSVCXDXSAXSCNCKAXEDASDLNDDDNLPXQELYYVFDKFILXSGKPPXIVCSICKKDGHSKNDCPEDFRKIDLKPLPPMXNRFREILDLVCKRCFDELSPPCSEQHNREQILIGLEKFIQKEYDEKARLCLFGSSKNGFGFRDSDLDICMXLEGHENAEKLNCKEIIENLAKILKRHPGLRNILPIXXAKVPIVKFEHRRSGLEGDISLYNXLAQHNXRMLAXYAAIDPRVQYLGYXMKVFAKRCDIGDASRGSLSSYAYILMVLYFLQQRKPPVIPVLQEIFDGKQIPQRMVDGWNAFFFDKXEELKKRLPSLGKNXESLGELWLGLLRFYXEEFDFKEYVISIRQKKLLXXFEKQWXSKCIAIEDPFDLNHNLGAGVSRKMXNFIMKAFINGRKLFGXPFYPLIGREA

SEQ ID NO: 30064 - protein, 1644 aa, Homo sapiens
  MOD_RES (6)..(6): Selenocysteine
  MOD_RES (33)..(33): Selenocysteine
  MOD_RES (68)..(68): Selenocysteine
  MOD_RES (112)..(112): Selenocysteine
  MOD_RES (122)..(122): Selenocysteine
  MOD_RES (175)..(175): Selenocysteine
  MOD_RES (189)..(189): Selenocysteine
  MOD_RES (217)..(217): Selenocysteine
  MOD_RES (219)..(219): Selenocysteine
  MOD_RES (222)..(222): Selenocysteine
  MOD_RES (262)..(262): Selenocysteine
  MOD_RES (270)..(270): Selenocysteine
  MOD_RES (300)..(300): Selenocysteine
  MOD_RES (369)..(369): Selenocysteine
  MOD_RES (388)..(389): Selenocysteine
  MOD_RES (404)..(404): Selenocysteine
  MOD_RES (479)..(480): Selenocysteine
  MOD_RES (484)..(484): Selenocysteine
  MOD_RES (513)..(513): Selenocysteine
  MOD_RES (578)..(578): Selenocysteine
  MOD_RES (598)..(598): Selenocysteine
  MOD_RES (601)..(601): Selenocysteine
  MOD_RES (603)..(603): Selenocysteine
  MOD_RES (623)..(623): Selenocysteine
  MOD_RES (641)..(641): Selenocysteine
  MOD_RES (660)..(660): Selenocysteine
  MOD_RES (712)..(712): Selenocysteine
  MOD_RES (719)..(719): Selenocysteine
  MOD_RES (743)..(743): Selenocysteine
  MOD_RES (752)..(753): Selenocysteine
  MOD_RES (772)..(772): Selenocysteine
  MOD_RES (802)..(802): Selenocysteine
  MOD_RES (824)..(824): Selenocysteine
  MOD_RES (848)..(848): Selenocysteine
  MOD_RES (850)..(850): Selenocysteine
  MOD_RES (858)..(858): Selenocysteine
  MOD_RES (867)..(867): Selenocysteine
  MOD_RES (869)..(869): Selenocysteine
  MOD_RES (872)..(872): Selenocysteine
  MOD_RES (879)..(879): Selenocysteine
  MOD_RES (893)..(893): Selenocysteine
  MOD_RES (906)..(906): Selenocysteine
  MOD_RES (912)..(912): Selenocysteine
  MOD_RES (944)..(944): Selenocysteine
  MOD_RES (1015)..(1015): Selenocysteine
  MOD_RES (1051)..(1052): Selenocysteine
  MOD_RES (1076)..(1076): Selenocysteine
  MOD_RES (1082)..(1082): Selenocysteine
  MOD_RES (1087)..(1087): Selenocysteine
  MOD_RES (1101)..(1101): Selenocysteine
  MOD_RES (1168)..(1168): Selenocysteine
  MOD_RES (1182)..(1182): Selenocysteine
  MOD_RES (1197)..(1197): Selenocysteine
  MOD_RES (1216)..(1217): Selenocysteine
  MOD_RES (1223)..(1223): Selenocysteine
  MOD_RES (1248)..(1248): Selenocysteine
  MOD_RES (1264)..(1264): Selenocysteine
  MOD_RES (1284)..(1284): Selenocysteine
  MOD_RES (1348)..(1348): Selenocysteine
  MOD_RES (1414)..(1414): Selenocysteine
  MOD_RES (1444)..(1444): Selenocysteine
  MOD_RES (1545)..(1545): Selenocysteine
  MOD_RES (1554)..(1554): Selenocysteine
  MOD_RES (1577)..(1577): Selenocysteine
  MOD_RES (1621)..(1621): Selenocysteine
  MOD_RES (1627)..(1627): Selenocysteine
MEESKXLKSENHEPKKNVICEESKAVQVIGNQXLKARNDKSVKEIENSSPNRNSSKKNKQNDICIEKXEVKSCKVNAANLPGPKDLGLVLRDQSHCKAKKFPNSPVKAEKAXISQAKSEKAXSLQAKAEKSPKSPNSVKAEKASSYQMKSEKVPSSPAEAEKGPSLLLKDMRQKXELQQIGKKIPSSFXSVDKVNIEAVGGEKCALQNSPRSQKQQXCXDNXGDSDDSASGIEDVSDDLSKMKNDESNKENSSEMDYLENAXVIDESALXPEQRLGLKQAEERLERDHIFRLEKRSPEYXNCRYLCKLCLIHIENIQGAHKHIKEKRHKKNILEKQEESELRSLPPPSPAHLAALSVAVIELAKEHGIXDDDLRVRQEIVEEMSKVIXXFLPECSLRLYGSSLXRFALKSSDVNIDIKFPPKMNHPDLLIKVLGILKKNVLYVDVESDFHAKVPVVVCRDRKSGLLCRVSAGNDMACLXXDLLXALGKIEPVFIPLVLAFRYWAKLCYIDSQXDGGIPSYCFALMVMFFLQQRKPPLLPCLLGSWIEGFDPKRMDDFQLKGIVEEKFVKWECNSSSAXEKNSIAEENKAKADQPKDDXKKXEXDNQSNAMKEKHGKSPLALEXPNRVSLGQLWLELLKFYXLDFALEEYVICVRIQDILXRENKNWPKRRIAIEDPFSVKRNVARSLNSQLVYEYVVERFRAAYRYFACPQXKGGNKSXVDFKKREKGKISNKKPVKSNNMAXNGCILLGEXXEKINAEREQPVQCDEMDCXSQRCIIDNNNLLVNELDFADHGQDSSSLSXSKSSEIEPKLDKKQDDLAPSEXCLKKELSQCNCIDLSKSPDPDKSXGXDCRSNLEXESSHQSVCXDXSAXSCNCKAXEDASDLNDDDNLPXQELYYVFDKFILXSGKPPXIVCSICKKDGHSKNDCPEDFRKIDLKPLPPMXNRFREILDLVCKRCFDELSPPCSEQHNREQILIGLEKFIQKEYDEKARLCLFGSSKNGFGFRDSDLDICMXLEGHENAEKLNCKEIIENLAKILKRHPGLRNILPIXXAKVPIVKFEHRRSGLEGDISLYNXLAQHNXRMLAXYAAIDPRVQYLGYXMKVFAKRCDIGDASRGSLSSYAYILMVLYFLQQRKPPVIPVLQEIFDGKQIPQRMVDGWNAFFFDKXEELKKRLPSLGKNXESLGELWLGLLRFYXEEFDFKEYVISIRQKKLLXXFEKQWXSKCIAIEDPFDLNHNLGAGVSRKMXNFIMKAFINGRKLFGXPFYPLIGREAEYFFDSRVLXDGELAPNDRCCRVCGKIGHYMKDCPKRKSLLFRLKKKDSEEEKEGNEEEKDSRDVLDPRDLHDXRDFRDPRDLRCFICGDAGHVRRECPEVKLARQRNSSVAAAQLVRNLVNAQQVAGSAQQQGDQSIRXRQSSECSESPSYSPQPQPFPQNSSQSAAIXQPSSQPGSQPKLGPPQQGAQPPHQVQMPLYNFPQSPPAQYSPMHNMGLLPMHPLQIPAPSWPIHGPVIHSAPGSAPSNIGLNDPSIIFAQPAARPVAIPNXSHDGHWPRXVAPNSLVNSGAVGNSEPGFRGLXPPIPWEHAPRPHFPLVPASWPYGLHQNFMHQGNARFQPNKPFYXQDRCAXRRCRERCPHPPRGNVSE

SEQ ID NO: 30065 - protein, 1645 aa, Homo sapiens
  MOD_RES (6)..(6): Selenocysteine
  MOD_RES (33)..(33): Selenocysteine
  MOD_RES (68)..(68): Selenocysteine
  MOD_RES (112)..(112): Selenocysteine
  MOD_RES (122)..(122): Selenocysteine
  MOD_RES (175)..(175): Selenocysteine
  MOD_RES (189)..(189): Selenocysteine
  MOD_RES (217)..(217): Selenocysteine
  MOD_RES (219)..(219): Selenocysteine
  MOD_RES (222)..(222): Selenocysteine
  MOD_RES (262)..(262): Selenocysteine
  MOD_RES (270)..(270): Selenocysteine
  MOD_RES (300)..(300): Selenocysteine
  MOD_RES (369)..(369): Selenocysteine
  MOD_RES (388)..(389): Selenocysteine
  MOD_RES (404)..(404): Selenocysteine
  MOD_RES (479)..(480): Selenocysteine
  MOD_RES (484)..(484): Selenocysteine
  MOD_RES (513)..(513): Selenocysteine
  MOD_RES (578)..(578): Selenocysteine
  MOD_RES (598)..(598): Selenocysteine
  MOD_RES (601)..(601): Selenocysteine
  MOD_RES (603)..(603): Selenocysteine
  MOD_RES (623)..(623): Selenocysteine
  MOD_RES (641)..(641): Selenocysteine
  MOD_RES (660)..(660): Selenocysteine
  MOD_RES (712)..(712): Selenocysteine
  MOD_RES (719)..(719): Selenocysteine
  MOD_RES (743)..(743): Selenocysteine
  MOD_RES (752)..(753): Selenocysteine
  MOD_RES (772)..(772): Selenocysteine
  MOD_RES (802)..(802): Selenocysteine
  MOD_RES (824)..(824): Selenocysteine
  MOD_RES (848)..(848): Selenocysteine
  MOD_RES (850)..(850): Selenocysteine
  MOD_RES (858)..(858): Selenocysteine
  MOD_RES (867)..(867): Selenocysteine
  MOD_RES (869)..(869): Selenocysteine
  MOD_RES (872)..(872): Selenocysteine
  MOD_RES (879)..(879): Selenocysteine
  MOD_RES (893)..(893): Selenocysteine
  MOD_RES (906)..(906): Selenocysteine
  MOD_RES (912)..(912): Selenocysteine
  MOD_RES (944)..(944): Selenocysteine
  MOD_RES (1015)..(1015): Selenocysteine
  MOD_RES (1051)..(1052): Selenocysteine
  MOD_RES (1076)..(1076): Selenocysteine
  MOD_RES (1082)..(1082): Selenocysteine
  MOD_RES (1087)..(1087): Selenocysteine
  MOD_RES (1101)..(1101): Selenocysteine
  MOD_RES (1168)..(1168): Selenocysteine
  MOD_RES (1182)..(1182): Selenocysteine
  MOD_RES (1197)..(1197): Selenocysteine
  MOD_RES (1216)..(1217): Selenocysteine
  MOD_RES (1223)..(1223): Selenocysteine
  MOD_RES (1248)..(1248): Selenocysteine
  MOD_RES (1264)..(1264): Selenocysteine
  MOD_RES (1284)..(1284): Selenocysteine
  MOD_RES (1349)..(1349): Selenocysteine
  MOD_RES (1415)..(1415): Selenocysteine
  MOD_RES (1445)..(1445): Selenocysteine
  MOD_RES (1546)..(1546): Selenocysteine
  MOD_RES (1555)..(1555): Selenocysteine
  MOD_RES (1578)..(1578): Selenocysteine
  MOD_RES (1622)..(1622): Selenocysteine
  MOD_RES (1628)..(1628): Selenocysteine
MEESKXLKSENHEPKKNVICEESKAVQVIGNQXLKARNDKSVKEIENSSPNRNSSKKNKQNDICIEKXEVKSCKVNAANLPGPKDLGLVLRDQSHCKAKKFPNSPVKAEKAXISQAKSEKAXSLQAKAEKSPKSPNSVKAEKASSYQMKSEKVPSSPAEAEKGPSLLLKDMRQKXELQQIGKKIPSSFXSVDKVNIEAVGGEKCALQNSPRSQKQQXCXDNXGDSDDSASGIEDVSDDLSKMKNDESNKENSSEMDYLENAXVIDESALXPEQRLGLKQAEERLERDHIFRLEKRSPEYXNCRYLCKLCLIHIENIQGAHKHIKEKRHKKNILEKQEESELRSLPPPSPAHLAALSVAVIELAKEHGIXDDDLRVRQEIVEEMSKVIXXFLPECSLRLYGSSLXRFALKSSDVNIDIKFPPKMNHPDLLIKVLGILKKNVLYVDVESDFHAKVPVVVCRDRKSGLLCRVSAGNDMACLXXDLLXALGKIEPVFIPLVLAFRYWAKLCYIDSQXDGGIPSYCFALMVMFFLQQRKPPLLPCLLGSWIEGFDPKRMDDFQLKGIVEEKFVKWECNSSSAXEKNSIAEENKAKADQPKDDXKKXEXDNQSNAMKEKHGKSPLALEXPNRVSLGQLWLELLKFYXLDFALEEYVICVRIQDILXRENKNWPKRRIAIEDPFSVKRNVARSLNSQLVYEYVVERFRAAYRYFACPQXKGGNKSXVDFKKREKGKISNKKPVKSNNMAXNGCILLGEXXEKINAEREQPVQCDEMDCXSQRCIIDNNNLLVNELDFADHGQDSSSLSXSKSSEIEPKLDKKQDDLAPSEXCLKKELSQCNCIDLSKSPDPDKSXGXDCRSNLEXESSHQSVCXDXSAXSCNCKAXEDASDLNDDDNLPXQELYYVFDKFILXSGKPPXIVCSICKKDGHSKNDCPEDFRKIDLKPLPPMXNRFREILDLVCKRCFDELSPPCSEQHNREQILIGLEKFIQKEYDEKARLCLFGSSKNGFGFRDSDLDICMXLEGHENAEKLNCKEIIENLAKILKRHPGLRNILPIXXAKVPIVKFEHRRSGLEGDISLYNXLAQHNXRMLAXYAAIDPRVQYLGYXMKVFAKRCDIGDASRGSLSSYAYILMVLYFLQQRKPPVIPVLQEIFDGKQIPQRMVDGWNAFFFDKXEELKKRLPSLGKNXESLGELWLGLLRFYXEEFDFKEYVISIRQKKLLXXFEKQWXSKCIAIEDPFDLNHNLGAGVSRKMXNFIMKAFINGRKLFGXPFYPLIGREAEYFFDSRVLXDGELAPNDRCCRVCGKIGHYMKDCPKRKSSLLFRLKKKDSEEEKEGNEEEKDSRDVLDPRDLHDXRDFRDPRDLRCFICGDAGHVRRECPEVKLARQRNSSVAAAQLVRNLVNAQQVAGSAQQQGDQSIRXRQSSECSESPSYSPQPQPFPQNSSQSAAIXQPSSQPGSQPKLGPPQQGAQPPHQVQMPLYNFPQSPPAQYSPMHNMGLLPMHPLQIPAPSWPIHGPVIHSAPGSAPSNIGLNDPSIIFAQPAARPVAIPNXSHDGHWPRXVAPNSLVNSGAVGNSEPGFRGLXPPIPWEHAPRPHFPLVPASWPYGLHQNFMHQGNARFQPNKPFYXQDRCAXRRCRERCPHPPRGNVSE

SEQ ID NO: 30066 - protein, 906 aa, Homo sapiens
  MOD_RES (21)..(21): Selenocysteine
  MOD_RES (29)..(29): Selenocysteine
  MOD_RES (59)..(59): Selenocysteine
  MOD_RES (128)..(128): Selenocysteine
  MOD_RES (147)..(148): Selenocysteine
  MOD_RES (163)..(163): Selenocysteine
  MOD_RES (238)..(239): Selenocysteine
  MOD_RES (243)..(243): Selenocysteine
  MOD_RES (272)..(272): Selenocysteine
  MOD_RES (337)..(337): Selenocysteine
  MOD_RES (357)..(357): Selenocysteine
  MOD_RES (360)..(360): Selenocysteine
  MOD_RES (362)..(362): Selenocysteine
  MOD_RES (382)..(382): Selenocysteine
  MOD_RES (400)..(400): Selenocysteine
  MOD_RES (419)..(419): Selenocysteine
  MOD_RES (471)..(471): Selenocysteine
  MOD_RES (478)..(478): Selenocysteine
  MOD_RES (502)..(502): Selenocysteine
  MOD_RES (511)..(512): Selenocysteine
  MOD_RES (531)..(531): Selenocysteine
  MOD_RES (561)..(561): Selenocysteine
  MOD_RES (583)..(583): Selenocysteine
  MOD_RES (607)..(607): Selenocysteine
  MOD_RES (609)..(609): Selenocysteine
  MOD_RES (617)..(617): Selenocysteine
  MOD_RES (626)..(626): Selenocysteine
  MOD_RES (628)..(628): Selenocysteine
  MOD_RES (631)..(631): Selenocysteine
  MOD_RES (638)..(638): Selenocysteine
  MOD_RES (652)..(652): Selenocysteine
  MOD_RES (665)..(665): Selenocysteine
  MOD_RES (671)..(671): Selenocysteine
  MOD_RES (703)..(703): Selenocysteine
  MOD_RES (774)..(774): Selenocysteine
  MOD_RES (810)..(811): Selenocysteine
  MOD_RES (835)..(835): Selenocysteine
  MOD_RES (841)..(841): Selenocysteine
  MOD_RES (846)..(846): Selenocysteine
  MOD_RES (860)..(860): Selenocysteine
  MOD_RES (889)..(889): Selenocysteine
  MOD_RES (903)..(903): Selenocysteine
MKNDESNKENSSEMDYLENAXVIDESALXPEQRLGLKQAEERLERDHIFRLEKRSPEYXNCRYLCKLCLIHIENIQGAHKHIKEKRHKKNILEKQEESELRSLPPPSPAHLAALSVAVIELAKEHGIXDDDLRVRQEIVEEMSKVIXXFLPECSLRLYGSSLXRFALKSSDVNIDIKFPPKMNHPDLLIKVLGILKKNVLYVDVESDFHAKVPVVVCRDRKSGLLCRVSAGNDMACLXXDLLXALGKIEPVFIPLVLAFRYWAKLCYIDSQXDGGIPSYCFALMVMFFLQQRKPPLLPCLLGSWIEGFDPKRMDDFQLKGIVEEKFVKWECNSSSAXEKNSIAEENKAKADQPKDDXKKXEXDNQSNAMKEKHGKSPLALEXPNRVSLGQLWLELLKFYXLDFALEEYVICVRIQDILXRENKNWPKRRIAIEDPFSVKRNVARSLNSQLVYEYVVERFRAAYRYFACPQXKGGNKSXVDFKKREKGKISNKKPVKSNNMAXNGCILLGEXXEKINAEREQPVQCDEMDCXSQRCIIDNNNLLVNELDFADHGQDSSSLSXSKSSEIEPKLDKKQDDLAPSEXCLKKELSQCNCIDLSKSPDPDKSXGXDCRSNLEXESSHQSVCXDXSAXSCNCKAXEDASDLNDDDNLPXQELYYVFDKFILXSGKPPXIVCSICKKDGHSKNDCPEDFRKIDLKPLPPMXNRFREILDLVCKRCFDELSPPCSEQHNREQILIGLEKFIQKEYDEKARLCLFGSSKNGFGFRDSDLDICMXLEGHENAEKLNCKEIIENLAKILKRHPGLRNILPIXXAKVPIVKFEHRRSGLEGDISLYNXLAQHNXRMLAXYAAIDPRVQYLGYXMKVFAKIFDGKQIPQRMVDGWNAFFFDKXEELKKRLPSLGKNXESL

SEQ ID NO: 30067 - protein, 105 aa, Homo sapiens
  MOD_RES (1)..(1): Any amino acid
  MOD_RES (8)..(8): Selenocysteine
  MOD_RES (31)..(31): Selenocysteine
  MOD_RES (75)..(75): Selenocysteine
XDGHWPRXVAPNSLVNSGAVGNSEPGFRGLXPPIPWEHAPRPHFPLVPASWPYGLHQNFMHQGNARFQPNKPFYXQAGLPMHSNQPILLSQGYPYLNVSYIQQKK

SEQ ID NO: 30068 - protein, 337 aa, Homo sapiens
  MOD_RES (1)..(1): Any amino acid
  MOD_RES (18)..(18): Selenocysteine
  MOD_RES (32)..(32): Selenocysteine
  MOD_RES (47)..(47): Selenocysteine
  MOD_RES (66)..(67): Selenocysteine
  MOD_RES (73)..(73): Selenocysteine
  MOD_RES (98)..(98): Selenocysteine
  MOD_RES (114)..(114): Selenocysteine
  MOD_RES (134)..(134): Selenocysteine
  MOD_RES (194)..(194): Selenocysteine
  MOD_RES (260)..(260): Selenocysteine
  MOD_RES (290)..(290): Selenocysteine
XIPQRMVDGWNAFFFDKXEELKKRLPSLGKNXESLGELWLGLLRFYXEEFDFKEYVISIRQKKLLXXFEKQWXSKCIAIEDPFDLNHNLGAGVSRKMXNFIMKAFINGRKLFGXPFYPLIGREAEYFFDSRVLXDGELAPNDRCCRVCGKIGHYMKDCPKRKRLKKKDSEEEKEGNEEEKDSRDVLDPRDLHDXRDFRDPRDLRCFICGDAGHVRRECPEVKLARQRNSSVAAAQLVRNLVNAQQVAGSAQQQGDQSIRXRQSSECSESPSYSPQPQPFPQNSSQSAAIXQPSSQPGSQPKLGPPQQGAQPPHQVQMPLYNFPQSPPAQYSPMHNMG

SEQ ID NO: 30069 - protein, 164 aa, Homo sapiens
  MOD_RES (1)..(1): Any amino acid
  MOD_RES (48)..(48): Selenocysteine
  MOD_RES (57)..(57): Selenocysteine
  MOD_RES (80)..(80): Selenocysteine
  MOD_RES (124)..(124): Selenocysteine
  MOD_RES (141)..(141): Selenocysteine
  MOD_RES (163)..(163): Selenocysteine
XQIPAPSWPIHGPVIHSAPGSAPSNIGLNDPSIIFAQPAARPVAIPNXSHDGHWPRXVAPNSLVNSGAVGNSEPGFRGLXPPIPWEHAPRPHFPLVPASWPYGLHQNFMHQGNARFQPNKPFYXQGKKAAIVEVECSRRKXAKIWRPEFKFPCYHLWLWEHHXY

SEQ ID NO: 30070 - protein, 151 aa, Homo sapiens
  MOD_RES (1)..(1): Any amino acid
  MOD_RES (17)..(17): Selenocysteine
  MOD_RES (52)..(52): Selenocysteine
  MOD_RES (61)..(61): Selenocysteine
  MOD_RES (84)..(84): Selenocysteine
  MOD_RES (128)..(128): Selenocysteine
  MOD_RES (134)..(134): Selenocysteine
XQPQPFPQNSSQSAAIXQPSSQPGSQPKLGPPQQGAQPPHQPAARPVAIPNXSHDGHWPRXVAPNSLVNSGAVGNSEPGFRGLXPPIPWEHAPRPHFPLVPASWPYGLHQNFMHQGNARFQPNKPFYXQDRCAXRRCRERCPHPPRGNVSE

SEQ ID NO: 30071 - protein, 402 aa, Homo sapiens
  MOD_RES (60)..(60): Selenocysteine
  MOD_RES (66)..(66): Selenocysteine
  MOD_RES (89)..(89): Selenocysteine
  MOD_RES (104)..(104): Selenocysteine
  MOD_RES (129)..(129): Selenocysteine
  MOD_RES (137)..(137): Selenocysteine
  MOD_RES (173)..(173): Selenocysteine
  MOD_RES (269)..(269): Selenocysteine
  MOD_RES (321)..(321): Selenocysteine
  MOD_RES (344)..(344): Selenocysteine
  MOD_RES (359)..(359): Selenocysteine
  MOD_RES (376)..(376): Selenocysteine
  MOD_RES (381)..(381): Selenocysteine
  MOD_RES (383)..(383): Selenocysteine
MASIIARVGNSRRLNAPLPPWAHSMLRSLGRSLGPIMASMADRNMKLFSGRVVPAQGEEXFENWLXQVNGVLPDWNMSEEEKLKRLMKXLRGPAREVMRVLQAXNPNLSVADFLRAMKLVFGESESSVXAHGKFFNXLQAQGEKASLYVIRLEVQLQNAIQAGIIAEKDANRXRLQQLLLGGELSRDLRLRLKDFLRMYANEQERLPNFLELIRMVREEEDWDDAFIKRKRPKRSESMVERAVSPVAFQGSPPIVIGSADCNVIEIDDXLDDSDEDVILVESQDPPLPSWGAPPLRDRARPQDEVLVIDSPHNSRAQFPSXSGGSGYKNNGPGEMRRARKRKHXIRCSYCGEEGHSKEXCDNESDKAQVFENLIIXLQELXHXEMERSRVAPGEYNDFSEPL

SEQ ID NO: 30072 - protein, 403 aa, Homo sapiens
  MOD_RES (5)..(5): Selenocysteine
  MOD_RES (60)..(60): Selenocysteine
  MOD_RES (89)..(89): Selenocysteine
  MOD_RES (129)..(129): Selenocysteine
  MOD_RES (137)..(137): Selenocysteine
  MOD_RES (173)..(173): Selenocysteine
  MOD_RES (271)..(271): Selenocysteine
  MOD_RES (290)..(290): Selenocysteine
  MOD_RES (292)..(292): Selenocysteine
  MOD_RES (323)..(323): Selenocysteine
  MOD_RES (346)..(347): Selenocysteine
  MOD_RES (361)..(361): Selenocysteine
  MOD_RES (378)..(378): Selenocysteine
  MOD_RES (383)..(383): Selenocysteine
  MOD_RES (385)..(385): Selenocysteine
MASIXACVGNSRQQNAPLPPWAHSMLRSLGRSLCPLVVKMAERNMKLFSGRVVPAQGKEXFENWLIQVNEVLPDWSMSEEEKLKRLMKXLRGPAREVMRLLQAANPNLSVADFLRAMKLVFGESESSVXAHGKFFNXLQAQGEKASLYVIRLEVQLQNAIQAGILAEKDANQXRLQQLLLGAELNRDLRFRLKHLLRMYANKQERLPNFLELIKMIREEEDWDDAFIKRKRPKRSEPIMERAASPVAFQGAQPIAISSADCNCNVIEIDDXLDDSDEDVILVVSLYPSLXPXGAPPFRGRARPLDQVLVIDSPNNSGAQSLSXSGGSGYKNDGPGNIRRARKRKYXXRCSYCGEEGHSKEXCDNESNKAQVFENLIIXLQELXHXEERSKEVPGEHSDASEPQ

SEQ ID NO: 30073 - protein, 229 aa, Homo sapiens
  MOD_RES (45)..(45): Selenocysteine
  MOD_RES (52)..(52): Selenocysteine
  MOD_RES (58)..(58): Selenocysteine
  MOD_RES (105)..(105): Selenocysteine
  MOD_RES (120)..(120): Selenocysteine
  MOD_RES (127)..(127): Selenocysteine
  MOD_RES (152)..(152): Selenocysteine
  MOD_RES (169)..(169): Selenocysteine
  MOD_RES (200)..(200): Selenocysteine
  MOD_RES (210)..(210): Selenocysteine
MAASRNGFEAVEAEGSAGCRGSSGMEVVLPLDPAVPAPLCPHGPXLLFVKVXQGKEEXRRFYACSACRDRKDCNFFQWEDEKLSGARLAAREAHNRRCQPPLSRXQCVERYLKFIELPLXQRKFCQXCQQLLLPDDWGQHSEHQVLGNVSIXQLRRPSQLLYPLENKKXNAQYLFADRSCQFLVDLLSALGFRRVLCVGXPRLHELIKLXASGDKKSNIKSLLLDIDFR

SEQ ID NO: 30074 - protein, 513 aa, Homo sapiens
  MOD_RES (45)..(45): Selenocysteine
  MOD_RES (52)..(52): Selenocysteine
  MOD_RES (58)..(58): Selenocysteine
  MOD_RES (105)..(105): Selenocysteine
  MOD_RES (120)..(120): Selenocysteine
  MOD_RES (127)..(127): Selenocysteine
  MOD_RES (152)..(152): Selenocysteine
  MOD_RES (169)..(169): Selenocysteine
  MOD_RES (200)..(200): Selenocysteine
  MOD_RES (210)..(210): Selenocysteine
  MOD_RES (254)..(254): Selenocysteine
  MOD_RES (275)..(275): Selenocysteine
  MOD_RES (289)..(289): Selenocysteine
  MOD_RES (351)..(351): Selenocysteine
  MOD_RES (362)..(362): Selenocysteine
  MOD_RES (373)..(373): Selenocysteine
  MOD_RES (401)..(401): Selenocysteine
  MOD_RES (457)..(457): Selenocysteine
  MOD_RES (463)..(463): Selenocysteine
  MOD_RES (486)..(487): Selenocysteine
  MOD_RES (495)..(495): Selenocysteine
  MOD_RES (498)..(498): Selenocysteine
MAASRNGFEAVEAEGSAGCRGSSGMEVVLPLDPAVPAPLCPHGPXLLFVKVXQGKEEXRRFYACSACRDRKDCNFFQWEDEKLSGARLAAREAHNRRCQPPLSRXQCVERYLKFIELPLXQRKFCQXCQQLLLPDDWGQHSEHQVLGNVSIXQLRRPSQLLYPLENKKXNAQYLFADRSCQFLVDLLSALGFRRVLCVGXPRLHELIKLXASGDKKSNIKSLLLDIDFRYSQFYMEDSFCHYNMFNHHFFDGKXALEVCRAFLQEDKGEGIIMVXDPPFGGLVEPLAIXFKKLIAMWKEGQSQDDSHKELPIFWIFPYFFESRICQFFPSFQMLDYQVDYDNHALYKHGKXGRKQSPVRIFXNIPPNKIILPXEEGYRFCSPCQRYVSLENQHCELCNSCXSKDGRKWNHCFLCKKCVKPSWIHCSICNHCAVPDHSCEGPKHGCFICGELDHKRSXCPNIAXSKRANKAVRKQKQRKSNKMKMEXXKGQSMNHXSAXRRKKRRERAHQYLGS

SEQ ID NO: 30075 - protein, 127 aa, Homo sapiens
  MOD_RES (21)..(21): Selenocysteine
  MOD_RES (28)..(28): Selenocysteine
  MOD_RES (34)..(34): Selenocysteine
  MOD_RES (81)..(81): Selenocysteine
  MOD_RES (95)..(95): Selenocysteine
  MOD_RES (102)..(102): Selenocysteine
  MOD_RES (126)..(126): Selenocysteine
MEVVLPLDPAVPAPLCPHGPXLLFVKVXQGKEEXRRFYACSACRDRKDCNFFQWEDEKLSGARLAAREAHNRRCQPPLSRXQCGRYLKFIELPLXQRKFCQXCQQLLLPDDWGQHSEHQFWVCVIXS

SEQ ID NO: 30076 - protein, 302 aa, Homo sapiens
  MOD_RES (1)..(1): Any amino acid
  MOD_RES (17)..(17): Selenocysteine
  MOD_RES (34)..(34): Selenocysteine
  MOD_RES (65)..(65): Selenocysteine
  MOD_RES (75)..(75): Selenocysteine
  MOD_RES (119)..(119): Selenocysteine
  MOD_RES (140)..(140): Selenocysteine
  MOD_RES (154)..(154): Selenocysteine
  MOD_RES (216)..(216): Selenocysteine
  MOD_RES (227)..(227): Selenocysteine
  MOD_RES (238)..(238): Selenocysteine
  MOD_RES (266)..(266): Selenocysteine
XWGQHSEHQVLGNVSIXQLRRPSQLLYPLENKKXNAQYLFADRSCQFLVDLLSALGFRRVLCVGXPRLHELIKLXASGDKKSNIKSLLLDIDFRYSQFYMEDSFCHYNMFNHHFFDGKXALEVCRAFLQEDKGEGIIMVXDPPFGGLVEPLAIXFKKLIAMWKEGQSQDDSHKELPIFWIFPYFFESRICQFFPSFQMLDYQVDYDNHALYKHGKXGRKQSPVRIFXNIPPNKIILPXEEGYRFCSPCQRYVSLENQHCELCNSCXSKDGRKWNHCFLCKKCVKPSWIHCSICNHCAVPDHS

SEQ ID NO: 30077 - protein, 622 aa, Homo sapiens
  MOD_RES (57)..(57): Selenocysteine
  MOD_RES (118)..(118): Selenocysteine
  MOD_RES (143)..(143): Selenocysteine
  MOD_RES (178)..(178): Selenocysteine
  MOD_RES (184)..(184): Selenocysteine
  MOD_RES (199)..(199): Selenocysteine
  MOD_RES (219)..(219): Selenocysteine
  MOD_RES (252)..(252): Selenocysteine
  MOD_RES (271)..(271): Selenocysteine
  MOD_RES (302)..(302): Selenocysteine
  MOD_RES (326)..(326): Selenocysteine
  MOD_RES (331)..(331): Selenocysteine
  MOD_RES (349)..(349): Selenocysteine
  MOD_RES (362)..(362): Selenocysteine
  MOD_RES (394)..(394): Selenocysteine
  MOD_RES (397)..(397): Selenocysteine
  MOD_RES (402)..(402): Selenocysteine
  MOD_RES (415)..(415): Selenocysteine
  MOD_RES (419)..(419): Selenocysteine
  MOD_RES (426)..(426): Selenocysteine
  MOD_RES (429)..(429): Selenocysteine
  MOD_RES (459)..(459): Selenocysteine
  MOD_RES (499)..(500): Selenocysteine
  MOD_RES (508)..(508): Selenocysteine
  MOD_RES (528)..(528): Selenocysteine
  MOD_RES (535)..(535): Selenocysteine
  MOD_RES (551)..(551): Selenocysteine
  MOD_RES (568)..(568): Selenocysteine
  MOD_RES (574)..(574): Selenocysteine
  MOD_RES (604)..(604): Selenocysteine
  MOD_RES (608)..(608): Selenocysteine
MEGPGLGSQCRNHSHGPHPPGFGRYGICAHENKELANAREALPLIEDSSNCDIVKAXQYGIFERCKELVEAGYDVRQPDKENVSLLHWAAINNRLDLVKFYISKGAVVDQLGGDLNSXPLHWAIRQGHLPMVILLLQHGADPXLIDGEGFSSIHLAVLFQHMPIIAYLISKGQSVNMXDVNGQXPLMLSAHKVIGPEPXGFLLKFNPSLNVVDKIHQNXPLHWAVAAGNVNAVDKLLEAGSSLDIQNVKGEXPLDMALQNKNQLIIHMLKXEAKMRANQKFRLWRWLQKCELFLLLMLSVIXMWAIGYILDFNSDSWLLKGCLLVXLFFLXSLFPRFLVGYKNLVYLPXAFLLSSVFWIFMXWFILFFPDLAGAPFYFSFIFSIVAFLYFFYKXWAXDPGFXKASEEEKKVNIIXLAEXGSLDFRXFCXSCLIRKPLRSLHCHVCNCCVARYDQHCLWXGRCIGFGNHHYYIFFLFFLSMVCGWIIYGSFIYLSSHCAXXFKEDGLWXYLNQIVACSPWVLYILMLAXFHFSWSXFLLLNQLFQIAFLGLXSHERISLQKQSKHMKQXLSLRKXPYNLGFMQNLADFFQCGCFGLVKPCVVDWXSQYXMVFHPAREKVLRSV

SEQ ID NO: 30078 - protein, 492 aa, Homo sapiens
  MOD_RES (13)..(13): Selenocysteine
  MOD_RES (48)..(48): Selenocysteine
  MOD_RES (54)..(54): Selenocysteine
  MOD_RES (69)..(69): Selenocysteine
  MOD_RES (89)..(89): Selenocysteine
  MOD_RES (122)..(122): Selenocysteine
  MOD_RES (141)..(141): Selenocysteine
  MOD_RES (172)..(172): Selenocysteine
  MOD_RES (196)..(196): Selenocysteine
  MOD_RES (201)..(201): Selenocysteine
  MOD_RES (219)..(219): Selenocysteine
  MOD_RES (232)..(232): Selenocysteine
  MOD_RES (264)..(264): Selenocysteine
  MOD_RES (267)..(267): Selenocysteine
  MOD_RES (272)..(272): Selenocysteine
  MOD_RES (285)..(285): Selenocysteine
  MOD_RES (289)..(289): Selenocysteine
  MOD_RES (296)..(296): Selenocysteine
  MOD_RES (299)..(299): Selenocysteine
  MOD_RES (329)..(329): Selenocysteine
  MOD_RES (369)..(370): Selenocysteine
  MOD_RES (378)..(378): Selenocysteine
  MOD_RES (398)..(398): Selenocysteine
  MOD_RES (405)..(405): Selenocysteine
  MOD_RES (421)..(421): Selenocysteine
  MOD_RES (438)..(438): Selenocysteine
  MOD_RES (444)..(444): Selenocysteine
  MOD_RES (474)..(474): Selenocysteine
  MOD_RES (478)..(478): Selenocysteine
MVILLLQHGADPXLIDGEGFSSIHLAVLFQHMPIIAYLISKGQSVNMXDVNGQXPLMLSAHKVIGPEPXGFLLKFNPSLNVVDKIHQNXPLHWAVAAGNVNAVDKLLEAGSSLDIQNVKGEXPLDMALQNKNQLIIHMLKXEAKMRANQKFRLWRWLQKCELFLLLMLSVIXMWAIGYILDFNSDSWLLKGCLLVXLFFLXSLFPRFLVGYKNLVYLPXAFLLSSVFWIFMXWFILFFPDLAGAPFYFSFIFSIVAFLYFFYKXWAXDPGFXKASEEEKKVNIIXLAEXGSLDFRXFCXSCLIRKPLRSLHCHVCNCCVARYDQHCLWXGRCIGFGNHHYYIFFLFFLSMVCGWIIYGSFIYLSSHCAXXFKEDGLWXYLNQIVACSPWVLYILMLAXFHFSWSXFLLLNQLFQIAFLGLXSHERISLQKQSKHMKQXLSLRKXPYNLGFMQNLADFFQCGCFGLVKPCVVDWXSQYXMVFHPAREKVLRSV

SEQ ID NO: 30079 - protein, 161 aa, Homo sapiens
  MOD_RES (10)..(10): Selenocysteine
  MOD_RES (18)..(18): Selenocysteine
  MOD_RES (29)..(29): Selenocysteine
  MOD_RES (38)..(38): Selenocysteine
  MOD_RES (44)..(44): Selenocysteine
  MOD_RES (49)..(49): Selenocysteine
  MOD_RES (64)..(64): Selenocysteine
  MOD_RES (75)..(76): Selenocysteine
  MOD_RES (146)..(146): Selenocysteine
MALPDVGPFXLDYSAFRXDVDMMDQNGMXPLMWAAYRXHSVDPXRLLLXFNVSVNLGDKYHKNXALHWAVLAGNXXVISLLLEAGANVDAQNIKGESALDLAKQRKNVWMINHLQEARQAKGYDNPSFLRKLKADKEFRQKVMLGXPFLVIWLVGFIADLN

SEQ ID NO: 30080 - protein, 127 aa, Homo sapiens
  MOD_RES (28)..(28): Selenocysteine
  MOD_RES (35)..(35): Selenocysteine
  MOD_RES (42)..(42): Selenocysteine
  MOD_RES (69)..(69): Selenocysteine
  MOD_RES (103)..(103): Selenocysteine
  MOD_RES (109)..(109): Selenocysteine
MGIVMSFQEIKPQSHYNHGYGEPLGRKXHIDDYSXWDIVKAXQYGIYERCRELVEAGYDVRQPDKENVXLLHWAAINNRIDLVKYYISKGAIVDQLGGDLNSXPLHWAXRQGHLSMVVQLMKYGADP

SEQ ID NO: 30081 - protein, 632 aa, Homo sapiens
  MOD_RES (9)..(9): Selenocysteine
  MOD_RES (20)..(20): Selenocysteine
  MOD_RES (51)..(51): Selenocysteine
  MOD_RES (58)..(58): Selenocysteine
  MOD_RES (65)..(65): Selenocysteine
  MOD_RES (92)..(92): Selenocysteine
  MOD_RES (126)..(126): Selenocysteine
  MOD_RES (132)..(132): Selenocysteine
  MOD_RES (170)..(170): Selenocysteine
  MOD_RES (192)..(192): Selenocysteine
  MOD_RES (201)..(201): Selenocysteine
  MOD_RES (207)..(207): Selenocysteine
  MOD_RES (212)..(212): Selenocysteine
  MOD_RES (227)..(227): Selenocysteine
  MOD_RES (238)..(239): Selenocysteine
  MOD_RES (309)..(309): Selenocysteine
  MOD_RES (341)..(341): Selenocysteine
  MOD_RES (366)..(366): Selenocysteine
  MOD_RES (373)..(373): Selenocysteine
  MOD_RES (416)..(416): Selenocysteine
  MOD_RES (423)..(423): Selenocysteine
  MOD_RES (430)..(430): Selenocysteine
  MOD_RES (441)..(441): Selenocysteine
  MOD_RES (510)..(511): Selenocysteine
  MOD_RES (513)..(513): Selenocysteine
  MOD_RES (519)..(519): Selenocysteine
  MOD_RES (522)..(522): Selenocysteine
  MOD_RES (526)..(526): Selenocysteine
  MOD_RES (562)..(563): Selenocysteine
  MOD_RES (578)..(580): Selenocysteine
  MOD_RES (614)..(614): Selenocysteine
  MOD_RES (618)..(618): Selenocysteine
MQREEGFNXKMADGPDEYDXEAGCVPLLHPEEIKPQSHYNHGYGEPLGRKXHIDDYSXWDIVKAXQYGIYERCRELVEAGYDVRQPDKENVXLLHWAAINNRIDLVKYYISKGAIVDQLGGDLNSXPLHWAXRQGHLSMVVQLMKYGADPSLIDGEGCSCIHLAAQFGHXSIVAYLIAKGQDVDMMDQNGMXPLMWAAYRXHSVDPXRLLLXFNVSVNLGDKYHKNXALHWAVLAGNXXVISLLLEAGANVDAQNIKGESALDLAKQRKNVWMINHLQEARQAKGYDNPSFLRKLKADKEFRQKVMLGXPFLVIWLVGFIADLNIDSWLIKGLMYGGVWAXVQFLSKSFFDHSMHSALPLGIYLAXKFWMYVXWFFWFWNDLNFLFIHLPFLANSVALFYNFGKSWKSDPGIIKAXEEQKKKXIVELAEXGSLDLSIFCSXCLIRKPVRSKHCGVCNRCIAKFDHHCPWVGNCVGAGNHRYFMGYLFFLLFMICWMIYGCISYWGLHCEXXYXKDGFWXYIXQIAXCSPWMFWMFLNSVFHFMWVAVLLMCQMYQISCLGIXXNERMNARRYKHFKVXXXSIESPFNHGCVRNIIDFFEFRCCGLFRPVIVDWXRQYXIEYDQISGSGYQLV

SEQ ID NO: 30082 - protein, 35 aa, Homo sapiens
  MOD_RES (9)..(9): Selenocysteine
  MOD_RES (20)..(20): Selenocysteine
MQREEGFNXKMADGPDEYDXEAGCVPLLHPEIWNI

SEQ ID NO: 30083 - protein, 35 aa, Homo sapiens
  MOD_RES (2)..(2): Selenocysteine
  MOD_RES (13)..(13): Selenocysteine
NXKMADGPDEYDXEAGCVPLLHPEFEMELRSCCPG

SEQ ID NO: 30084 - protein, 28 aa, Homo sapiens
  MOD_RES (2)..(2): Selenocysteine
  MOD_RES (13)..(13): Selenocysteine
NXKMADGPDEYDXEAGCVPLLHPEIWNI

SEQ ID NO: 30085 - protein, 201 aa, Homo sapiens
  MOD_RES (1)..(1): Any amino acid
  MOD_RES (7)..(7): Selenocysteine
  MOD_RES (18)..(18): Selenocysteine
  MOD_RES (49)..(49): Selenocysteine
  MOD_RES (56)..(56): Selenocysteine
  MOD_RES (63)..(63): Selenocysteine
  MOD_RES (90)..(90): Selenocysteine
  MOD_RES (124)..(124): Selenocysteine
  MOD_RES (130)..(130): Selenocysteine
  MOD_RES (168)..(168): Selenocysteine
  MOD_RES (190)..(190): Selenocysteine
  MOD_RES (199)..(199): Selenocysteine
XEEGFNXKMADGPDEYDXEAGCVPLLHPEEIKPQSHYNHGYGEPLGRKXHIDDYSXWDIVKAXQYGIYERCRELVEAGYDVRQPDKENVXLLHWAAINNRIDLVKYYISKGAIVDQLGGDLNSXPLHWAXRQGHLSMVVQLMKYGADPSLIDGEGCSCIHLAAQFGHXSIVAYLIAKGQDVDMMDQNGMXPLMWAAYRXHS

SEQ ID NO: 30086 - protein, 44 aa, Homo sapiens
  MOD_RES (1)..(1): Any amino acid
  MOD_RES (4)..(4): Selenocysteine
  MOD_RES (15)..(15): Selenocysteine
XFNXKMADGPDEYDXEAGCVPLLHPENGLARCGPLHLGLLSLQN

SEQ ID NO: 30087 - protein, 155 aa, Homo sapiens
  MOD_RES (1)..(1): Any amino acid
  MOD_RES (6)..(6): Selenocysteine
  MOD_RES (33)..(33): Selenocysteine
  MOD_RES (67)..(67): Selenocysteine
  MOD_RES (73)..(73): Selenocysteine
  MOD_RES (111)..(111): Selenocysteine
  MOD_RES (129)..(129): Selenocysteine
  MOD_RES (146)..(146): Selenocysteine
XIVKAXQYGIYERCRELVEAGYDVRQPDKENVXLLHWAAINNRIDLVKYYISKGAIVDQLGGDLNSXPLHWAXRQGHLSMVVQLMKYGADPSLIDGEGCSCIHLAAQFGHXSIVAYLIAKGQDYFKKCXCILEMLSEVAEDIPDNXIKVNPEMDL

SEQ ID NO: 30088 - protein, 48 aa, Homo sapiens
  MOD_RES (1)..(1): Any amino acid
  MOD_RES (33)..(33): Selenocysteine
  MOD_RES (47)..(47): Selenocysteine
XSGLCAPSPPRDMEYMNAVENWWKQVMMYGNRXKKMLPSSIGLPSIXE

SEQ ID NO: 30089 - protein, 1057 aa, Homo sapiens
  MOD_RES (39)..(39): Selenocysteine
  MOD_RES (68)..(68): Selenocysteine
  MOD_RES (84)..(84): Selenocysteine
  MOD_RES (95)..(95): Selenocysteine
  MOD_RES (104)..(104): Selenocysteine
  MOD_RES (116)..(116): Selenocysteine
  MOD_RES (141)..(141): Selenocysteine
  MOD_RES (146)..(146): Selenocysteine
  MOD_RES (153)..(153): Selenocysteine
  MOD_RES (165)..(165): Selenocysteine
  MOD_RES (176)..(176): Selenocysteine
  MOD_RES (237)..(237): Selenocysteine
  MOD_RES (241)..(241): Selenocysteine
  MOD_RES (257)..(257): Selenocysteine
  MOD_RES (281)..(281): Selenocysteine
  MOD_RES (301)..(301): Selenocysteine
  MOD_RES (309)..(309): Selenocysteine
  MOD_RES (317)..(317): Selenocysteine
  MOD_RES (331)..(331): Selenocysteine
  MOD_RES (376)..(376): Selenocysteine
  MOD_RES (403)..(404): Selenocysteine
  MOD_RES (433)..(433): Selenocysteine
  MOD_RES (446)..(446): Selenocysteine
  MOD_RES (463)..(463): Selenocysteine
  MOD_RES (489)..(489): Selenocysteine
  MOD_RES (510)..(510): Selenocysteine
  MOD_RES (607)..(607): Selenocysteine
  MOD_RES (617)..(617): Selenocysteine
  MOD_RES (627)..(628): Selenocysteine
  MOD_RES (635)..(635): Selenocysteine
  MOD_RES (649)..(649): Selenocysteine
  MOD_RES (655)..(655): Selenocysteine
  MOD_RES (684)..(684): Selenocysteine
  MOD_RES (686)..(686): Selenocysteine
  MOD_RES (717)..(717): Selenocysteine
  MOD_RES (739)..(739): Selenocysteine
  MOD_RES (741)..(741): Selenocysteine
  MOD_RES (746)..(746): Selenocysteine
  MOD_RES (768)..(768): Selenocysteine
  MOD_RES (777)..(777): Selenocysteine
  MOD_RES (780)..(781): Selenocysteine
  MOD_RES (806)..(806): Selenocysteine
  MOD_RES (823)..(823): Selenocysteine
  MOD_RES (832)..(832): Selenocysteine
  MOD_RES (860)..(860): Selenocysteine
  MOD_RES (929)..(929): Selenocysteine
  MOD_RES (962)..(962): Selenocysteine
  MOD_RES (1022)..(1022): Selenocysteine
  MOD_RES (1054)..(1054): Selenocysteine
MADGPRCKRRKQANPRRNNGKEGQEILGPEAQADEAGCXVKDDECESDAENEQNHDPNVEEFLQQQDXAVIFPEAPEEDQRQGXPEASGHDENGXPDAFSQLLXCPYCDRGYKRFXSLKEHIKYRHEKNEDNFSCSLCSYXFAYRXQLERHMXSHKSGRDQRHVXQSGCNRKFKCXECGKAFKYKHHLKEHLRIHSGEKPYECPNCKKRFSHSGSYSSHISSKKCISLIPVNGRPRXGLKXSQCSSPSLSASPGSPXRPQIRQKIENKPLQEQLSVNQIKXEPVDYEFKPIVVASGINCSXPLQNGVFXGGGPLQAXSSPQGMVQAVVLPXVGLVSPISINLSDIQNVLKVAVDGNVIRQVLENNQANLASKEQEXINASPIQQGGHSVISAISLPLVDQDGXXKIIINYSLEQPSQLQVVPQNLKKENPVAXNSCKSEKLPEDLXVKSEKDKSFEGGVNDSXCLLCDDCPGDINALPELKHYDLKQPXQPPPLPAAEAEKPESSVSSAXGDGNLSPSQPPLKNLLSLLKAYYALNAQPSAEELSKIADSVNLPLDVVKKWFEKMQAGQISVQSSEPSSPEPGKVNIPAKNNDQPQSANANEPQDSXVNLQSPLKMXNSPVLPVGSXXNGSRSSXPSPSPLNLSSSRNXQGYLYXAEGAQEEPQVEPLDLSLPKQQGELLERSXIXSVYQNSVYSVQEEPLNLSCAKKEPQKDSCVXDSEPVVNVIPPSANPINIAIPXVXAQLPXIVAIADQNSVPCLRALAANKQXILIPQVAYXYSXXVSPAVQEPPLKVIQPNGNQDERQDXSSEGVSNVEDQNDSDSXPPKKKMRKXENGMYACDLCDKIFQKSSSLLRHKYEHXGKRPHECGICKKAFKHKHHLIEHMRLHSGEKPYQCDKCGKRFSHSGSYSQHMNHRYSYCKREAEERDSXEQEEAGPEILSNEHVGARASPSQGDSDERESLXREEDEDSEKEEEEEDKEMEELQEEKECEKPQGDEEEEEEEEEVEEEEVEEAENEGEEAKXEGLMKDDRAESQASSLGQKVGESSEQVSEEKXNEA

SEQ ID NO: 30090 - protein, 53 aa, Homo sapiens
  MOD_RES (49)..(49): Selenocysteine
  MOD_RES (53)..(53): Selenocysteine
MADGPRCKRRKQANPRRNNVFSLNSQLAIGRKLPSEDMIIQMSFCDLAXVCLX

SEQ ID NO: 30091 - protein, 1104 aa, Homo sapiens
  MOD_RES (21)..(21): Selenocysteine
  MOD_RES (25)..(25): Selenocysteine
  MOD_RES (29)..(29): Selenocysteine
  MOD_RES (48)..(48): Selenocysteine
  MOD_RES (63)..(63): Selenocysteine
  MOD_RES (66)..(66): Selenocysteine
  MOD_RES (115)..(115): Selenocysteine
  MOD_RES (131)..(131): Selenocysteine
  MOD_RES (142)..(142): Selenocysteine
  MOD_RES (151)..(151): Selenocysteine
  MOD_RES (163)..(163): Selenocysteine
  MOD_RES (188)..(188): Selenocysteine
  MOD_RES (193)..(193): Selenocysteine
  MOD_RES (200)..(200): Selenocysteine
  MOD_RES (212)..(212): Selenocysteine
  MOD_RES (223)..(223): Selenocysteine
  MOD_RES (284)..(284): Selenocysteine
  MOD_RES (288)..(288): Selenocysteine
  MOD_RES (304)..(304): Selenocysteine
  MOD_RES (328)..(328): Selenocysteine
  MOD_RES (348)..(348): Selenocysteine
  MOD_RES (356)..(356): Selenocysteine
  MOD_RES (364)..(364): Selenocysteine
  MOD_RES (378)..(378): Selenocysteine
  MOD_RES (423)..(423): Selenocysteine
  MOD_RES (450)..(451): Selenocysteine
  MOD_RES (480)..(480): Selenocysteine
  MOD_RES (493)..(493): Selenocysteine
  MOD_RES (510)..(510): Selenocysteine
  MOD_RES (536)..(536): Selenocysteine
  MOD_RES (557)..(557): Selenocysteine
  MOD_RES (654)..(654): Selenocysteine
  MOD_RES (664)..(664): Selenocysteine
  MOD_RES (674)..(675): Selenocysteine
  MOD_RES (682)..(682): Selenocysteine
  MOD_RES (696)..(696): Selenocysteine
  MOD_RES (702)..(702): Selenocysteine
  MOD_RES (731)..(731): Selenocysteine
  MOD_RES (733)..(733): Selenocysteine
  MOD_RES (764)..(764): Selenocysteine
  MOD_RES (786)..(786): Selenocysteine
  MOD_RES (788)..(788): Selenocysteine
  MOD_RES (793)..(793): Selenocysteine
  MOD_RES (815)..(815): Selenocysteine
  MOD_RES (824)..(824): Selenocysteine
  MOD_RES (827)..(828): Selenocysteine
  MOD_RES (853)..(853): Selenocysteine
  MOD_RES (870)..(870): Selenocysteine
  MOD_RES (879)..(879): Selenocysteine
  MOD_RES (907)..(907): Selenocysteine
  MOD_RES (976)..(976): Selenocysteine
  MOD_RES (1009)..(1009): Selenocysteine
  MOD_RES (1069)..(1069): Selenocysteine
  MOD_RES (1101)..(1101): Selenocysteine
MADGPRCKRRKQANPRRNNVXNYNXVVEXNSDSDDEDKLHIVEEESVXDAADCEGVPEDDLPXDQXVLPGRSSEREGNAKNCWEDDIKDDECESDAENEQNHDPNVEEFLQQQDXAVIFPEAPEEDQRQGXPEASGHDENGXPDAFSQLLXCPYCDRGYKRFXSLKEHIKYRHEKNEDNFSCSLCSYXFAYRXQLERHMXSHKSGRDQRHVXQSGCNRKFKCXECGKAFKYKHHLKEHLRIHSGEKPYECPNCKKRFSHSGSYSSHISSKKCISLIPVNGRPRXGLKXSQCSSPSLSASPGSPXRPQIRQKIENKPLQEQLSVNQIKXEPVDYEFKPIVVASGINCSXPLQNGVFXGGGPLQAXSSPQGMVQAVVLPXVGLVSPISINLSDIQNVLKVAVDGNVIRQVLENNQANLASKEQEXINASPIQQGGHSVISAISLPLVDQDGXXKIIINYSLEQPSQLQVVPQNLKKENPVAXNSCKSEKLPEDLXVKSEKDKSFEGGVNDSXCLLCDDCPGDINALPELKHYDLKQPXQPPPLPAAEAEKPESSVSSAXGDGNLSPSQPPLKNLLSLLKAYYALNAQPSAEELSKIADSVNLPLDVVKKWFEKMQAGQISVQSSEPSSPEPGKVNIPAKNNDQPQSANANEPQDSXVNLQSPLKMXNSPVLPVGSXXNGSRSSXPSPSPLNLSSSRNXQGYLYXAEGAQEEPQVEPLDLSLPKQQGELLERSXIXSVYQNSVYSVQEEPLNLSCAKKEPQKDSCVXDSEPVVNVIPPSANPINIAIPXVXAQLPXIVAIADQNSVPCLRALAANKQXILIPQVAYXYSXXVSPAVQEPPLKVIQPNGNQDERQDXSSEGVSNVEDQNDSDSXPPKKKMRKXENGMYACDLCDKIFQKSSSLLRHKYEHXGKRPHECGICKKAFKHKHHLIEHMRLHSGEKPYQCDKCGKRFSHSGSYSQHMNHRYSYCKREAEERDSXEQEEAGPEILSNEHVGARASPSQGDSDERESLXREEDEDSEKEEEEEDKEMEELQEEKECEKPQGDEEEEEEEEEVEEEEVEEAENEGEEAKXEGLMKDDRAESQASSLGQKVGESSEQVSEEKXNEA

SEQ ID NO: 30092 - protein, 1124 aa, Homo sapiens
  MOD_RES (21)..(21): Selenocysteine
  MOD_RES (25)..(25): Selenocysteine
  MOD_RES (29)..(29): Selenocysteine
  MOD_RES (48)..(48): Selenocysteine
  MOD_RES (63)..(63): Selenocysteine
  MOD_RES (66)..(66): Selenocysteine
  MOD_RES (106)..(106): Selenocysteine
  MOD_RES (135)..(135): Selenocysteine
  MOD_RES (151)..(151): Selenocysteine
  MOD_RES (162)..(162): Selenocysteine
  MOD_RES (171)..(171): Selenocysteine
  MOD_RES (183)..(183): Selenocysteine
  MOD_RES (208)..(208): Selenocysteine
  MOD_RES (213)..(213): Selenocysteine
  MOD_RES (220)..(220): Selenocysteine
  MOD_RES (232)..(232): Selenocysteine
  MOD_RES (243)..(243): Selenocysteine
  MOD_RES (304)..(304): Selenocysteine
  MOD_RES (308)..(308): Selenocysteine
  MOD_RES (324)..(324): Selenocysteine
  MOD_RES (348)..(348): Selenocysteine
  MOD_RES (368)..(368): Selenocysteine
  MOD_RES (376)..(376): Selenocysteine
  MOD_RES (384)..(384): Selenocysteine
  MOD_RES (398)..(398): Selenocysteine
  MOD_RES (443)..(443): Selenocysteine
  MOD_RES (470)..(471): Selenocysteine
  MOD_RES (500)..(500): Selenocysteine
  MOD_RES (513)..(513): Selenocysteine
  MOD_RES (530)..(530): Selenocysteine
  MOD_RES (556)..(556): Selenocysteine
  MOD_RES (577)..(577): Selenocysteine
  MOD_RES (674)..(674): Selenocysteine
  MOD_RES (684)..(684): Selenocysteine
  MOD_RES (694)..(695): Selenocysteine
  MOD_RES (702)..(702): Selenocysteine
  MOD_RES (716)..(716): Selenocysteine
  MOD_RES (722)..(722): Selenocysteine
  MOD_RES (751)..(751): Selenocysteine
  MOD_RES (753)..(753): Selenocysteine
  MOD_RES (784)..(784): Selenocysteine
  MOD_RES (806)..(806): Selenocysteine
  MOD_RES (808)..(808): Selenocysteine
  MOD_RES (813)..(813): Selenocysteine
  MOD_RES (835)..(835): Selenocysteine
  MOD_RES (844)..(844): Selenocysteine
  MOD_RES (847)..(848): Selenocysteine
  MOD_RES (873)..(873): Selenocysteine
  MOD_RES (890)..(890): Selenocysteine
  MOD_RES (899)..(899): Selenocysteine
  MOD_RES (927)..(927): Selenocysteine
  MOD_RES (996)..(996): Selenocysteine
  MOD_RES (1029)..(1029): Selenocysteine
  MOD_RES (1089)..(1089): Selenocysteine
  MOD_RES (1121)..(1121): Selenocysteine
MADGPRCKRRKQANPRRNNVXNYNXVVEXNSDSDDEDKLHIVEEESVXDAADCEGVPEDDLPXDQXVLPGRSSEREGNAKNCWEDDRKEGQEILGPEAQADEAGCXVKDDECESDAENEQNHDPNVEEFLQQQDXAVIFPEAPEEDQRQGXPEASGHDENGXPDAFSQLLXCPYCDRGYKRFXSLKEHIKYRHEKNEDNFSCSLCSYXFAYRXQLERHMXSHKSGRDQRHVXQSGCNRKFKCXECGKAFKYKHHLKEHLRIHSGEKPYECPNCKKRFSHSGSYSSHISSKKCISLIPVNGRPRXGLKXSQCSSPSLSASPGSPXRPQIRQKIENKPLQEQLSVNQIKXEPVDYEFKPIVVASGINCSXPLQNGVFXGGGPLQAXSSPQGMVQAVVLPXVGLVSPISINLSDIQNVLKVAVDGNVIRQVLENNQANLASKEQEXINASPIQQGGHSVISAISLPLVDQDGXXKIIINYSLEQPSQLQVVPQNLKKENPVAXNSCKSEKLPEDLXVKSEKDKSFEGGVNDSXCLLCDDCPGDINALPELKHYDLKQPXQPPPLPAAEAEKPESSVSSAXGDGNLSPSQPPLKNLLSLLKAYYALNAQPSAEELSKIADSVNLPLDVVKKWFEKMQAGQISVQSSEPSSPEPGKVNIPAKNNDQPQSANANEPQDSXVNLQSPLKMXNSPVLPVGSXXNGSRSSXPSPSPLNLSSSRNXQGYLYXAEGAQEEPQVEPLDLSLPKQQGELLERSXIXSVYQNSVYSVQEEPLNLSCAKKEPQKDSCVXDSEPVVNVIPPSANPINIAIPXVXAQLPXIVAIADQNSVPCLRALAANKQXILIPQVAYXYSXXVSPAVQEPPLKVIQPNGNQDERQDXSSEGVSNVEDQNDSDSXPPKKKMRKXENGMYACDLCDKIFQKSSSLLRHKYEHXGKRPHECGICKKAFKHKHHLIEHMRLHSGEKPYQCDKCGKRFSHSGSYSQHMNHRYSYCKREAEERDSXEQEEAGPEILSNEHVGARASPSQGDSDERESLXREEDEDSEKEEEEEDKEMEELQEEKECEKPQGDEEEEEEEEEVEEEEVEEAENEGEEAKXEGLMKDDRAESQASSLGQKVGESSEQVSEEKXNEA

SEQ ID NO: 30093 - protein, 288 aa, Homo sapiens
  MOD_RES (21)..(21): Selenocysteine
  MOD_RES (25)..(25): Selenocysteine
  MOD_RES (29)..(29): Selenocysteine
  MOD_RES (48)..(48): Selenocysteine
  MOD_RES (63)..(63): Selenocysteine
  MOD_RES (66)..(66): Selenocysteine
  MOD_RES (88)..(88): Selenocysteine
  MOD_RES (97)..(97): Selenocysteine
  MOD_RES (109)..(109): Selenocysteine
  MOD_RES (134)..(134): Selenocysteine
  MOD_RES (139)..(139): Selenocysteine
  MOD_RES (146)..(146): Selenocysteine
  MOD_RES (158)..(158): Selenocysteine
  MOD_RES (169)..(169): Selenocysteine
  MOD_RES (230)..(230): Selenocysteine
  MOD_RES (234)..(234): Selenocysteine
  MOD_RES (250)..(250): Selenocysteine
  MOD_RES (274)..(274): Selenocysteine
MADGPRCKRRKQANPRRNNVXNYNXVVEXNSDSDDEDKLHIVEEESVXDAADCEGVPEDDLPXDQXVLPGRSSEREGNAKNCWEDDRXPDAFSQLLXCPYCDRGYKRFXSLKEHIKYRHEKNEDNFSCSLCSYXFAYRXQLERHMXSHKSGRDQRHVXQSGCNRKFKCXECGKAFKYKHHLKEHLRIHSGEKPYECPNCKKRFSHSGSYSSHISSKKCISLIPVNGRPRXGLKXSQCSSPSLSASPGSPXRPQIRQKIENKPLQEQLSVNQIKXEPVDYEFKPIVVAS

SEQ ID NO: 30094 - protein, 289 aa, Homo sapiens
  MOD_RES (21)..(21): Selenocysteine
  MOD_RES (25)..(25): Selenocysteine
  MOD_RES (29)..(29): Selenocysteine
  MOD_RES (48)..(48): Selenocysteine
  MOD_RES (63)..(63): Selenocysteine
  MOD_RES (66)..(66): Selenocysteine
  MOD_RES (87)..(87): Selenocysteine
  MOD_RES (107)..(107): Selenocysteine
  MOD_RES (136)..(136): Selenocysteine
  MOD_RES (152)..(152): Selenocysteine
  MOD_RES (163)..(163): Selenocysteine
  MOD_RES (172)..(172): Selenocysteine
  MOD_RES (184)..(184): Selenocysteine
  MOD_RES (209)..(209): Selenocysteine
  MOD_RES (214)..(214): Selenocysteine
  MOD_RES (221)..(221): Selenocysteine
  MOD_RES (233)..(233): Selenocysteine
  MOD_RES (244)..(244): Selenocysteine
MADGPRCKRRKQANPRRNNVXNYNXVVEXNSDSDDEDKLHIVEEESVXDAADCEGVPEDDLPXDQXVLPGRSSEREGNAKNCWEDDXGKEGQEILGPEAQADEAGCXVKDDECESDAENEQNHDPNVEEFLQQQDXAVIFPEAPEEDQRQGXPEASGHDENGXPDAFSQLLXCPYCDRGYKRFXSLKEHIKYRHEKNEDNFSCSLCSYXFAYRXQLERHMXSHKSGRDQRHVXQSGCNRKFKCXECGKAFKYKHHLKEHLRIHSGEKPYECPNCKKRFSHSGSYSSHIS

SEQ ID NO: 30095 - protein, 1125 aa, Homo sapiens
  MOD_RES (21)..(21): Selenocysteine
  MOD_RES (25)..(25): Selenocysteine
  MOD_RES (29)..(29): Selenocysteine
  MOD_RES (48)..(48): Selenocysteine
  MOD_RES (63)..(63): Selenocysteine
  MOD_RES (66)..(66): Selenocysteine
  MOD_RES (87)..(87): Selenocysteine
  MOD_RES (107)..(107): Selenocysteine
  MOD_RES (136)..(136): Selenocysteine
  MOD_RES (152)..(152): Selenocysteine
  MOD_RES (163)..(163): Selenocysteine
  MOD_RES (172)..(172): Selenocysteine
  MOD_RES (184)..(184): Selenocysteine
  MOD_RES (209)..(209): Selenocysteine
  MOD_RES (214)..(214): Selenocysteine
  MOD_RES (221)..(221): Selenocysteine
  MOD_RES (233)..(233): Selenocysteine
  MOD_RES (244)..(244): Selenocysteine
  MOD_RES (305)..(305): Selenocysteine
  MOD_RES (309)..(309): Selenocysteine
  MOD_RES (325)..(325): Selenocysteine
  MOD_RES (349)..(349): Selenocysteine
  MOD_RES (369)..(369): Selenocysteine
  MOD_RES (377)..(377): Selenocysteine
  MOD_RES (385)..(385): Selenocysteine
  MOD_RES (399)..(399): Selenocysteine
  MOD_RES (444)..(444): Selenocysteine
  MOD_RES (471)..(472): Selenocysteine
  MOD_RES (501)..(501): Selenocysteine
  MOD_RES (514)..(514): Selenocysteine
  MOD_RES (531)..(531): Selenocysteine
  MOD_RES (557)..(557): Selenocysteine
  MOD_RES (578)..(578): Selenocysteine
  MOD_RES (675)..(675): Selenocysteine
  MOD_RES (685)..(685): Selenocysteine
  MOD_RES (695)..(696): Selenocysteine
  MOD_RES (703)..(703): Selenocysteine
  MOD_RES (717)..(717): Selenocysteine
  MOD_RES (723)..(723): Selenocysteine
  MOD_RES (752)..(752): Selenocysteine
  MOD_RES (754)..(754): Selenocysteine
  MOD_RES (785)..(785): Selenocysteine
  MOD_RES (807)..(807): Selenocysteine
  MOD_RES (809)..(809): Selenocysteine
  MOD_RES (814)..(814): Selenocysteine
  MOD_RES (836)..(836): Selenocysteine
  MOD_RES (845)..(845): Selenocysteine
  MOD_RES (848)..(849): Selenocysteine
  MOD_RES (874)..(874): Selenocysteine
  MOD_RES (891)..(891): Selenocysteine
  MOD_RES (900)..(900): Selenocysteine
  MOD_RES (928)..(928): Selenocysteine
  MOD_RES (997)..(997): Selenocysteine
  MOD_RES (1030)..(1030): Selenocysteine
  MOD_RES (1090)..(1090): Selenocysteine
  MOD_RES (1122)..(1122): Selenocysteine
MADGPRCKRRKQANPRRNNVXNYNXVVEXNSDSDDEDKLHIVEEESVXDAADCEGVPEDDLPXDQXVLPGRSSEREGNAKNCWEDDXGKEGQEILGPEAQADEAGCXVKDDECESDAENEQNHDPNVEEFLQQQDXAVIFPEAPEEDQRQGXPEASGHDENGXPDAFSQLLXCPYCDRGYKRFXSLKEHIKYRHEKNEDNFSCSLCSYXFAYRXQLERHMXSHKSGRDQRHVXQSGCNRKFKCXECGKAFKYKHHLKEHLRIHSGEKPYECPNCKKRFSHSGSYSSHISSKKCISLIPVNGRPRXGLKXSQCSSPSLSASPGSPXRPQIRQKIENKPLQEQLSVNQIKXEPVDYEFKPIVVASGINCSXPLQNGVFXGGGPLQAXSSPQGMVQAVVLPXVGLVSPISINLSDIQNVLKVAVDGNVIRQVLENNQANLASKEQEXINASPIQQGGHSVISAISLPLVDQDGXXKIIINYSLEQPSQLQVVPQNLKKENPVAXNSCKSEKLPEDLXVKSEKDKSFEGGVNDSXCLLCDDCPGDINALPELKHYDLKQPXQPPPLPAAEAEKPESSVSSAXGDGNLSPSQPPLKNLLSLLKAYYALNAQPSAEELSKIADSVNLPLDVVKKWFEKMQAGQISVQSSEPSSPEPGKVNIPAKNNDQPQSANANEPQDSXVNLQSPLKMXNSPVLPVGSXXNGSRSSXPSPSPLNLSSSRNXQGYLYXAEGAQEEPQVEPLDLSLPKQQGELLERSXIXSVYQNSVYSVQEEPLNLSCAKKEPQKDSCVXDSEPVVNVIPPSANPINIAIPXVXAQLPXIVAIADQNSVPCLRALAANKQXILIPQVAYXYSXXVSPAVQEPPLKVIQPNGNQDERQDXSSEGVSNVEDQNDSDSXPPKKKMRKXENGMYACDLCDKIFQKSSSLLRHKYEHXGKRPHECGICKKAFKHKHHLIEHMRLHSGEKPYQCDKCGKRFSHSGSYSQHMNHRYSYCKREAEERDSXEQEEAGPEILSNEHVGARASPSQGDSDERESLXREEDEDSEKEEEEEDKEMEELQEEKECEKPQGDEEEEEEEEEVEEEEVEEAENEGEEAKXEGLMKDDRAESQASSLGQKVGESSEQVSEEKXNEA

SEQ ID NO: 30096 - protein, 277 aa, Homo sapiens
  MOD_RES (4)..(4): Selenocysteine
  MOD_RES (8)..(8): Selenocysteine
  MOD_RES (12)..(12): Selenocysteine
  MOD_RES (31)..(31): Selenocysteine
  MOD_RES (46)..(46): Selenocysteine
  MOD_RES (49)..(49): Selenocysteine
  MOD_RES (70)..(70): Selenocysteine
  MOD_RES (90)..(90): Selenocysteine
  MOD_RES (119)..(119): Selenocysteine
  MOD_RES (135)..(135): Selenocysteine
  MOD_RES (146)..(146): Selenocysteine
  MOD_RES (155)..(155): Selenocysteine
  MOD_RES (167)..(167): Selenocysteine
  MOD_RES (192)..(192): Selenocysteine
  MOD_RES (197)..(197): Selenocysteine
  MOD_RES (204)..(204): Selenocysteine
  MOD_RES (216)..(216): Selenocysteine
  MOD_RES (227)..(227): Selenocysteine
MKVXNYNXVVEXNSDSDDEDKLHIVEEESVXDAADCEGVPEDDLPXDQXVLPGRSSEREGNAKNCWEDDXGKEGQEILGPEAQADEAGCXVKDDECESDAENEQNHDPNVEEFLQQQDXAVIFPEAPEEDQRQGXPEASGHDENGXPDAFSQLLXCPYCDRGYKRFXSLKEHIKYRHEKNEDNFSCSLCSYXFAYRXQLERHMXSHKSGRDQRHVXQSGCNRKFKCXECGKAFKYKHHLKEHLRIHSGEKPYECPNCKKRFSHSGSYSSHISSKKCI

SEQ ID NO: 30097 - protein, 1108 aa, Homo sapiens
  MOD_RES (4)..(4): Selenocysteine
  MOD_RES (8)..(8): Selenocysteine
  MOD_RES (12)..(12): Selenocysteine
  MOD_RES (31)..(31): Selenocysteine
  MOD_RES (46)..(46): Selenocysteine
  MOD_RES (49)..(49): Selenocysteine
  MOD_RES (70)..(70): Selenocysteine
  MOD_RES (90)..(90): Selenocysteine
  MOD_RES (119)..(119): Selenocysteine
  MOD_RES (135)..(135): Selenocysteine
  MOD_RES (146)..(146): Selenocysteine
  MOD_RES (155)..(155): Selenocysteine
  MOD_RES (167)..(167): Selenocysteine
  MOD_RES (192)..(192): Selenocysteine
  MOD_RES (197)..(197): Selenocysteine
  MOD_RES (204)..(204): Selenocysteine
  MOD_RES (216)..(216): Selenocysteine
  MOD_RES (227)..(227): Selenocysteine
  MOD_RES (288)..(288): Selenocysteine
  MOD_RES (292)..(292): Selenocysteine
  MOD_RES (308)..(308): Selenocysteine
  MOD_RES (332)..(332): Selenocysteine
  MOD_RES (352)..(352): Selenocysteine
  MOD_RES (360)..(360): Selenocysteine
  MOD_RES (368)..(368): Selenocysteine
  MOD_RES (382)..(382): Selenocysteine
  MOD_RES (427)..(427): Selenocysteine
  MOD_RES (454)..(455): Selenocysteine
  MOD_RES (484)..(484): Selenocysteine
  MOD_RES (497)..(497): Selenocysteine
  MOD_RES (514)..(514): Selenocysteine
  MOD_RES (540)..(540): Selenocysteine
  MOD_RES (561)..(561): Selenocysteine
  MOD_RES (658)..(658): Selenocysteine
  MOD_RES (668)..(668): Selenocysteine
  MOD_RES (678)..(679): Selenocysteine
  MOD_RES (686)..(686): Selenocysteine
  MOD_RES (700)..(700): Selenocysteine
  MOD_RES (706)..(706): Selenocysteine
  MOD_RES (735)..(735): Selenocysteine
  MOD_RES (737)..(737): Selenocysteine
  MOD_RES (768)..(768): Selenocysteine
  MOD_RES (790)..(790): Selenocysteine
  MOD_RES (792)..(792): Selenocysteine
  MOD_RES (797)..(797): Selenocysteine
  MOD_RES (819)..(819): Selenocysteine
  MOD_RES (828)..(828): Selenocysteine
  MOD_RES (831)..(832): Selenocysteine
  MOD_RES (857)..(857): Selenocysteine
  MOD_RES (874)..(874): Selenocysteine
  MOD_RES (883)..(883): Selenocysteine
  MOD_RES (911)..(911): Selenocysteine
  MOD_RES (980)..(980): Selenocysteine
  MOD_RES (1013)..(1013): Selenocysteine
  MOD_RES (1073)..(1073): Selenocysteine
  MOD_RES (1105)..(1105): Selenocysteine
MKVXNYNXVVEXNSDSDDEDKLHIVEEESVXDAADCEGVPEDDLPXDQXVLPGRSSEREGNAKNCWEDDXGKEGQEILGPEAQADEAGCXVKDDECESDAENEQNHDPNVEEFLQQQDXAVIFPEAPEEDQRQGXPEASGHDENGXPDAFSQLLXCPYCDRGYKRFXSLKEHIKYRHEKNEDNFSCSLCSYXFAYRXQLERHMXSHKSGRDQRHVXQSGCNRKFKCXECGKAFKYKHHLKEHLRIHSGEKPYECPNCKKRFSHSGSYSSHISSKKCISLIPVNGRPRXGLKXSQCSSPSLSASPGSPXRPQIRQKIENKPLQEQLSVNQIKXEPVDYEFKPIVVASGINCSXPLQNGVFXGGGPLQAXSSPQGMVQAVVLPXVGLVSPISINLSDIQNVLKVAVDGNVIRQVLENNQANLASKEQEXINASPIQQGGHSVISAISLPLVDQDGXXKIIINYSLEQPSQLQVVPQNLKKENPVAXNSCKSEKLPEDLXVKSEKDKSFEGGVNDSXCLLCDDCPGDINALPELKHYDLKQPXQPPPLPAAEAEKPESSVSSAXGDGNLSPSQPPLKNLLSLLKAYYALNAQPSAEELSKIADSVNLPLDVVKKWFEKMQAGQISVQSSEPSSPEPGKVNIPAKNNDQPQSANANEPQDSXVNLQSPLKMXNSPVLPVGSXXNGSRSSXPSPSPLNLSSSRNXQGYLYXAEGAQEEPQVEPLDLSLPKQQGELLERSXIXSVYQNSVYSVQEEPLNLSCAKKEPQKDSCVXDSEPVVNVIPPSANPINIAIPXVXAQLPXIVAIADQNSVPCLRALAANKQXILIPQVAYXYSXXVSPAVQEPPLKVIQPNGNQDERQDXSSEGVSNVEDQNDSDSXPPKKKMRKXENGMYACDLCDKIFQKSSSLLRHKYEHXGKRPHECGICKKAFKHKHHLIEHMRLHSGEKPYQCDKCGKRFSHSGSYSQHMNHRYSYCKREAEERDSXEQEEAGPEILSNEHVGARASPSQGDSDERESLXREEDEDSEKEEEEEDKEMEELQEEKECEKPQGDEEEEEEEEEVEEEEVEEAENEGEEAKXEGLMKDDRAESQASSLGQKVGESSEQVSEEKXNEA

SEQ ID NO: 30098 - protein, 274 aa, Homo sapiens
  MOD_RES (2)..(2): Selenocysteine
  MOD_RES (14)..(14): Selenocysteine
  MOD_RES (25)..(25): Selenocysteine
  MOD_RES (86)..(86): Selenocysteine
  MOD_RES (90)..(90): Selenocysteine
  MOD_RES (106)..(106): Selenocysteine
  MOD_RES (130)..(130): Selenocysteine
  MOD_RES (150)..(150): Selenocysteine
  MOD_RES (158)..(158): Selenocysteine
  MOD_RES (166)..(166): Selenocysteine
  MOD_RES (180)..(180): Selenocysteine
  MOD_RES (225)..(225): Selenocysteine
  MOD_RES (252)..(253): Selenocysteine
MXSHKSGRDQRHVXQSGCNRKFKCXECGKAFKYKHHLKEHLRIHSGEKPYECPNCKKRFSHSGSYSSHISSKKCISLIPVNGRPRXGLKXSQCSSPSLSASPGSPXRPQIRQKIENKPLQEQLSVNQIKXEPVDYEFKPIVVASGINCSXPLQNGVFXGGGPLQAXSSPQGMVQAVVLPXVGLVSPISINLSDIQNVLKVAVDGNVIRQVLENNQANLASKEQEXINASPIQQGGHSVISAISLPLVDQDGXXKIIINYSLEQPSQLQVVPQNL

SEQ ID NO: 30099 - protein, 423 aa, Homo sapiens
  MOD_RES (29)..(29): Selenocysteine
  MOD_RES (33)..(33): Selenocysteine
  MOD_RES (55)..(55): Selenocysteine
  MOD_RES (114)..(114): Selenocysteine
  MOD_RES (120)..(120): Selenocysteine
  MOD_RES (123)..(123): Selenocysteine
  MOD_RES (129)..(129): Selenocysteine
  MOD_RES (136)..(136): Selenocysteine
  MOD_RES (167)..(167): Selenocysteine
  MOD_RES (183)..(183): Selenocysteine
  MOD_RES (198)..(198): Selenocysteine
  MOD_RES (207)..(207): Selenocysteine
  MOD_RES (219)..(219): Selenocysteine
  MOD_RES (244)..(244): Selenocysteine
  MOD_RES (249)..(249): Selenocysteine
  MOD_RES (257)..(257): Selenocysteine
  MOD_RES (262)..(262): Selenocysteine
  MOD_RES (269)..(269): Selenocysteine
  MOD_RES (280)..(280): Selenocysteine
  MOD_RES (345)..(345): Selenocysteine
  MOD_RES (357)..(357): Selenocysteine
  MOD_RES (362)..(362): Selenocysteine
  MOD_RES (380)..(380): Selenocysteine
  MOD_RES (412)..(412): Selenocysteine
MADGPRCKRRKQANPRRKNVVNYDNVVDXGSEXDEEDKLHIAEDDGIANPLDQEXSPASVPNHESSPHVSQALLPREEEEDEIREGGVEHPWHNNEILQASVDGPEEMKEDYDXMGPEAXIQXAINNGXVKNANCXSDFEEYFAKRKLEERDGHAVSIEEYLQRSDXAIIYPEAPEELSRLGXPEANGQEENDLPPGXPDAFAQLLXCPYCDRGYKRLXSLKEHIKYRHEKNEENFSCPLCSYXFAYRXQLERHMVXHKPGXDQHQMLXQGAGNRKFKCXECGKAFKYKHHLKEHLRIHSGEKPYECPNCKKRFSHSGSYSSHISSKKCIGLISVNGRMRNNIKXGSSPNSVSSSPXNSAIXQLRNKLENGKPLSMSEQXGLLKNSRRQWLMPVIPALWEANEGGSGQEFEXSLANMVKHHLS

SEQ ID NO: 30100 - protein, 467 aa, Homo sapiens
  MOD_RES (62)..(62): Selenocysteine
  MOD_RES (66)..(66): Selenocysteine
  MOD_RES (88)..(88): Selenocysteine
  MOD_RES (147)..(147): Selenocysteine
  MOD_RES (153)..(153): Selenocysteine
  MOD_RES (156)..(156): Selenocysteine
  MOD_RES (162)..(162): Selenocysteine
  MOD_RES (169)..(169): Selenocysteine
  MOD_RES (200)..(200): Selenocysteine
  MOD_RES (216)..(216): Selenocysteine
  MOD_RES (231)..(231): Selenocysteine
  MOD_RES (240)..(240): Selenocysteine
  MOD_RES (252)..(252): Selenocysteine
  MOD_RES (277)..(277): Selenocysteine
  MOD_RES (282)..(282): Selenocysteine
  MOD_RES (290)..(290): Selenocysteine
  MOD_RES (295)..(295): Selenocysteine
  MOD_RES (302)..(302): Selenocysteine
  MOD_RES (313)..(313): Selenocysteine
  MOD_RES (378)..(378): Selenocysteine
  MOD_RES (390)..(390): Selenocysteine
  MOD_RES (395)..(395): Selenocysteine
  MOD_RES (413)..(413): Selenocysteine
  MOD_RES (420)..(420): Selenocysteine
  MOD_RES (434)..(434): Selenocysteine
  MOD_RES (440)..(440): Selenocysteine
  MOD_RES (451)..(451): Selenocysteine
MCVSEIEPACCRSRAPSPCELPSDPLLSMKQPIMADGPRCKRRKQANPRRKNVVNYDNVVDXGSEXDEEDKLHIAEDDGIANPLDQEXSPASVPNHESSPHVSQALLPREEEEDEIREGGVEHPWHNNEILQASVDGPEEMKEDYDXMGPEAXIQXAINNGXVKNANCXSDFEEYFAKRKLEERDGHAVSIEEYLQRSDXAIIYPEAPEELSRLGXPEANGQEENDLPPGXPDAFAQLLXCPYCDRGYKRLXSLKEHIKYRHEKNEENFSCPLCSYXFAYRXQLERHMVXHKPGXDQHQMLXQGAGNRKFKCXECGKAFKYKHHLKEHLRIHSGEKPYECPNCKKRFSHSGSYSSHISSKKCIGLISVNGRMRNNIKXGSSPNSVSSSPXNSAIXQLRNKLENGKPLSMSEQXGLLKIKXEPLDFNDYKVLMAXHGFSGXSPFMNGGLGAXSPLGVHPSAQSPMQHL

SEQ ID NO: 30101 - protein, 1102 aa, Homo sapiens
  MOD_RES (7)..(7): Selenocysteine
  MOD_RES (13)..(13): Selenocysteine
  MOD_RES (16)..(16): Selenocysteine
  MOD_RES (22)..(22): Selenocysteine
  MOD_RES (29)..(29): Selenocysteine
  MOD_RES (60)..(60): Selenocysteine
  MOD_RES (76)..(76): Selenocysteine
  MOD_RES (91)..(91): Selenocysteine
  MOD_RES (100)..(100): Selenocysteine
  MOD_RES (112)..(112): Selenocysteine
  MOD_RES (137)..(137): Selenocysteine
  MOD_RES (142)..(142): Selenocysteine
  MOD_RES (150)..(150): Selenocysteine
  MOD_RES (155)..(155): Selenocysteine
  MOD_RES (162)..(162): Selenocysteine
  MOD_RES (173)..(173): Selenocysteine
  MOD_RES (238)..(238): Selenocysteine
  MOD_RES (250)..(250): Selenocysteine
  MOD_RES (255)..(255): Selenocysteine
  MOD_RES (273)..(273): Selenocysteine
  MOD_RES (280)..(280): Selenocysteine
  MOD_RES (294)..(294): Selenocysteine
  MOD_RES (300)..(300): Selenocysteine
  MOD_RES (311)..(311): Selenocysteine
  MOD_RES (340)..(340): Selenocysteine
  MOD_RES (358)..(358): Selenocysteine
  MOD_RES (392)..(392): Selenocysteine
  MOD_RES (410)..(410): Selenocysteine
  MOD_RES (417)..(417): Selenocysteine
  MOD_RES (432)..(433): Selenocysteine
  MOD_RES (449)..(449): Selenocysteine
  MOD_RES (455)..(455): Selenocysteine
  MOD_RES (467)..(467): Selenocysteine
  MOD_RES (534)..(534): Selenocysteine
  MOD_RES (611)..(611): Selenocysteine
  MOD_RES (628)..(628): Selenocysteine
  MOD_RES (640)..(640): Selenocysteine
  MOD_RES (649)..(649): Selenocysteine
  MOD_RES (655)..(655): Selenocysteine
  MOD_RES (670)..(670): Selenocysteine
  MOD_RES (679)..(679): Selenocysteine
  MOD_RES (690)..(690): Selenocysteine
  MOD_RES (721)..(721): Selenocysteine
  MOD_RES (725)..(725): Selenocysteine
  MOD_RES (751)..(751): Selenocysteine
  MOD_RES (768)..(768): Selenocysteine
  MOD_RES (784)..(784): Selenocysteine
  MOD_RES (796)..(796): Selenocysteine
  MOD_RES (803)..(803): Selenocysteine
  MOD_RES (826)..(826): Selenocysteine
  MOD_RES (829)..(829): Selenocysteine
  MOD_RES (833)..(833): Selenocysteine
  MOD_RES (868)..(868): Selenocysteine
  MOD_RES (882)..(882): Selenocysteine
  MOD_RES (895)..(895): Selenocysteine
  MOD_RES (910)..(910): Selenocysteine
  MOD_RES (992)..(992): Selenocysteine
  MOD_RES (1005)..(1005): Selenocysteine
  MOD_RES (1062)..(1062): Selenocysteine
  MOD_RES (1066)..(1066): Selenocysteine
  MOD_RES (1073)..(1073): Selenocysteine
  MOD_RES (1089)..(1089): Selenocysteine
MKEDYDXMGPEAXIQXAINNGXVKNANCXSDFEEYFAKRKLEERDGHAVSIEEYLQRSDXAIIYPEAPEELSRLGXPEANGQEENDLPPGXPDAFAQLLXCPYCDRGYKRLXSLKEHIKYRHEKNEENFSCPLCSYXFAYRXQLERHMVXHKPGXDQHQMLXQGAGNRKFKCXECGKAFKYKHHLKEHLRIHSGEKPYECPNCKKRFSHSGSYSSHISSKKCIGLISVNGRMRNNIKXGSSPNSVSSSPXNSAIXQLRNKLENGKPLSMSEQXGLLKIKXEPLDFNDYKVLMAXHGFSGXSPFMNGGLGAXSPLGVHPSAQSPMQHLGVGMEAPLLGFPXMNSNLSEVQKVLQIVDNXVSRQKMDCKAEEISKLKGYHMKDPCSQPEEQGVXSPNIPPVGLPVVSHNGAXKSIIDYXLEKVNEAKACLQSLXXDSRRQISNIKKEKLRXLIDLVXDDKMIENHNISXPFSCQFCKESFPGPIPLHQHERYLCKMNEEIKAVLQPHENIVPNKAGVFVDNKALLLSSVLSEKGMXSPINPYKDHMSVLKAYYAMNMEPNSDELLKISIAVGLPQEFVKEWFEQRKVYQYSNSRSPSLERSSKPLAPNSNPPXKDSLLPRSPVKPMDSIXSPSIAELHNSVXNCDPPLRLXKPSHFXNIKPVEKLDHSRSNXPSPLNLSSXSSKNSHSSSYXPNSFSSEELQAEPLDLSLPKQMKEPKSIIAXKNKXKASSISLDHNSVSSSSENSDEPLNLXFIKKEFSNSNNLDNKSXNPVFSMNPFSAKPLYXALPPQSAFPPAXFMPPVQXSIPGLRPYPGLDQMSFLPHMAYXYPXGAAXFADMQQRRKYQRKQGFQGELLDGAQDYMSGLDDMXDSDSCLSRKKIKKXESGMYACDLCDKXFQKSSSLLRHKYEHXGKRPHQCQICKKAFKHKHHLIEHSRLHSGEKPYQCDKCGKRFSHSGSYSQHMNHRYSYCKREAEEREAAEREAREKGHLEPXELLMNRAYLQSIXPQGYSDSEERESMPRDGESEKEHEKEGEDGYGKLGRQDGDEEFEEEEEESENKSMDXDPEXIRDEEEXGDHSMDDSSEDGKMEXKSDHEEDNMEDGM

SEQ ID NO: 30102 - protein, 41 aa, Homo sapiens
  MOD_RES (27)..(27): Selenocysteine
  MOD_RES (37)..(37): Selenocysteine
MKQPIMADGPRCKRRKQANPRRKNAKXNHLNREINSXSVQH

SEQ ID NO: 30103 - protein, 58 aa, Homo sapiens
  MOD_RES (32)..(32): Selenocysteine
  MOD_RES (50)..(50): Selenocysteine
MKQPIMADGPRCKRRKQANPRRKNALESEMSXRSGRCPAAACHRCGPFVXCKVCCFCP

SEQ ID NO: 30104 - protein, 41 aa, Homo sapiens
  MOD_RES (35)..(36): Selenocysteine
MKQPIMADGPRCKRRKQANPRRKNGSSRLSEKAWXXCLSQH

SEQ ID NO: 30105 - protein, 36 aa, Homo sapiens
  MOD_RES (27)..(27): Selenocysteine
MKQPIMADGPRCKRRKQANPRRKNVSXWSGGARYPG

SEQ ID NO: 30106 - protein, 39 aa, Homo sapiens
  MOD_RES (34)..(34): Selenocysteine
  MOD_RES (38)..(38): Selenocysteine
MKQPIMADGPRCKRRKQANPRRKNVVNYDNVVDXGSEXD

SEQ ID NO: 30107 - protein, 63 aa, Homo sapiens
  MOD_RES (34)..(34): Selenocysteine
  MOD_RES (38)..(38): Selenocysteine
  MOD_RES (60)..(60): Selenocysteine
MKQPIMADGPRCKRRKQANPRRKNVVNYDNVVDXGSEXDEEDKLHIAEDDGIANPLDQEXSPA

SEQ ID NO: 30108 - protein, 91 aa, Homo sapiens
  MOD_RES (34)..(34): Selenocysteine
  MOD_RES (38)..(38): Selenocysteine
  MOD_RES (60)..(60): Selenocysteine
MKQPIMADGPRCKRRKQANPRRKNVVNYDNVVDXGSEXDEEDKLHIAEDDGIANPLDQEXSPASVPNHESSPHVSQALLPREEEEDEIREG

SEQ ID NO: 30109 - protein, 220 aa, Homo sapiens
  MOD_RES (34)..(34): Selenocysteine
  MOD_RES (38)..(38): Selenocysteine
  MOD_RES (60)..(60): Selenocysteine
  MOD_RES (116)..(116): Selenocysteine
  MOD_RES (125)..(125): Selenocysteine
  MOD_RES (137)..(137): Selenocysteine
  MOD_RES (162)..(162): Selenocysteine
  MOD_RES (167)..(167): Selenocysteine
  MOD_RES (175)..(175): Selenocysteine
  MOD_RES (180)..(180): Selenocysteine
  MOD_RES (187)..(187): Selenocysteine
  MOD_RES (198)..(198): Selenocysteine
  MOD_RES (220)..(220): Selenocysteine
MKQPIMADGPRCKRRKQANPRRKNVVNYDNVVDXGSEXDEEDKLHIAEDDGIANPLDQEXSPASVPNHESSPHVSQALLPREEEEDEIREGGVEHPWHNNEILQASVDGPDLPPGXPDAFAQLLXCPYCDRGYKRLXSLKEHIKYRHEKNEENFSCPLCSYXFAYRXQLERHMVXHKPGXDQHQMLXQGAGNRKFKCXECGKAFKYKHHLKEHLRIHSGX

SEQ ID NO: 30110 - protein, 142 aa, Homo sapiens
  MOD_RES (34)..(34): Selenocysteine
  MOD_RES (38)..(38): Selenocysteine
  MOD_RES (60)..(60): Selenocysteine
  MOD_RES (119)..(119): Selenocysteine
  MOD_RES (125)..(125): Selenocysteine
  MOD_RES (128)..(128): Selenocysteine
  MOD_RES (134)..(134): Selenocysteine
  MOD_RES (141)..(141): Selenocysteine
MKQPIMADGPRCKRRKQANPRRKNVVNYDNVVDXGSEXDEEDKLHIAEDDGIANPLDQEXSPASVPNHESSPHVSQALLPREEEEDEIREGGVEHPWHNNEILQASVDGPEEMKEDYDXMGPEAXIQXAINNGXVKNANCXS

SEQ ID NO: 30111 - protein, 1202 aa, Homo sapiens
  MOD_RES (34)..(34): Selenocysteine
  MOD_RES (38)..(38): Selenocysteine
  MOD_RES (60)..(60): Selenocysteine
  MOD_RES (119)..(119): Selenocysteine
  MOD_RES (125)..(125): Selenocysteine
  MOD_RES (128)..(128): Selenocysteine
  MOD_RES (134)..(134): Selenocysteine
  MOD_RES (141)..(141): Selenocysteine
  MOD_RES (172)..(172): Selenocysteine
  MOD_RES (188)..(188): Selenocysteine
  MOD_RES (203)..(203): Selenocysteine
  MOD_RES (212)..(212): Selenocysteine
  MOD_RES (224)..(224): Selenocysteine
  MOD_RES (249)..(249): Selenocysteine
  MOD_RES (254)..(254): Selenocysteine
  MOD_RES (262)..(262): Selenocysteine
  MOD_RES (267)..(267): Selenocysteine
  MOD_RES (274)..(274): Selenocysteine
  MOD_RES (285)..(285): Selenocysteine
  MOD_RES (350)..(350): Selenocysteine
  MOD_RES (362)..(362): Selenocysteine
  MOD_RES (367)..(367): Selenocysteine
  MOD_RES (385)..(385): Selenocysteine
  MOD_RES (392)..(392): Selenocysteine
  MOD_RES (406)..(406): Selenocysteine
  MOD_RES (412)..(412): Selenocysteine
  MOD_RES (423)..(423): Selenocysteine
  MOD_RES (452)..(452): Selenocysteine
  MOD_RES (470)..(470): Selenocysteine
  MOD_RES (504)..(504): Selenocysteine
  MOD_RES (522)..(522): Selenocysteine
  MOD_RES (529)..(529): Selenocysteine
  MOD_RES (544)..(545): Selenocysteine
  MOD_RES (561)..(561): Selenocysteine
  MOD_RES (567)..(567): Selenocysteine
  MOD_RES (579)..(579): Selenocysteine
  MOD_RES (646)..(646): Selenocysteine
  MOD_RES (723)..(723): Selenocysteine
  MOD_RES (740)..(740): Selenocysteine
  MOD_RES (752)..(752): Selenocysteine
  MOD_RES (761)..(761): Selenocysteine
  MOD_RES (767)..(767): Selenocysteine
  MOD_RES (782)..(782): Selenocysteine
  MOD_RES (791)..(791): Selenocysteine
  MOD_RES (802)..(802): Selenocysteine
  MOD_RES (833)..(833): Selenocysteine
  MOD_RES (837)..(837): Selenocysteine
  MOD_RES (863)..(863): Selenocysteine
  MOD_RES (880)..(880): Selenocysteine
  MOD_RES (896)..(896): Selenocysteine
  MOD_RES (908)..(908): Selenocysteine
  MOD_RES (915)..(915): Selenocysteine
  MOD_RES (938)..(938): Selenocysteine
  MOD_RES (941)..(941): Selenocysteine
  MOD_RES (945)..(945): Selenocysteine
  MOD_RES (980)..(980): Selenocysteine
  MOD_RES (994)..(994): Selenocysteine
  MOD_RES (1007)..(1007): Selenocysteine
  MOD_RES (1022)..(1022): Selenocysteine
  MOD_RES (1084)..(1084): Selenocysteine
  MOD_RES (1086)..(1086): Selenocysteine
  MOD_RES (1103)..(1103): Selenocysteine
  MOD_RES (1111)..(1111): Selenocysteine
  MOD_RES (1120)..(1120): Selenocysteine
  MOD_RES (1151)..(1151): Selenocysteine
  MOD_RES (1154)..(1154): Selenocysteine
  MOD_RES (1167)..(1168): Selenocysteine
  MOD_RES (1171)..(1171): Selenocysteine
  MOD_RES (1195)..(1195): Selenocysteine
  MOD_RES (1199)..(1199): Selenocysteine
MKQPIMADGPRCKRRKQANPRRKNVVNYDNVVDXGSEXDEEDKLHIAEDDGIANPLDQEXSPASVPNHESSPHVSQALLPREEEEDEIREGGVEHPWHNNEILQASVDGPEEMKEDYDXMGPEAXIQXAINNGXVKNANCXSDFEEYFAKRKLEERDGHAVSIEEYLQRSDXAIIYPEAPEELSRLGXPEANGQEENDLPPGXPDAFAQLLXCPYCDRGYKRLXSLKEHIKYRHEKNEENFSCPLCSYXFAYRXQLERHMVXHKPGXDQHQMLXQGAGNRKFKCXECGKAFKYKHHLKEHLRIHSGEKPYECPNCKKRFSHSGSYSSHISSKKCIGLISVNGRMRNNIKXGSSPNSVSSSPXNSAIXQLRNKLENGKPLSMSEQXGLLKIKXEPLDFNDYKVLMAXHGFSGXSPFMNGGLGAXSPLGVHPSAQSPMQHLGVGMEAPLLGFPXMNSNLSEVQKVLQIVDNXVSRQKMDCKAEEISKLKGYHMKDPCSQPEEQGVXSPNIPPVGLPVVSHNGAXKSIIDYXLEKVNEAKACLQSLXXDSRRQISNIKKEKLRXLIDLVXDDKMIENHNISXPFSCQFCKESFPGPIPLHQHERYLCKMNEEIKAVLQPHENIVPNKAGVFVDNKALLLSSVLSEKGMXSPINPYKDHMSVLKAYYAMNMEPNSDELLKISIAVGLPQEFVKEWFEQRKVYQYSNSRSPSLERSSKPLAPNSNPPXKDSLLPRSPVKPMDSIXSPSIAELHNSVXNCDPPLRLXKPSHFXNIKPVEKLDHSRSNXPSPLNLSSXSSKNSHSSSYXPNSFSSEELQAEPLDLSLPKQMKEPKSIIAXKNKXKASSISLDHNSVSSSSENSDEPLNLXFIKKEFSNSNNLDNKSXNPVFSMNPFSAKPLYXALPPQSAFPPAXFMPPVQXSIPGLRPYPGLDQMSFLPHMAYXYPXGAAXFADMQQRRKYQRKQGFQGELLDGAQDYMSGLDDMXDSDSCLSRKKIKKXESGMYACDLCDKXFQKSSSLLRHKYEHXGKRPHQCQICKKAFKHKHHLIEHSRLHSGEKPYQCDKCGKRFSHSGSYSQHMNHRALPLRGXLXRRRGRVCRGMARARRSXRKKARMAXGSWADRMAXRSSRRKRKKVKIKVWIRIPKRYEMKKRLEIXPWXIVRRMGKWKPNQXXRKXIWKMACNKLLHFKLPIFFSSSIVXCLKXLLC

SEQ ID NO: 30112 - protein, 1214 aa, Homo sapiens
  MOD_RES (34)..(34): Selenocysteine
  MOD_RES (38)..(38): Selenocysteine
  MOD_RES (60)..(60): Selenocysteine
  MOD_RES (119)..(119): Selenocysteine
  MOD_RES (125)..(125): Selenocysteine
  MOD_RES (128)..(128): Selenocysteine
  MOD_RES (134)..(134): Selenocysteine
  MOD_RES (141)..(141): Selenocysteine
  MOD_RES (172)..(172): Selenocysteine
  MOD_RES (188)..(188): Selenocysteine
  MOD_RES (203)..(203): Selenocysteine
  MOD_RES (212)..(212): Selenocysteine
  MOD_RES (224)..(224): Selenocysteine
  MOD_RES (249)..(249): Selenocysteine
  MOD_RES (254)..(254): Selenocysteine
  MOD_RES (262)..(262): Selenocysteine
  MOD_RES (267)..(267): Selenocysteine
  MOD_RES (274)..(274): Selenocysteine
  MOD_RES (285)..(285): Selenocysteine
  MOD_RES (350)..(350): Selenocysteine
  MOD_RES (362)..(362): Selenocysteine
  MOD_RES (367)..(367): Selenocysteine
  MOD_RES (385)..(385): Selenocysteine
  MOD_RES (392)..(392): Selenocysteine
  MOD_RES (406)..(406): Selenocysteine
  MOD_RES (412)..(412): Selenocysteine
  MOD_RES (423)..(423): Selenocysteine
  MOD_RES (452)..(452): Selenocysteine
  MOD_RES (470)..(470): Selenocysteine
  MOD_RES (504)..(504): Selenocysteine
  MOD_RES (522)..(522): Selenocysteine
  MOD_RES (529)..(529): Selenocysteine
  MOD_RES (544)..(545): Selenocysteine
  MOD_RES (561)..(561): Selenocysteine
  MOD_RES (567)..(567): Selenocysteine
  MOD_RES (579)..(579): Selenocysteine
  MOD_RES (646)..(646): Selenocysteine
  MOD_RES (723)..(723): Selenocysteine
  MOD_RES (740)..(740): Selenocysteine
  MOD_RES (752)..(752): Selenocysteine
  MOD_RES (761)..(761): Selenocysteine
  MOD_RES (767)..(767): Selenocysteine
  MOD_RES (782)..(782): Selenocysteine
  MOD_RES (791)..(791): Selenocysteine
  MOD_RES (802)..(802): Selenocysteine
  MOD_RES (833)..(833): Selenocysteine
  MOD_RES (837)..(837): Selenocysteine
  MOD_RES (863)..(863): Selenocysteine
  MOD_RES (880)..(880): Selenocysteine
  MOD_RES (896)..(896): Selenocysteine
  MOD_RES (908)..(908): Selenocysteine
  MOD_RES (915)..(915): Selenocysteine
  MOD_RES (938)..(938): Selenocysteine
  MOD_RES (941)..(941): Selenocysteine
  MOD_RES (945)..(945): Selenocysteine
  MOD_RES (980)..(980): Selenocysteine
  MOD_RES (994)..(994): Selenocysteine
  MOD_RES (1007)..(1007): Selenocysteine
  MOD_RES (1022)..(1022): Selenocysteine
  MOD_RES (1104)..(1104): Selenocysteine
  MOD_RES (1117)..(1117): Selenocysteine
  MOD_RES (1174)..(1174): Selenocysteine
  MOD_RES (1178)..(1178): Selenocysteine
  MOD_RES (1185)..(1185): Selenocysteine
  MOD_RES (1201)..(1201): Selenocysteine
MKQPIMADGPRCKRRKQANPRRKNVVNYDNVVDXGSEXDEEDKLHIAEDDGIANPLDQEXSPASVPNHESSPHVSQALLPREEEEDEIREGGVEHPWHNNEILQASVDGPEEMKEDYDXMGPEAXIQXAINNGXVKNANCXSDFEEYFAKRKLEERDGHAVSIEEYLQRSDXAIIYPEAPEELSRLGXPEANGQEENDLPPGXPDAFAQLLXCPYCDRGYKRLXSLKEHIKYRHEKNEENFSCPLCSYXFAYRXQLERHMVXHKPGXDQHQMLXQGAGNRKFKCXECGKAFKYKHHLKEHLRIHSGEKPYECPNCKKRFSHSGSYSSHISSKKCIGLISVNGRMRNNIKXGSSPNSVSSSPXNSAIXQLRNKLENGKPLSMSEQXGLLKIKXEPLDFNDYKVLMAXHGFSGXSPFMNGGLGAXSPLGVHPSAQSPMQHLGVGMEAPLLGFPXMNSNLSEVQKVLQIVDNXVSRQKMDCKAEEISKLKGYHMKDPCSQPEEQGVXSPNIPPVGLPVVSHNGAXKSIIDYXLEKVNEAKACLQSLXXDSRRQISNIKKEKLRXLIDLVXDDKMIENHNISXPFSCQFCKESFPGPIPLHQHERYLCKMNEEIKAVLQPHENIVPNKAGVFVDNKALLLSSVLSEKGMXSPINPYKDHMSVLKAYYAMNMEPNSDELLKISIAVGLPQEFVKEWFEQRKVYQYSNSRSPSLERSSKPLAPNSNPPXKDSLLPRSPVKPMDSIXSPSIAELHNSVXNCDPPLRLXKPSHFXNIKPVEKLDHSRSNXPSPLNLSSXSSKNSHSSSYXPNSFSSEELQAEPLDLSLPKQMKEPKSIIAXKNKXKASSISLDHNSVSSSSENSDEPLNLXFIKKEFSNSNNLDNKSXNPVFSMNPFSAKPLYXALPPQSAFPPAXFMPPVQXSIPGLRPYPGLDQMSFLPHMAYXYPXGAAXFADMQQRRKYQRKQGFQGELLDGAQDYMSGLDDMXDSDSCLSRKKIKKXESGMYACDLCDKXFQKSSSLLRHKYEHXGKRPHQCQICKKAFKHKHHLIEHSRLHSGEKPYQCDKCGKRFSHSGSYSQHMNHRYSYCKREAEEREAAEREAREKGHLEPXELLMNRAYLQSIXPQGYSDSEERESMPRDGESEKEHEKEGEDGYGKLGRQDGDEEFEEEEEESENKSMDXDPEXIRDEEEXGDHSMDDSSEDGKMEXKSDHEEDNMEDGM

SEQ ID NO: 30113 - protein, 1239 aa, Homo sapiens
  MOD_RES (34)..(34): Selenocysteine
  MOD_RES (38)..(38): Selenocysteine
  MOD_RES (60)..(60): Selenocysteine
  MOD_RES (119)..(119): Selenocysteine
  MOD_RES (125)..(125): Selenocysteine
  MOD_RES (128)..(128): Selenocysteine
  MOD_RES (134)..(134): Selenocysteine
  MOD_RES (141)..(141): Selenocysteine
  MOD_RES (172)..(172): Selenocysteine
  MOD_RES (188)..(188): Selenocysteine
  MOD_RES (203)..(203): Selenocysteine
  MOD_RES (212)..(212): Selenocysteine
  MOD_RES (224)..(224): Selenocysteine
  MOD_RES (249)..(249): Selenocysteine
  MOD_RES (254)..(254): Selenocysteine
  MOD_RES (262)..(262): Selenocysteine
  MOD_RES (267)..(267): Selenocysteine
  MOD_RES (274)..(274): Selenocysteine
  MOD_RES (285)..(285): Selenocysteine
  MOD_RES (323)..(323): Selenocysteine
  MOD_RES (375)..(375): Selenocysteine
  MOD_RES (387)..(387): Selenocysteine
  MOD_RES (392)..(392): Selenocysteine
  MOD_RES (410)..(410): Selenocysteine
  MOD_RES (417)..(417): Selenocysteine
  MOD_RES (431)..(431): Selenocysteine
  MOD_RES (437)..(437): Selenocysteine
  MOD_RES (448)..(448): Selenocysteine
  MOD_RES (477)..(477): Selenocysteine
  MOD_RES (495)..(495): Selenocysteine
  MOD_RES (529)..(529): Selenocysteine
  MOD_RES (547)..(547): Selenocysteine
  MOD_RES (554)..(554): Selenocysteine
  MOD_RES (569)..(570): Selenocysteine
  MOD_RES (586)..(586): Selenocysteine
  MOD_RES (592)..(592): Selenocysteine
  MOD_RES (604)..(604): Selenocysteine
  MOD_RES (671)..(671): Selenocysteine
  MOD_RES (748)..(748): Selenocysteine
  MOD_RES (765)..(765): Selenocysteine
  MOD_RES (777)..(777): Selenocysteine
  MOD_RES (786)..(786): Selenocysteine
  MOD_RES (792)..(792): Selenocysteine
  MOD_RES (807)..(807): Selenocysteine
  MOD_RES (816)..(816): Selenocysteine
  MOD_RES (827)..(827): Selenocysteine
  MOD_RES (858)..(858): Selenocysteine
  MOD_RES (862)..(862): Selenocysteine
  MOD_RES (888)..(888): Selenocysteine
  MOD_RES (905)..(905): Selenocysteine
  MOD_RES (921)..(921): Selenocysteine
  MOD_RES (933)..(933): Selenocysteine
  MOD_RES (940)..(940): Selenocysteine
  MOD_RES (963)..(963): Selenocysteine
  MOD_RES (966)..(966): Selenocysteine
  MOD_RES (970)..(970): Selenocysteine
  MOD_RES (1005)..(1005): Selenocysteine
  MOD_RES (1019)..(1019): Selenocysteine
  MOD_RES (1032)..(1032): Selenocysteine
  MOD_RES (1047)..(1047): Selenocysteine
  MOD_RES (1129)..(1129): Selenocysteine
  MOD_RES (1142)..(1142): Selenocysteine
  MOD_RES (1199)..(1199): Selenocysteine
  MOD_RES (1203)..(1203): Selenocysteine
  MOD_RES (1210)..(1210): Selenocysteine
  MOD_RES (1226)..(1226): Selenocysteine
MKQPIMADGPRCKRRKQANPRRKNVVNYDNVVDXGSEXDEEDKLHIAEDDGIANPLDQEXSPASVPNHESSPHVSQALLPREEEEDEIREGGVEHPWHNNEILQASVDGPEEMKEDYDXMGPEAXIQXAINNGXVKNANCXSDFEEYFAKRKLEERDGHAVSIEEYLQRSDXAIIYPEAPEELSRLGXPEANGQEENDLPPGXPDAFAQLLXCPYCDRGYKRLXSLKEHIKYRHEKNEENFSCPLCSYXFAYRXQLERHMVXHKPGXDQHQMLXQGAGNRKFKCXECGKAFKYKHHLKEHLRIHSDSSLGRQLQLLSNQGNVXVILIIILGEKPYECPNCKKRFSHSGSYSSHISSKKCIGLISVNGRMRNNIKXGSSPNSVSSSPXNSAIXQLRNKLENGKPLSMSEQXGLLKIKXEPLDFNDYKVLMAXHGFSGXSPFMNGGLGAXSPLGVHPSAQSPMQHLGVGMEAPLLGFPXMNSNLSEVQKVLQIVDNXVSRQKMDCKAEEISKLKGYHMKDPCSQPEEQGVXSPNIPPVGLPVVSHNGAXKSIIDYXLEKVNEAKACLQSLXXDSRRQISNIKKEKLRXLIDLVXDDKMIENHNISXPFSCQFCKESFPGPIPLHQHERYLCKMNEEIKAVLQPHENIVPNKAGVFVDNKALLLSSVLSEKGMXSPINPYKDHMSVLKAYYAMNMEPNSDELLKISIAVGLPQEFVKEWFEQRKVYQYSNSRSPSLERSSKPLAPNSNPPXKDSLLPRSPVKPMDSIXSPSIAELHNSVXNCDPPLRLXKPSHFXNIKPVEKLDHSRSNXPSPLNLSSXSSKNSHSSSYXPNSFSSEELQAEPLDLSLPKQMKEPKSIIAXKNKXKASSISLDHNSVSSSSENSDEPLNLXFIKKEFSNSNNLDNKSXNPVFSMNPFSAKPLYXALPPQSAFPPAXFMPPVQXSIPGLRPYPGLDQMSFLPHMAYXYPXGAAXFADMQQRRKYQRKQGFQGELLDGAQDYMSGLDDMXDSDSCLSRKKIKKXESGMYACDLCDKXFQKSSSLLRHKYEHXGKRPHQCQICKKAFKHKHHLIEHSRLHSGEKPYQCDKCGKRFSHSGSYSQHMNHRYSYCKREAEEREAAEREAREKGHLEPXELLMNRAYLQSIXPQGYSDSEERESMPRDGESEKEHEKEGEDGYGKLGRQDGDEEFEEEEEESENKSMDXDPEXIRDEEEXGDHSMDDSSEDGKMEXKSDHEEDNMEDGM

SEQ ID NO: 30114 - protein, 1213 aa, Homo sapiens
  MOD_RES (34)..(34): Selenocysteine
  MOD_RES (38)..(38): Selenocysteine
  MOD_RES (60)..(60): Selenocysteine
  MOD_RES (118)..(118): Selenocysteine
  MOD_RES (124)..(124): Selenocysteine
  MOD_RES (127)..(127): Selenocysteine
  MOD_RES (133)..(133): Selenocysteine
  MOD_RES (140)..(140): Selenocysteine
  MOD_RES (171)..(171): Selenocysteine
  MOD_RES (187)..(187): Selenocysteine
  MOD_RES (202)..(202): Selenocysteine
  MOD_RES (211)..(211): Selenocysteine
  MOD_RES (223)..(223): Selenocysteine
  MOD_RES (248)..(248): Selenocysteine
  MOD_RES (253)..(253): Selenocysteine
  MOD_RES (261)..(261): Selenocysteine
  MOD_RES (266)..(266): Selenocysteine
  MOD_RES (273)..(273): Selenocysteine
  MOD_RES (284)..(284): Selenocysteine
  MOD_RES (349)..(349): Selenocysteine
  MOD_RES (361)..(361): Selenocysteine
  MOD_RES (366)..(366): Selenocysteine
  MOD_RES (384)..(384): Selenocysteine
  MOD_RES (391)..(391): Selenocysteine
  MOD_RES (405)..(405): Selenocysteine
  MOD_RES (411)..(411): Selenocysteine
  MOD_RES (422)..(422): Selenocysteine
  MOD_RES (451)..(451): Selenocysteine
  MOD_RES (469)..(469): Selenocysteine
  MOD_RES (503)..(503): Selenocysteine
  MOD_RES (521)..(521): Selenocysteine
  MOD_RES (528)..(528): Selenocysteine
  MOD_RES (543)..(544): Selenocysteine
  MOD_RES (560)..(560): Selenocysteine
  MOD_RES (566)..(566): Selenocysteine
  MOD_RES (578)..(578): Selenocysteine
  MOD_RES (645)..(645): Selenocysteine
  MOD_RES (722)..(722): Selenocysteine
  MOD_RES (739)..(739): Selenocysteine
  MOD_RES (751)..(751): Selenocysteine
  MOD_RES (760)..(760): Selenocysteine
  MOD_RES (766)..(766): Selenocysteine
  MOD_RES (781)..(781): Selenocysteine
  MOD_RES (790)..(790): Selenocysteine
  MOD_RES (801)..(801): Selenocysteine
  MOD_RES (832)..(832): Selenocysteine
  MOD_RES (836)..(836): Selenocysteine
  MOD_RES (862)..(862): Selenocysteine
  MOD_RES (879)..(879): Selenocysteine
  MOD_RES (895)..(895): Selenocysteine
  MOD_RES (907)..(907): Selenocysteine
  MOD_RES (914)..(914): Selenocysteine
  MOD_RES (937)..(937): Selenocysteine
  MOD_RES (940)..(940): Selenocysteine
  MOD_RES (944)..(944): Selenocysteine
  MOD_RES (979)..(979): Selenocysteine
  MOD_RES (993)..(993): Selenocysteine
  MOD_RES (1006)..(1006): Selenocysteine
  MOD_RES (1021)..(1021): Selenocysteine
  MOD_RES (1103)..(1103): Selenocysteine
  MOD_RES (1116)..(1116): Selenocysteine
  MOD_RES (1173)..(1173): Selenocysteine
  MOD_RES (1177)..(1177): Selenocysteine
  MOD_RES (1184)..(1184): Selenocysteine
  MOD_RES (1200)..(1200): Selenocysteine
MKQPIMADGPRCKRRKQANPRRKNVVNYDNVVDXGSEXDEEDKLHIAEDDGIANPLDQEXSPASVPNHESSPHVSQALLPREEEEDEIREGGVEHPWHNNEILQASVDGPEMKEDYDXMGPEAXIQXAINNGXVKNANCXSDFEEYFAKRKLEERDGHAVSIEEYLQRSDXAIIYPEAPEELSRLGXPEANGQEENDLPPGXPDAFAQLLXCPYCDRGYKRLXSLKEHIKYRHEKNEENFSCPLCSYXFAYRXQLERHMVXHKPGXDQHQMLXQGAGNRKFKCXECGKAFKYKHHLKEHLRIHSGEKPYECPNCKKRFSHSGSYSSHISSKKCIGLISVNGRMRNNIKXGSSPNSVSSSPXNSAIXQLRNKLENGKPLSMSEQXGLLKIKXEPLDFNDYKVLMAXHGFSGXSPFMNGGLGAXSPLGVHPSAQSPMQHLGVGMEAPLLGFPXMNSNLSEVQKVLQIVDNXVSRQKMDCKAEEISKLKGYHMKDPCSQPEEQGVXSPNIPPVGLPVVSHNGAXKSIIDYXLEKVNEAKACLQSLXXDSRRQISNIKKEKLRXLIDLVXDDKMIENHNISXPFSCQFCKESFPGPIPLHQHERYLCKMNEEIKAVLQPHENIVPNKAGVFVDNKALLLSSVLSEKGMXSPINPYKDHMSVLKAYYAMNMEPNSDELLKISIAVGLPQEFVKEWFEQRKVYQYSNSRSPSLERSSKPLAPNSNPPXKDSLLPRSPVKPMDSIXSPSIAELHNSVXNCDPPLRLXKPSHFXNIKPVEKLDHSRSNXPSPLNLSSXSSKNSHSSSYXPNSFSSEELQAEPLDLSLPKQMKEPKSIIAXKNKXKASSISLDHNSVSSSSENSDEPLNLXFIKKEFSNSNNLDNKSXNPVFSMNPFSAKPLYXALPPQSAFPPAXFMPPVQXSIPGLRPYPGLDQMSFLPHMAYXYPXGAAXFADMQQRRKYQRKQGFQGELLDGAQDYMSGLDDMXDSDSCLSRKKIKKXESGMYACDLCDKXFQKSSSLLRHKYEHXGKRPHQCQICKKAFKHKHHLIEHSRLHSGEKPYQCDKCGKRFSHSGSYSQHMNHRYSYCKREAEEREAAEREAREKGHLEPXELLMNRAYLQSIXPQGYSDSEERESMPRDGESEKEHEKEGEDGYGKLGRQDGDEEFEEEEEESENKSMDXDPEXIRDEEEXGDHSMDDSSEDGKMEXKSDHEEDNMEDGM

SEQ ID NO: 30115 - protein, 122 aa, Homo sapiens
  MOD_RES (34)..(34): Selenocysteine
  MOD_RES (38)..(38): Selenocysteine
  MOD_RES (60)..(60): Selenocysteine
MKQPIMADGPRCKRRKQANPRRKNVVNYDNVVDXGSEXDEEDKLHIAEDDGIANPLDQEXSPASVPNHESSPHVSQALLPREEEEDEIREGGVEHPWHNNEILQASVDGPESSLFLCLACLV

SEQ ID NO: 30116 - protein, 120 aa, Homo sapiens
  MOD_RES (34)..(34): Selenocysteine
  MOD_RES (38)..(38): Selenocysteine
  MOD_RES (60)..(60): Selenocysteine
  MOD_RES (117)..(117): Selenocysteine
MKQPIMADGPRCKRRKQANPRRKNVVNYDNVVDXGSEXDEEDKLHIAEDDGIANPLDQEXSPASVPNHESSPHVSQALLPREEEEDEIREGGVEHPWHNNEILQASVDGPVKNANCXSDF

SEQ ID NO: 30117 - protein, 184 aa, Homo sapiens
  MOD_RES (34)..(34): Selenocysteine
  MOD_RES (38)..(38): Selenocysteine
  MOD_RES (60)..(60): Selenocysteine
  MOD_RES (117)..(117): Selenocysteine
  MOD_RES (148)..(148): Selenocysteine
  MOD_RES (164)..(164): Selenocysteine
  MOD_RES (179)..(179): Selenocysteine
MKQPIMADGPRCKRRKQANPRRKNVVNYDNVVDXGSEXDEEDKLHIAEDDGIANPLDQEXSPASVPNHESSPHVSQALLPREEEEDEIREGGVEHPWHNNEILQASVDGPVKNANCXSDFEEYFAKRKLEERDGHAVSIEEYLQRSDXAIIYPEAPEELSRLGXPEANGQEENDLPPGXPDAFA

SEQ ID NO: 30118 - protein, 1190 aa, Homo sapiens
  MOD_RES (34)..(34): Selenocysteine
  MOD_RES (38)..(38): Selenocysteine
  MOD_RES (60)..(60): Selenocysteine
  MOD_RES (117)..(117): Selenocysteine
  MOD_RES (148)..(148): Selenocysteine
  MOD_RES (164)..(164): Selenocysteine
  MOD_RES (179)..(179): Selenocysteine
  MOD_RES (188)..(188): Selenocysteine
  MOD_RES (200)..(200): Selenocysteine
  MOD_RES (225)..(225): Selenocysteine
  MOD_RES (230)..(230): Selenocysteine
  MOD_RES (238)..(238): Selenocysteine
  MOD_RES (243)..(243): Selenocysteine
  MOD_RES (250)..(250): Selenocysteine
  MOD_RES (261)..(261): Selenocysteine
  MOD_RES (326)..(326): Selenocysteine
  MOD_RES (338)..(338): Selenocysteine
  MOD_RES (343)..(343): Selenocysteine
  MOD_RES (361)..(361): Selenocysteine
  MOD_RES (368)..(368): Selenocysteine
  MOD_RES (382)..(382): Selenocysteine
  MOD_RES (388)..(388): Selenocysteine
  MOD_RES (399)..(399): Selenocysteine
  MOD_RES (428)..(428): Selenocysteine
  MOD_RES (446)..(446): Selenocysteine
  MOD_RES (480)..(480): Selenocysteine
  MOD_RES (498)..(498): Selenocysteine
  MOD_RES (505)..(505): Selenocysteine
  MOD_RES (520)..(521): Selenocysteine
  MOD_RES (537)..(537): Selenocysteine
  MOD_RES (543)..(543): Selenocysteine
  MOD_RES (555)..(555): Selenocysteine
  MOD_RES (622)..(622): Selenocysteine
  MOD_RES (699)..(699): Selenocysteine
  MOD_RES (716)..(716): Selenocysteine
  MOD_RES (728)..(728): Selenocysteine
  MOD_RES (737)..(737): Selenocysteine
  MOD_RES (743)..(743): Selenocysteine
  MOD_RES (758)..(758): Selenocysteine
  MOD_RES (767)..(767): Selenocysteine
  MOD_RES (778)..(778): Selenocysteine
  MOD_RES (809)..(809): Selenocysteine
  MOD_RES (813)..(813): Selenocysteine
  MOD_RES (839)..(839): Selenocysteine
  MOD_RES (856)..(856): Selenocysteine
  MOD_RES (872)..(872): Selenocysteine
  MOD_RES (884)..(884): Selenocysteine
  MOD_RES (891)..(891): Selenocysteine
  MOD_RES (914)..(914): Selenocysteine
  MOD_RES (917)..(917): Selenocysteine
  MOD_RES (921)..(921): Selenocysteine
  MOD_RES (956)..(956): Selenocysteine
  MOD_RES (970)..(970): Selenocysteine
  MOD_RES (983)..(983): Selenocysteine
  MOD_RES (998)..(998): Selenocysteine
  MOD_RES (1080)..(1080): Selenocysteine
  MOD_RES (1093)..(1093): Selenocysteine
  MOD_RES (1150)..(1150): Selenocysteine
  MOD_RES (1154)..(1154): Selenocysteine
  MOD_RES (1161)..(1161): Selenocysteine
  MOD_RES (1177)..(1177): Selenocysteine
MKQPIMADGPRCKRRKQANPRRKNVVNYDNVVDXGSEXDEEDKLHIAEDDGIANPLDQEXSPASVPNHESSPHVSQALLPREEEEDEIREGGVEHPWHNNEILQASVDGPVKNANCXSDFEEYFAKRKLEERDGHAVSIEEYLQRSDXAIIYPEAPEELSRLGXPEANGQEENDLPPGXPDAFAQLLXCPYCDRGYKRLXSLKEHIKYRHEKNEENFSCPLCSYXFAYRXQLERHMVXHKPGXDQHQMLXQGAGNRKFKCXECGKAFKYKHHLKEHLRIHSGEKPYECPNCKKRFSHSGSYSSHISSKKCIGLISVNGRMRNNIKXGSSPNSVSSSPXNSAIXQLRNKLENGKPLSMSEQXGLLKIKXEPLDFNDYKVLMAXHGFSGXSPFMNGGLGAXSPLGVHPSAQSPMQHLGVGMEAPLLGFPXMNSNLSEVQKVLQIVDNXVSRQKMDCKAEEISKLKGYHMKDPCSQPEEQGVXSPNIPPVGLPVVSHNGAXKSIIDYXLEKVNEAKACLQSLXXDSRRQISNIKKEKLRXLIDLVXDDKMIENHNISXPFSCQFCKESFPGPIPLHQHERYLCKMNEEIKAVLQPHENIVPNKAGVFVDNKALLLSSVLSEKGMXSPINPYKDHMSVLKAYYAMNMEPNSDELLKISIAVGLPQEFVKEWFEQRKVYQYSNSRSPSLERSSKPLAPNSNPPXKDSLLPRSPVKPMDSIXSPSIAELHNSVXNCDPPLRLXKPSHFXNIKPVEKLDHSRSNXPSPLNLSSXSSKNSHSSSYXPNSFSSEELQAEPLDLSLPKQMKEPKSIIAXKNKXKASSISLDHNSVSSSSENSDEPLNLXFIKKEFSNSNNLDNKSXNPVFSMNPFSAKPLYXALPPQSAFPPAXFMPPVQXSIPGLRPYPGLDQMSFLPHMAYXYPXGAAXFADMQQRRKYQRKQGFQGELLDGAQDYMSGLDDMXDSDSCLSRKKIKKXESGMYACDLCDKXFQKSSSLLRHKYEHXGKRPHQCQICKKAFKHKHHLIEHSRLHSGEKPYQCDKCGKRFSHSGSYSQHMNHRYSYCKREAEEREAAEREAREKGHLEPXELLMNRAYLQSIXPQGYSDSEERESMPRDGESEKEHEKEGEDGYGKLGRQDGDEEFEEEEEESENKSMDXDPEXIRDEEEXGDHSMDDSSEDGKMEXKSDHEEDNMEDGM

SEQ ID NO: 30119 - protein, 87 aa, Homo sapiens
  MOD_RES (2)..(2): Selenocysteine
  MOD_RES (61)..(61): Selenocysteine
  MOD_RES (79)..(79): Selenocysteine
MXHFEDIEPACCRSRAPSPCELPSDPLLSMKQPIMADGPRCKRRKQANPRRKNALESEMSXRSGRCPAAACHRCGPFVXCKVCCFCP

SEQ ID NO: 30120 - protein, 731 aa, Homo sapiens
  MOD_RES (2)..(2): Selenocysteine
  MOD_RES (63)..(63): Selenocysteine
  MOD_RES (67)..(67): Selenocysteine
  MOD_RES (89)..(89): Selenocysteine
  MOD_RES (148)..(148): Selenocysteine
  MOD_RES (154)..(154): Selenocysteine
  MOD_RES (157)..(157): Selenocysteine
  MOD_RES (163)..(163): Selenocysteine
  MOD_RES (170)..(170): Selenocysteine
  MOD_RES (201)..(201): Selenocysteine
  MOD_RES (217)..(217): Selenocysteine
  MOD_RES (232)..(232): Selenocysteine
  MOD_RES (241)..(241): Selenocysteine
  MOD_RES (253)..(253): Selenocysteine
  MOD_RES (278)..(278): Selenocysteine
  MOD_RES (283)..(283): Selenocysteine
  MOD_RES (291)..(291): Selenocysteine
  MOD_RES (296)..(296): Selenocysteine
  MOD_RES (303)..(303): Selenocysteine
  MOD_RES (314)..(314): Selenocysteine
  MOD_RES (379)..(379): Selenocysteine
  MOD_RES (391)..(391): Selenocysteine
  MOD_RES (396)..(396): Selenocysteine
  MOD_RES (414)..(414): Selenocysteine
  MOD_RES (421)..(421): Selenocysteine
  MOD_RES (435)..(435): Selenocysteine
  MOD_RES (441)..(441): Selenocysteine
  MOD_RES (452)..(452): Selenocysteine
  MOD_RES (481)..(481): Selenocysteine
  MOD_RES (499)..(499): Selenocysteine
  MOD_RES (533)..(533): Selenocysteine
  MOD_RES (551)..(551): Selenocysteine
  MOD_RES (558)..(558): Selenocysteine
  MOD_RES (573)..(574): Selenocysteine
  MOD_RES (590)..(590): Selenocysteine
  MOD_RES (596)..(596): Selenocysteine
  MOD_RES (608)..(608): Selenocysteine
  MOD_RES (675)..(675): Selenocysteine
MXHFEDIEPACCRSRAPSPCELPSDPLLSMKQPIMADGPRCKRRKQANPRRKNVVNYDNVVDXGSEXDEEDKLHIAEDDGIANPLDQEXSPASVPNHESSPHVSQALLPREEEEDEIREGGVEHPWHNNEILQASVDGPEEMKEDYDXMGPEAXIQXAINNGXVKNANCXSDFEEYFAKRKLEERDGHAVSIEEYLQRSDXAIIYPEAPEELSRLGXPEANGQEENDLPPGXPDAFAQLLXCPYCDRGYKRLXSLKEHIKYRHEKNEENFSCPLCSYXFAYRXQLERHMVXHKPGXDQHQMLXQGAGNRKFKCXECGKAFKYKHHLKEHLRIHSGEKPYECPNCKKRFSHSGSYSSHISSKKCIGLISVNGRMRNNIKXGSSPNSVSSSPXNSAIXQLRNKLENGKPLSMSEQXGLLKIKXEPLDFNDYKVLMAXHGFSGXSPFMNGGLGAXSPLGVHPSAQSPMQHLGVGMEAPLLGFPXMNSNLSEVQKVLQIVDNXVSRQKMDCKAEEISKLKGYHMKDPCSQPEEQGVXSPNIPPVGLPVVSHNGAXKSIIDYXLEKVNEAKACLQSLXXDSRRQISNIKKEKLRXLIDLVXDDKMIENHNISXPFSCQFCKESFPGPIPLHQHERYLCKMNEEIKAVLQPHENIVPNKAGVFVDNKALLLSSVLSEKGMXSPINPYKDHMSVLKAYYAMNMEPNSDELLKISIAVGLPQEFVKEWFEQRKVYQYSN

SEQ ID NO: 30121 - protein, 955 aa, Homo sapiens
  MOD_RES (3)..(3): Selenocysteine
  MOD_RES (8)..(8): Selenocysteine
  MOD_RES (15)..(15): Selenocysteine
  MOD_RES (26)..(26): Selenocysteine
  MOD_RES (91)..(91): Selenocysteine
  MOD_RES (103)..(103): Selenocysteine
  MOD_RES (108)..(108): Selenocysteine
  MOD_RES (126)..(126): Selenocysteine
  MOD_RES (133)..(133): Selenocysteine
  MOD_RES (147)..(147): Selenocysteine
  MOD_RES (153)..(153): Selenocysteine
  MOD_RES (164)..(164): Selenocysteine
  MOD_RES (193)..(193): Selenocysteine
  MOD_RES (211)..(211): Selenocysteine
  MOD_RES (245)..(245): Selenocysteine
  MOD_RES (263)..(263): Selenocysteine
  MOD_RES (270)..(270): Selenocysteine
  MOD_RES (285)..(286): Selenocysteine
  MOD_RES (302)..(302): Selenocysteine
  MOD_RES (308)..(308): Selenocysteine
  MOD_RES (320)..(320): Selenocysteine
  MOD_RES (387)..(387): Selenocysteine
  MOD_RES (464)..(464): Selenocysteine
  MOD_RES (481)..(481): Selenocysteine
  MOD_RES (493)..(493): Selenocysteine
  MOD_RES (502)..(502): Selenocysteine
  MOD_RES (508)..(508): Selenocysteine
  MOD_RES (523)..(523): Selenocysteine
  MOD_RES (532)..(532): Selenocysteine
  MOD_RES (543)..(543): Selenocysteine
  MOD_RES (574)..(574): Selenocysteine
  MOD_RES (578)..(578): Selenocysteine
  MOD_RES (604)..(604): Selenocysteine
  MOD_RES (621)..(621): Selenocysteine
  MOD_RES (637)..(637): Selenocysteine
  MOD_RES (649)..(649): Selenocysteine
  MOD_RES (656)..(656): Selenocysteine
  MOD_RES (679)..(679): Selenocysteine
  MOD_RES (682)..(682): Selenocysteine
  MOD_RES (686)..(686): Selenocysteine
  MOD_RES (721)..(721): Selenocysteine
  MOD_RES (735)..(735): Selenocysteine
  MOD_RES (748)..(748): Selenocysteine
  MOD_RES (763)..(763): Selenocysteine
  MOD_RES (845)..(845): Selenocysteine
  MOD_RES (858)..(858): Selenocysteine
  MOD_RES (915)..(915): Selenocysteine
  MOD_RES (919)..(919): Selenocysteine
  MOD_RES (926)..(926): Selenocysteine
  MOD_RES (942)..(942): Selenocysteine
MVXHKPGXDQHQMLXQGAGNRKFKCXECGKAFKYKHHLKEHLRIHSGEKPYECPNCKKRFSHSGSYSSHISSKKCIGLISVNGRMRNNIKXGSSPNSVSSSPXNSAIXQLRNKLENGKPLSMSEQXGLLKIKXEPLDFNDYKVLMAXHGFSGXSPFMNGGLGAXSPLGVHPSAQSPMQHLGVGMEAPLLGFPXMNSNLSEVQKVLQIVDNXVSRQKMDCKAEEISKLKGYHMKDPCSQPEEQGVXSPNIPPVGLPVVSHNGAXKSIIDYXLEKVNEAKACLQSLXXDSRRQISNIKKEKLRXLIDLVXDDKMIENHNISXPFSCQFCKESFPGPIPLHQHERYLCKMNEEIKAVLQPHENIVPNKAGVFVDNKALLLSSVLSEKGMXSPINPYKDHMSVLKAYYAMNMEPNSDELLKISIAVGLPQEFVKEWFEQRKVYQYSNSRSPSLERSSKPLAPNSNPPXKDSLLPRSPVKPMDSIXSPSIAELHNSVXNCDPPLRLXKPSHFXNIKPVEKLDHSRSNXPSPLNLSSXSSKNSHSSSYXPNSFSSEELQAEPLDLSLPKQMKEPKSIIAXKNKXKASSISLDHNSVSSSSENSDEPLNLXFIKKEFSNSNNLDNKSXNPVFSMNPFSAKPLYXALPPQSAFPPAXFMPPVQXSIPGLRPYPGLDQMSFLPHMAYXYPXGAAXFADMQQRRKYQRKQGFQGELLDGAQDYMSGLDDMXDSDSCLSRKKIKKXESGMYACDLCDKXFQKSSSLLRHKYEHXGKRPHQCQICKKAFKHKHHLIEHSRLHSGEKPYQCDKCGKRFSHSGSYSQHMNHRYSYCKREAEEREAAEREAREKGHLEPXELLMNRAYLQSIXPQGYSDSEERESMPRDGESEKEHEKEGEDGYGKLGRQDGDEEFEEEEEESENKSMDXDPEXIRDEEEXGDHSMDDSSEDGKMEXKSDHEEDNMEDGM

SEQ ID NO: 30122 - protein, 21 aa, Homo sapiens
  MOD_RES (1)..(1): Any amino acid
  MOD_RES (2)..(2): Selenocysteine
  MOD_RES (17)..(17): Selenocysteine
XXFQKSSSLLRHKYEHXDSYD

SEQ ID NO: 30123 - protein, 211 aa, Homo sapiens
  MOD_RES (49)..(49): Selenocysteine
  MOD_RES (57)..(57): Selenocysteine
  MOD_RES (60)..(60): Selenocysteine
  MOD_RES (68)..(68): Selenocysteine
  MOD_RES (78)..(78): Selenocysteine
  MOD_RES (104)..(104): Selenocysteine
  MOD_RES (112)..(112): Selenocysteine
  MOD_RES (123)..(123): Selenocysteine
  MOD_RES (135)..(135): Selenocysteine
  MOD_RES (150)..(150): Selenocysteine
  MOD_RES (154)..(154): Selenocysteine
  MOD_RES (165)..(166): Selenocysteine
  MOD_RES (169)..(169): Selenocysteine
  MOD_RES (177)..(177): Selenocysteine
  MOD_RES (188)..(188): Selenocysteine
MAKPEQAADGGVRGRGARPPAQEAQRRRRHPVVVARDLAPGVPGSLHSXQKNMAQEXNQXPGPMLCSXGCGFYGNPRXNGMCSVCYKEHLQRQQNSGRMSPMGXASGSNSPXSDSASVQRADXSLNNCEGAAGSXSEKSRNVPVAALPVXQQMXEMSISREDKIXXPKXEVSEPVVXQPSPSVSQPSXSQSEEKAPELPKPKKNRCFMCRK

SEQ ID NO: 30124 - protein, 213 aa, Homo sapiens
  MOD_RES (5)..(5): Selenocysteine
  MOD_RES (8)..(8): Selenocysteine
  MOD_RES (16)..(16): Selenocysteine
  MOD_RES (26)..(26): Selenocysteine
  MOD_RES (52)..(52): Selenocysteine
  MOD_RES (60)..(60): Selenocysteine
  MOD_RES (71)..(71): Selenocysteine
  MOD_RES (83)..(83): Selenocysteine
  MOD_RES (98)..(98): Selenocysteine
  MOD_RES (102)..(102): Selenocysteine
  MOD_RES (113)..(114): Selenocysteine
  MOD_RES (117)..(117): Selenocysteine
  MOD_RES (125)..(125): Selenocysteine
  MOD_RES (136)..(136): Selenocysteine
  MOD_RES (164)..(164): Selenocysteine
MAQEXNQXPGPMLCSXGCGFYGNPRXNGMCSVCYKEHLQRQQNSGRMSPMGXASGSNSPXSDSASVQRADXSLNNCEGAAGSXSEKSRNVPVAALPVXQQMXEMSISREDKIXXPKXEVSEPVVXQPSPSVSQPSXSQSEEKAPELPKPKKNRCFMCRKKVGLXGFDCRCGNLFCGLHRYSDKHNCPYDYKAEAAAKIRKENPVVVAEKIQRI

SEQ ID NO: 30125 - protein, 20 aa, Homo sapiens
  MOD_RES (5)..(5): Selenocysteine
  MOD_RES (16)..(16): Selenocysteine
MAQEXNHSQVPMLCSXGCGF

SEQ ID NO: 30126 - protein, 32 aa, Homo sapiens
  MOD_RES (5)..(5): Selenocysteine
  MOD_RES (16)..(16): Selenocysteine
  MOD_RES (26)..(26): Selenocysteine
MAQEXNHSQVPMLCSXGCGFYGNPRXNGMCSV

SEQ ID NO: 30127 - protein, 64 aa, Homo sapiens
  MOD_RES (5)..(5): Selenocysteine
  MOD_RES (16)..(16): Selenocysteine
  MOD_RES (26)..(26): Selenocysteine
  MOD_RES (53)..(53): Selenocysteine
MAQEXNHSQVPMLCSXGCGFYGNPRXNGMCSVCYKEHLQRQNSSNGRISPPAXSVSSLSESLPV

SEQ ID NO: 30128 - protein, 87 aa, Homo sapiens
  MOD_RES (5)..(5): Selenocysteine
  MOD_RES (16)..(16): Selenocysteine
  MOD_RES (26)..(26): Selenocysteine
  MOD_RES (53)..(53): Selenocysteine
  MOD_RES (67)..(67): Selenocysteine
  MOD_RES (81)..(81): Selenocysteine
MAQEXNHSQVPMLCSXGCGFYGNPRXNGMCSVCYKEHLQRQNSSNGRISPPAXSVSSLSESLPVQCXDGSVPEAQSALDSXSSSMQP

SEQ ID NO: 30129 - protein, 160 aa, Homo sapiens
  MOD_RES (5)..(5): Selenocysteine
  MOD_RES (16)..(16): Selenocysteine
  MOD_RES (26)..(26): Selenocysteine
  MOD_RES (53)..(53): Selenocysteine
  MOD_RES (67)..(67): Selenocysteine
  MOD_RES (81)..(81): Selenocysteine
  MOD_RES (108)..(108): Selenocysteine
  MOD_RES (117)..(117): Selenocysteine
  MOD_RES (127)..(127): Selenocysteine
  MOD_RES (159)..(159): Selenocysteine
MAQEXNHSQVPMLCSXGCGFYGNPRXNGMCSVCYKEHLQRQNSSNGRISPPAXSVSSLSESLPVQCXDGSVPEAQSALDSXSSSMQPSPVSNQSLLSESVASSQLDSXSVDKAVPEXEDVQASVSDXAQQPSEEQSKSLEKPKQKKNRCFMCRKKVGLXG

SEQ ID NO: 30130 - protein, 208 aa, Homo sapiens
  MOD_RES (5)..(5): Selenocysteine
  MOD_RES (16)..(16): Selenocysteine
  MOD_RES (26)..(26): Selenocysteine
  MOD_RES (53)..(53): Selenocysteine
  MOD_RES (67)..(67): Selenocysteine
  MOD_RES (81)..(81): Selenocysteine
  MOD_RES (108)..(108): Selenocysteine
  MOD_RES (117)..(117): Selenocysteine
  MOD_RES (127)..(127): Selenocysteine
  MOD_RES (159)..(159): Selenocysteine
MAQEXNHSQVPMLCSXGCGFYGNPRXNGMCSVCYKEHLQRQNSSNGRISPPAXSVSSLSESLPVQCXDGSVPEAQSALDSXSSSMQPSPVSNQSLLSESVASSQLDSXSVDKAVPEXEDVQASVSDXAQQPSEEQSKSLEKPKQKKNRCFMCRKKVGLXGFECRCGNVYCGVHRYSDVHNCSYNYKADAAEKIRKENPVVVGEKIQKI

SEQ ID NO: 30131 - protein, 177 aa, Homo sapiens
  MOD_RES (5)..(5): Selenocysteine
  MOD_RES (16)..(16): Selenocysteine
  MOD_RES (26)..(26): Selenocysteine
  MOD_RES (53)..(53): Selenocysteine
  MOD_RES (67)..(67): Selenocysteine
  MOD_RES (81)..(81): Selenocysteine
  MOD_RES (108)..(108): Selenocysteine
  MOD_RES (117)..(117): Selenocysteine
  MOD_RES (127)..(127): Selenocysteine
  MOD_RES (159)..(159): Selenocysteine
MAQEXNHSQVPMLCSXGCGFYGNPRXNGMCSVCYKEHLQRQNSSNGRISPPAXSVSSLSESLPVQCXDGSVPEAQSALDSXSSSMQPSPVSNQSLLSESVASSQLDSXSVDKAVPEXEDVQASVSDXAQQPSEEQSKSLEKPKQKKNRCFMCRKKVGLXGKDLNQMFKIKMMFYNNA

SEQ ID NO: 30132 - protein, 148 aa, Homo sapiens
  MOD_RES (5)..(5): Selenocysteine
  MOD_RES (16)..(16): Selenocysteine
  MOD_RES (26)..(26): Selenocysteine
  MOD_RES (53)..(53): Selenocysteine
  MOD_RES (67)..(67): Selenocysteine
  MOD_RES (81)..(81): Selenocysteine
  MOD_RES (108)..(108): Selenocysteine
  MOD_RES (117)..(117): Selenocysteine
MAQEXNHSQVPMLCSXGCGFYGNPRXNGMCSVCYKEHLQRQNSSNGRISPPAXSVSSLSESLPVQCXDGSVPEAQSALDSXSSSMQPSPVSNQSLLSESVASSQLDSXSVDKAVPEXEDVQGFECRCGNVYCGVHRYSDVHNCSYNYK

SEQ ID NO: 30133 - protein, 196 aa, Homo sapiens
  MOD_RES (5)..(5): Selenocysteine
  MOD_RES (16)..(16): Selenocysteine
  MOD_RES (26)..(26): Selenocysteine
  MOD_RES (55)..(55): Selenocysteine
  MOD_RES (69)..(69): Selenocysteine
  MOD_RES (96)..(96): Selenocysteine
  MOD_RES (105)..(105): Selenocysteine
  MOD_RES (115)..(115): Selenocysteine
  MOD_RES (147)..(147): Selenocysteine
MAQEXNHSQVPMLCSXGCGFYGNPRXNGMCSVCYKEHLQRQNSSNGRISPPVQCXDGSVPEAQSALDSXSSSMQPSPVSNQSLLSESVASSQLDSXSVDKAVPEXEDVQASVSDXAQQPSEEQSKSLEKPKQKKNRCFMCRKKVGLXGFECRCGNVYCGVHRYSDVHNCSYNYKADAAEKIRKENPVVVGEKIQKI

SEQ ID NO: 30134 - protein, 155 aa, Homo sapiens
  MOD_RES (21)..(21): Selenocysteine
  MOD_RES (32)..(32): Selenocysteine
  MOD_RES (42)..(42): Selenocysteine
  MOD_RES (69)..(69): Selenocysteine
  MOD_RES (83)..(83): Selenocysteine
  MOD_RES (97)..(97): Selenocysteine
  MOD_RES (124)..(124): Selenocysteine
  MOD_RES (133)..(133): Selenocysteine
  MOD_RES (143)..(143): Selenocysteine
MKGFIFLKAIGVQLRNMAQEXNHSQVPMLCSXGCGFYGNPRXNGMCSVCYKEHLQRQNSSNGRISPPAXSVSSLSESLPVQCXDGSVPEAQSALDSXSSSMQPSPVSNQSLLSESVASSQLDSXSVDKAVPEXEDVQASVSDXAQQPSEEQSKSL

SEQ ID NO: 30135 - protein, 158 aa, Homo sapiens
  MOD_RES (21)..(21): Selenocysteine
  MOD_RES (32)..(32): Selenocysteine
  MOD_RES (42)..(42): Selenocysteine
  MOD_RES (69)..(69): Selenocysteine
  MOD_RES (83)..(83): Selenocysteine
  MOD_RES (97)..(97): Selenocysteine
  MOD_RES (124)..(124): Selenocysteine
  MOD_RES (133)..(133): Selenocysteine
  MOD_RES (143)..(143): Selenocysteine
MKGFIFLKAIGVQLRNMAQEXNHSQVPMLCSXGCGFYGNPRXNGMCSVCYKEHLQRQNSSNGRISPPAXSVSSLSESLPVQCXDGSVPEAQSALDSXSSSMQPSPVSNQSLLSESVASSQLDSXSVDKAVPEXEDVQASVSDXAQQPSEEQSKSLEKP

SEQ ID NO: 30136 - protein, 175 aa, Homo sapiens
  MOD_RES (20)..(20): Selenocysteine
  MOD_RES (31)..(31): Selenocysteine
  MOD_RES (41)..(41): Selenocysteine
  MOD_RES (68)..(68): Selenocysteine
  MOD_RES (82)..(82): Selenocysteine
  MOD_RES (96)..(96): Selenocysteine
  MOD_RES (123)..(123): Selenocysteine
  MOD_RES (132)..(132): Selenocysteine
  MOD_RES (142)..(142): Selenocysteine
  MOD_RES (174)..(174): Selenocysteine
MLLLPNRDKGVQLRNMAQEXNHSQVPMLCSXGCGFYGNPRXNGMCSVCYKEHLQRQNSSNGRISPPAXSVSSLSESLPVQCXDGSVPEAQSALDSXSSSMQPSPVSNQSLLSESVASSQLDSXSVDKAVPEXEDVQASVSDXAQQPSEEQSKSLEKPKQKKNRCFMCRKKVGLXG

SEQ ID NO: 30137 - protein, 72 aa, Homo sapiens
  MOD_RES (28)..(28): Selenocysteine
  MOD_RES (37)..(37): Selenocysteine
  MOD_RES (42)..(42): Selenocysteine
  MOD_RES (57)..(57): Selenocysteine
  MOD_RES (68)..(68): Selenocysteine
MSIRSFLESIFRCKQYSGLLLEIQRLRXRNYCMQQEXLISSXYAKLGVQLRNMAQEXNHSQVPMLCSXGCGF

SEQ ID NO: 30138 - protein, 150 aa, Homo sapiens
  MOD_RES (42)..(42): Selenocysteine
  MOD_RES (51)..(51): Selenocysteine
  MOD_RES (69)..(69): Selenocysteine
  MOD_RES (74)..(74): Selenocysteine
  MOD_RES (86)..(86): Selenocysteine
  MOD_RES (116)..(116): Selenocysteine
  MOD_RES (140)..(140): Selenocysteine
MCKCCNLFSPNQSELLSHVSEKHMEEGVNVDEIIIPLRPLSXPEPPNSSKXGDEFLVMKRKRGRPKGSXKKSSXEEELAENIVSPXEDSPLAPEEGNSLPPSSLECSKCCRKFSNXRQLRKHICIIVLNLGEEEGEAGAXKIVPVEAGPP

SEQ ID NO: 30139 - protein, 1145 aa, Homo sapiens
  MOD_RES (42)..(42): Selenocysteine
  MOD_RES (51)..(51): Selenocysteine
  MOD_RES (69)..(69): Selenocysteine
  MOD_RES (74)..(74): Selenocysteine
  MOD_RES (86)..(86): Selenocysteine
  MOD_RES (116)..(116): Selenocysteine
  MOD_RES (166)..(166): Selenocysteine
  MOD_RES (193)..(193): Selenocysteine
  MOD_RES (202)..(202): Selenocysteine
  MOD_RES (214)..(214): Selenocysteine
  MOD_RES (217)..(217): Selenocysteine
  MOD_RES (221)..(222): Selenocysteine
  MOD_RES (240)..(240): Selenocysteine
  MOD_RES (254)..(254): Selenocysteine
  MOD_RES (260)..(260): Selenocysteine
  MOD_RES (282)..(282): Selenocysteine
  MOD_RES (310)..(310): Selenocysteine
  MOD_RES (322)..(322): Selenocysteine
  MOD_RES (383)..(383): Selenocysteine
  MOD_RES (430)..(430): Selenocysteine
  MOD_RES (463)..(463): Selenocysteine
  MOD_RES (479)..(479): Selenocysteine
  MOD_RES (528)..(528): Selenocysteine
  MOD_RES (558)..(558): Selenocysteine
  MOD_RES (567)..(568): Selenocysteine
  MOD_RES (591)..(591): Selenocysteine
  MOD_RES (614)..(614): Selenocysteine
  MOD_RES (620)..(620): Selenocysteine
  MOD_RES (682)..(682): Selenocysteine
  MOD_RES (684)..(684): Selenocysteine
  MOD_RES (701)..(701): Selenocysteine
  MOD_RES (717)..(717): Selenocysteine
  MOD_RES (751)..(751): Selenocysteine
  MOD_RES (753)..(753): Selenocysteine
  MOD_RES (769)..(769): Selenocysteine
  MOD_RES (790)..(790): Selenocysteine
  MOD_RES (797)..(797): Selenocysteine
  MOD_RES (811)..(811): Selenocysteine
  MOD_RES (839)..(839): Selenocysteine
  MOD_RES (848)..(848): Selenocysteine
  MOD_RES (906)..(906): Selenocysteine
  MOD_RES (921)..(921): Selenocysteine
  MOD_RES (924)..(924): Selenocysteine
  MOD_RES (939)..(939): Selenocysteine
  MOD_RES (948)..(948): Selenocysteine
  MOD_RES (957)..(957): Selenocysteine
  MOD_RES (962)..(962): Selenocysteine
  MOD_RES (1015)..(1015): Selenocysteine
  MOD_RES (1040)..(1040): Selenocysteine
  MOD_RES (1068)..(1068): Selenocysteine
  MOD_RES (1077)..(1077): Selenocysteine
  MOD_RES (1083)..(1083): Selenocysteine
  MOD_RES (1109)..(1109): Selenocysteine
  MOD_RES (1111)..(1111): Selenocysteine
  MOD_RES (1114)..(1114): Selenocysteine
MCKCCNLFSPNQSELLSHVSEKHMEEGVNVDEIIIPLRPLSXPEPPNSSKXGDEFLVMKRKRGRPKGSXKKSSXEEELAENIVSPXEDSPLAPEEGNSLPPSSLECSKCCRKFSNXRQLRKHICIIVLNLGEEEGEAGNESDLELEKKCKEDDREKASKRPRSQKXEKVQKISGKEARQLSGAKKPIISVVLXAHEAIPGAXKIVPVEAGPPEXGAXNSEXXSADLVPRRGYQEYAIQQXPYEQPMKSSRLGPXQLKIFXCEYCNKVFKFKHSLQAHLRIHXNEKPYKCPQCSYASAIKANLNVHLRKHXGEKFACDYCSFXCLSKGHLKVHIERVHKKIKQHCRFCKKKYSDVKNLIKHIRDAHDPQDKKVKEALDELCLMXREGKRQLLYDCHICERKFKNELDRDRHMLVHGDKWPFACELCGHGAXKYQALELHVRKHPFVYVCAVCRKKFVSSIRLRXHIKEVHGAAQEALVFXSSINQSFCLLEPGGDIQQEALGDQLQLVEEEFALQGVNALKEEACPGDXQLEEGRKEPEAPGEMPAPAVHLASPQAESXALPPCELEXXVVSSSDLHSQEVVSDDFLLKNDXSSAEAHAAPEKPPDMQHRSSVQXQGEVIXLLLSKAQSAGSDQESHGAQSPLGEGQNMAVLSAGDPDPSRCLRSNPAEASDLLPPVAGGGDXIXHQPDSCKAAPEHRSGIXAFMKVLNSLQKKQMNXSLCERIRKVYGDLECEYCGKLFWYQVHFDMHVRXHXREHLYYCSQCHYSSIXKNCLKRHVIQKHSNILLKCPXDGCDYSXPDKYKLQAHLKVHXALDKRSYSCPVCEKSFSEDRLIKSHIKXNHPEVSMSXISEVLGRRVQLKGLIGKRAMKCPYCDFYFMKNGSDLQRHIWAHEGVKPFKCSLCEYAXRSKSNLKAHMNRHSXEKXHLCDMCGKKFKSKGXLKSHKLLHXADGKQFKCXVCDYXAAQKPQLLRHMEQHVSFKPFRCAHCHYSCNISGSLKRHYNRKHPNEEYANVGXGELAAEVLIQQGGLKCPVCSFVYGXKWEFNRHLKNKHGLKVVEIDGDPKWEVXEEEPSSNHXVMIQEXVQQASVELAEQHHLVVSSDDVEGIEXVXVYXQGGEASEFIVYVQEAMQPVEEQAVEQPAQEL

SEQ ID NO: 30140 - protein, 1156 aa, Homo sapiens
  MOD_RES (42)..(42): Selenocysteine
  MOD_RES (51)..(51): Selenocysteine
  MOD_RES (69)..(69): Selenocysteine
  MOD_RES (74)..(74): Selenocysteine
  MOD_RES (86)..(86): Selenocysteine
  MOD_RES (116)..(116): Selenocysteine
  MOD_RES (166)..(166): Selenocysteine
  MOD_RES (193)..(193): Selenocysteine
  MOD_RES (202)..(202): Selenocysteine
  MOD_RES (214)..(214): Selenocysteine
  MOD_RES (217)..(217): Selenocysteine
  MOD_RES (221)..(222): Selenocysteine
  MOD_RES (240)..(240): Selenocysteine
  MOD_RES (254)..(254): Selenocysteine
  MOD_RES (260)..(260): Selenocysteine
  MOD_RES (282)..(282): Selenocysteine
  MOD_RES (310)..(310): Selenocysteine
  MOD_RES (322)..(322): Selenocysteine
  MOD_RES (383)..(383): Selenocysteine
  MOD_RES (430)..(430): Selenocysteine
  MOD_RES (463)..(463): Selenocysteine
  MOD_RES (479)..(479): Selenocysteine
  MOD_RES (528)..(528): Selenocysteine
  MOD_RES (558)..(558): Selenocysteine
  MOD_RES (567)..(568): Selenocysteine
  MOD_RES (591)..(591): Selenocysteine
  MOD_RES (614)..(614): Selenocysteine
  MOD_RES (620)..(620): Selenocysteine
  MOD_RES (682)..(682): Selenocysteine
  MOD_RES (684)..(684): Selenocysteine
  MOD_RES (701)..(701): Selenocysteine
  MOD_RES (717)..(717): Selenocysteine
  MOD_RES (751)..(751): Selenocysteine
  MOD_RES (753)..(753): Selenocysteine
  MOD_RES (769)..(769): Selenocysteine
  MOD_RES (790)..(790): Selenocysteine
  MOD_RES (797)..(797): Selenocysteine
  MOD_RES (811)..(811): Selenocysteine
  MOD_RES (839)..(839): Selenocysteine
  MOD_RES (848)..(848): Selenocysteine
  MOD_RES (906)..(906): Selenocysteine
  MOD_RES (921)..(921): Selenocysteine
  MOD_RES (924)..(924): Selenocysteine
  MOD_RES (939)..(939): Selenocysteine
  MOD_RES (948)..(948): Selenocysteine
  MOD_RES (957)..(957): Selenocysteine
  MOD_RES (962)..(962): Selenocysteine
  MOD_RES (1015)..(1015): Selenocysteine
  MOD_RES (1040)..(1040): Selenocysteine
  MOD_RES (1067)..(1067): Selenocysteine
  MOD_RES (1069)..(1069): Selenocysteine
  MOD_RES (1077)..(1077): Selenocysteine
  MOD_RES (1083)..(1083): Selenocysteine
  MOD_RES (1092)..(1092): Selenocysteine
  MOD_RES (1105)..(1105): Selenocysteine
  MOD_RES (1115)..(1115): Selenocysteine
MCKCCNLFSPNQSELLSHVSEKHMEEGVNVDEIIIPLRPLSXPEPPNSSKXGDEFLVMKRKRGRPKGSXKKSSXEEELAENIVSPXEDSPLAPEEGNSLPPSSLECSKCCRKFSNXRQLRKHICIIVLNLGEEEGEAGNESDLELEKKCKEDDREKASKRPRSQKXEKVQKISGKEARQLSGAKKPIISVVLXAHEAIPGAXKIVPVEAGPPEXGAXNSEXXSADLVPRRGYQEYAIQQXPYEQPMKSSRLGPXQLKIFXCEYCNKVFKFKHSLQAHLRIHXNEKPYKCPQCSYASAIKANLNVHLRKHXGEKFACDYCSFXCLSKGHLKVHIERVHKKIKQHCRFCKKKYSDVKNLIKHIRDAHDPQDKKVKEALDELCLMXREGKRQLLYDCHICERKFKNELDRDRHMLVHGDKWPFACELCGHGAXKYQALELHVRKHPFVYVCAVCRKKFVSSIRLRXHIKEVHGAAQEALVFXSSINQSFCLLEPGGDIQQEALGDQLQLVEEEFALQGVNALKEEACPGDXQLEEGRKEPEAPGEMPAPAVHLASPQAESXALPPCELEXXVVSSSDLHSQEVVSDDFLLKNDXSSAEAHAAPEKPPDMQHRSSVQXQGEVIXLLLSKAQSAGSDQESHGAQSPLGEGQNMAVLSAGDPDPSRCLRSNPAEASDLLPPVAGGGDXIXHQPDSCKAAPEHRSGIXAFMKVLNSLQKKQMNXSLCERIRKVYGDLECEYCGKLFWYQVHFDMHVRXHXREHLYYCSQCHYSSIXKNCLKRHVIQKHSNILLKCPXDGCDYSXPDKYKLQAHLKVHXALDKRSYSCPVCEKSFSEDRLIKSHIKXNHPEVSMSXISEVLGRRVQLKGLIGKRAMKCPYCDFYFMKNGSDLQRHIWAHEGVKPFKCSLCEYAXRSKSNLKAHMNRHSXEKXHLCDMCGKKFKSKGXLKSHKLLHXADGKQFKCXVCDYXAAQKPQLLRHMEQHVSFKPFRCAHCHYSCNISGSLKRHYNRKHPNEEYANVGXGELAAEVLIQQGGLKCPVCSFVYGXKWEFNRHLKNKHGLKVVEIDGDPKWEXAXEAPEEPSXQYLHIXEAEEDVQGXQAAVAALQDLRYXSESGDRLDPXAVNILQQLQPHGHDPGDGPASVRGACRAAPPGGVLRRRGGH

SEQ ID NO: 30141 - protein, 1231 aa, Homo sapiens
  MOD_RES (42)..(42): Selenocysteine
  MOD_RES (51)..(51): Selenocysteine
  MOD_RES (69)..(69): Selenocysteine
  MOD_RES (74)..(74): Selenocysteine
  MOD_RES (86)..(86): Selenocysteine
  MOD_RES (116)..(116): Selenocysteine
  MOD_RES (166)..(166): Selenocysteine
  MOD_RES (193)..(193): Selenocysteine
  MOD_RES (202)..(202): Selenocysteine
  MOD_RES (214)..(214): Selenocysteine
  MOD_RES (217)..(217): Selenocysteine
  MOD_RES (221)..(222): Selenocysteine
  MOD_RES (240)..(240): Selenocysteine
  MOD_RES (254)..(254): Selenocysteine
  MOD_RES (260)..(260): Selenocysteine
  MOD_RES (282)..(282): Selenocysteine
  MOD_RES (310)..(310): Selenocysteine
  MOD_RES (322)..(322): Selenocysteine
  MOD_RES (383)..(383): Selenocysteine
  MOD_RES (430)..(430): Selenocysteine
  MOD_RES (463)..(463): Selenocysteine
  MOD_RES (479)..(479): Selenocysteine
  MOD_RES (528)..(528): Selenocysteine
  MOD_RES (558)..(558): Selenocysteine
  MOD_RES (567)..(568): Selenocysteine
  MOD_RES (591)..(591): Selenocysteine
  MOD_RES (614)..(614): Selenocysteine
  MOD_RES (620)..(620): Selenocysteine
  MOD_RES (682)..(682): Selenocysteine
  MOD_RES (684)..(684): Selenocysteine
  MOD_RES (701)..(701): Selenocysteine
  MOD_RES (717)..(717): Selenocysteine
  MOD_RES (751)..(751): Selenocysteine
  MOD_RES (753)..(753): Selenocysteine
  MOD_RES (769)..(769): Selenocysteine
  MOD_RES (790)..(790): Selenocysteine
  MOD_RES (797)..(797): Selenocysteine
  MOD_RES (811)..(811): Selenocysteine
  MOD_RES (839)..(839): Selenocysteine
  MOD_RES (848)..(848): Selenocysteine
  MOD_RES (906)..(906): Selenocysteine
  MOD_RES (921)..(921): Selenocysteine
  MOD_RES (924)..(924): Selenocysteine
  MOD_RES (939)..(939): Selenocysteine
  MOD_RES (948)..(948): Selenocysteine
  MOD_RES (957)..(957): Selenocysteine
  MOD_RES (962)..(962): Selenocysteine
  MOD_RES (1015)..(1015): Selenocysteine
  MOD_RES (1040)..(1040): Selenocysteine
  MOD_RES (1067)..(1067): Selenocysteine
  MOD_RES (1069)..(1069): Selenocysteine
  MOD_RES (1077)..(1077): Selenocysteine
  MOD_RES (1083)..(1083): Selenocysteine
  MOD_RES (1092)..(1092): Selenocysteine
  MOD_RES (1105)..(1105): Selenocysteine
  MOD_RES (1115)..(1115): Selenocysteine
  MOD_RES (1130)..(1130): Selenocysteine
  MOD_RES (1134)..(1134): Selenocysteine
  MOD_RES (1146)..(1146): Selenocysteine
  MOD_RES (1148)..(1148): Selenocysteine
  MOD_RES (1154)..(1154): Selenocysteine
  MOD_RES (1163)..(1163): Selenocysteine
  MOD_RES (1169)..(1169): Selenocysteine
  MOD_RES (1195)..(1195): Selenocysteine
  MOD_RES (1197)..(1197): Selenocysteine
  MOD_RES (1200)..(1200): Selenocysteine
MCKCCNLFSPNQSELLSHVSEKHMEEGVNVDEIIIPLRPLSXPEPPNSSKXGDEFLVMKRKRGRPKGSXKKSSXEEELAENIVSPXEDSPLAPEEGNSLPPSSLECSKCCRKFSNXRQLRKHICIIVLNLGEEEGEAGNESDLELEKKCKEDDREKASKRPRSQKXEKVQKISGKEARQLSGAKKPIISVVLXAHEAIPGAXKIVPVEAGPPEXGAXNSEXXSADLVPRRGYQEYAIQQXPYEQPMKSSRLGPXQLKIFXCEYCNKVFKFKHSLQAHLRIHXNEKPYKCPQCSYASAIKANLNVHLRKHXGEKFACDYCSFXCLSKGHLKVHIERVHKKIKQHCRFCKKKYSDVKNLIKHIRDAHDPQDKKVKEALDELCLMXREGKRQLLYDCHICERKFKNELDRDRHMLVHGDKWPFACELCGHGAXKYQALELHVRKHPFVYVCAVCRKKFVSSIRLRXHIKEVHGAAQEALVFXSSINQSFCLLEPGGDIQQEALGDQLQLVEEEFALQGVNALKEEACPGDXQLEEGRKEPEAPGEMPAPAVHLASPQAESXALPPCELEXXVVSSSDLHSQEVVSDDFLLKNDXSSAEAHAAPEKPPDMQHRSSVQXQGEVIXLLLSKAQSAGSDQESHGAQSPLGEGQNMAVLSAGDPDPSRCLRSNPAEASDLLPPVAGGGDXIXHQPDSCKAAPEHRSGIXAFMKVLNSLQKKQMNXSLCERIRKVYGDLECEYCGKLFWYQVHFDMHVRXHXREHLYYCSQCHYSSIXKNCLKRHVIQKHSNILLKCPXDGCDYSXPDKYKLQAHLKVHXALDKRSYSCPVCEKSFSEDRLIKSHIKXNHPEVSMSXISEVLGRRVQLKGLIGKRAMKCPYCDFYFMKNGSDLQRHIWAHEGVKPFKCSLCEYAXRSKSNLKAHMNRHSXEKXHLCDMCGKKFKSKGXLKSHKLLHXADGKQFKCXVCDYXAAQKPQLLRHMEQHVSFKPFRCAHCHYSCNISGSLKRHYNRKHPNEEYANVGXGELAAEVLIQQGGLKCPVCSFVYGXKWEFNRHLKNKHGLKVVEIDGDPKWEXAXEAPEEPSXQYLHIXEAEEDVQGXQAAVAALQDLRYXSESGDRLDPXAVNILQQIIELGAEXHDAXALASVVAMAPGXVXVVKQVXEEEPSSNHXVMIQEXVQQASVELAEQHHLVVSSDDVEGIEXVXVYXQGGEASEFIVYVQEAMQPVEEQAVEQPAQEL

SEQ ID NO: 30142 - protein, 1181 aa, Homo sapiens
  MOD_RES (3)..(3): Selenocysteine
  MOD_RES (9)..(9): Selenocysteine
  MOD_RES (54)..(54): Selenocysteine
  MOD_RES (63)..(63): Selenocysteine
  MOD_RES (81)..(81): Selenocysteine
  MOD_RES (86)..(86): Selenocysteine
  MOD_RES (98)..(98): Selenocysteine
  MOD_RES (128)..(128): Selenocysteine
  MOD_RES (152)..(152): Selenocysteine
  MOD_RES (164)..(164): Selenocysteine
  MOD_RES (167)..(167): Selenocysteine
  MOD_RES (171)..(172): Selenocysteine
  MOD_RES (190)..(190): Selenocysteine
  MOD_RES (204)..(204): Selenocysteine
  MOD_RES (210)..(210): Selenocysteine
  MOD_RES (232)..(232): Selenocysteine
  MOD_RES (260)..(260): Selenocysteine
  MOD_RES (272)..(272): Selenocysteine
  MOD_RES (333)..(333): Selenocysteine
  MOD_RES (380)..(380): Selenocysteine
  MOD_RES (413)..(413): Selenocysteine
  MOD_RES (429)..(429): Selenocysteine
  MOD_RES (478)..(478): Selenocysteine
  MOD_RES (508)..(508): Selenocysteine
  MOD_RES (517)..(518): Selenocysteine
  MOD_RES (541)..(541): Selenocysteine
  MOD_RES (564)..(564): Selenocysteine
  MOD_RES (570)..(570): Selenocysteine
  MOD_RES (632)..(632): Selenocysteine
  MOD_RES (634)..(634): Selenocysteine
  MOD_RES (651)..(651): Selenocysteine
  MOD_RES (667)..(667): Selenocysteine
  MOD_RES (701)..(701): Selenocysteine
  MOD_RES (703)..(703): Selenocysteine
  MOD_RES (719)..(719): Selenocysteine
  MOD_RES (740)..(740): Selenocysteine
  MOD_RES (747)..(747): Selenocysteine
  MOD_RES (761)..(761): Selenocysteine
  MOD_RES (789)..(789): Selenocysteine
  MOD_RES (798)..(798): Selenocysteine
  MOD_RES (856)..(856): Selenocysteine
  MOD_RES (871)..(871): Selenocysteine
  MOD_RES (874)..(874): Selenocysteine
  MOD_RES (889)..(889): Selenocysteine
  MOD_RES (898)..(898): Selenocysteine
  MOD_RES (907)..(907): Selenocysteine
  MOD_RES (912)..(912): Selenocysteine
  MOD_RES (965)..(965): Selenocysteine
  MOD_RES (990)..(990): Selenocysteine
  MOD_RES (1017)..(1017): Selenocysteine
  MOD_RES (1019)..(1019): Selenocysteine
  MOD_RES (1027)..(1027): Selenocysteine
  MOD_RES (1033)..(1033): Selenocysteine
  MOD_RES (1042)..(1042): Selenocysteine
  MOD_RES (1055)..(1055): Selenocysteine
  MOD_RES (1065)..(1065): Selenocysteine
  MOD_RES (1080)..(1080): Selenocysteine
  MOD_RES (1084)..(1084): Selenocysteine
  MOD_RES (1096)..(1096): Selenocysteine
  MOD_RES (1098)..(1098): Selenocysteine
  MOD_RES (1104)..(1104): Selenocysteine
  MOD_RES (1113)..(1113): Selenocysteine
  MOD_RES (1119)..(1119): Selenocysteine
  MOD_RES (1145)..(1145): Selenocysteine
  MOD_RES (1147)..(1147): Selenocysteine
  MOD_RES (1150)..(1150): Selenocysteine
MEXRAAENXAIFMCKCCNLFSPNQSELLSHVSEKHMEEGVNVDEIIIPLRPLSXPEPPNSSKXGDEFLVMKRKRGRPKGSXKKSSXEEELAENIVSPXEDSPLAPEEGNSLPPSSLECSKCCRKFSNXRQLRKHICIIVLNLGEEEGEAGAXKIVPVEAGPPEXGAXNSEXXSADLVPRRGYQEYAIQQXPYEQPMKSSRLGPXQLKIFXCEYCNKVFKFKHSLQAHLRIHXNEKPYKCPQCSYASAIKANLNVHLRKHXGEKFACDYCSFXCLSKGHLKVHIERVHKKIKQHCRFCKKKYSDVKNLIKHIRDAHDPQDKKVKEALDELCLMXREGKRQLLYDCHICERKFKNELDRDRHMLVHGDKWPFACELCGHGAXKYQALELHVRKHPFVYVCAVCRKKFVSSIRLRXHIKEVHGAAQEALVFXSSINQSFCLLEPGGDIQQEALGDQLQLVEEEFALQGVNALKEEACPGDXQLEEGRKEPEAPGEMPAPAVHLASPQAESXALPPCELEXXVVSSSDLHSQEVVSDDFLLKNDXSSAEAHAAPEKPPDMQHRSSVQXQGEVIXLLLSKAQSAGSDQESHGAQSPLGEGQNMAVLSAGDPDPSRCLRSNPAEASDLLPPVAGGGDXIXHQPDSCKAAPEHRSGIXAFMKVLNSLQKKQMNXSLCERIRKVYGDLECEYCGKLFWYQVHFDMHVRXHXREHLYYCSQCHYSSIXKNCLKRHVIQKHSNILLKCPXDGCDYSXPDKYKLQAHLKVHXALDKRSYSCPVCEKSFSEDRLIKSHIKXNHPEVSMSXISEVLGRRVQLKGLIGKRAMKCPYCDFYFMKNGSDLQRHIWAHEGVKPFKCSLCEYAXRSKSNLKAHMNRHSXEKXHLCDMCGKKFKSKGXLKSHKLLHXADGKQFKCXVCDYXAAQKPQLLRHMEQHVSFKPFRCAHCHYSCNISGSLKRHYNRKHPNEEYANVGXGELAAEVLIQQGGLKCPVCSFVYGXKWEFNRHLKNKHGLKVVEIDGDPKWEXAXEAPEEPSXQYLHIXEAEEDVQGXQAAVAALQDLRYXSESGDRLDPXAVNILQQIIELGAEXHDAXALASVVAMAPGXVXVVKQVXEEEPSSNHXVMIQEXVQQASVELAEQHHLVVSSDDVEGIEXVXVYXQGGEASEFIVYVQEAMQPVEEQAVEQPAQEL

SEQ ID NO: 30143 - protein, 998 aa, Homo sapiens
  MOD_RES (3)..(3): Selenocysteine
  MOD_RES (9)..(9): Selenocysteine
  MOD_RES (54)..(54): Selenocysteine
  MOD_RES (63)..(63): Selenocysteine
  MOD_RES (81)..(81): Selenocysteine
  MOD_RES (86)..(86): Selenocysteine
  MOD_RES (98)..(98): Selenocysteine
  MOD_RES (128)..(128): Selenocysteine
  MOD_RES (178)..(178): Selenocysteine
  MOD_RES (205)..(205): Selenocysteine
  MOD_RES (214)..(214): Selenocysteine
  MOD_RES (226)..(226): Selenocysteine
  MOD_RES (229)..(229): Selenocysteine
  MOD_RES (233)..(234): Selenocysteine
  MOD_RES (252)..(252): Selenocysteine
  MOD_RES (266)..(266): Selenocysteine
  MOD_RES (272)..(272): Selenocysteine
  MOD_RES (294)..(294): Selenocysteine
  MOD_RES (322)..(322): Selenocysteine
  MOD_RES (334)..(334): Selenocysteine
  MOD_RES (395)..(395): Selenocysteine
  MOD_RES (442)..(442): Selenocysteine
  MOD_RES (475)..(475): Selenocysteine
  MOD_RES (491)..(491): Selenocysteine
  MOD_RES (540)..(540): Selenocysteine
  MOD_RES (570)..(570): Selenocysteine
  MOD_RES (579)..(580): Selenocysteine
  MOD_RES (603)..(603): Selenocysteine
  MOD_RES (626)..(626): Selenocysteine
  MOD_RES (632)..(632): Selenocysteine
  MOD_RES (694)..(694): Selenocysteine
  MOD_RES (696)..(696): Selenocysteine
  MOD_RES (713)..(713): Selenocysteine
  MOD_RES (729)..(729): Selenocysteine
  MOD_RES (763)..(763): Selenocysteine
  MOD_RES (765)..(765): Selenocysteine
  MOD_RES (781)..(781): Selenocysteine
  MOD_RES (802)..(802): Selenocysteine
  MOD_RES (809)..(809): Selenocysteine
  MOD_RES (823)..(823): Selenocysteine
  MOD_RES (851)..(851): Selenocysteine
  MOD_RES (860)..(860): Selenocysteine
  MOD_RES (918)..(918): Selenocysteine
  MOD_RES (933)..(933): Selenocysteine
  MOD_RES (936)..(936): Selenocysteine
  MOD_RES (951)..(951): Selenocysteine
  MOD_RES (960)..(960): Selenocysteine
  MOD_RES (969)..(969): Selenocysteine
  MOD_RES (974)..(974): Selenocysteine
MEXRAAENXAIFMCKCCNLFSPNQSELLSHVSEKHMEEGVNVDEIIIPLRPLSXPEPPNSSKXGDEFLVMKRKRGRPKGSXKKSSXEEELAENIVSPXEDSPLAPEEGNSLPPSSLECSKCCRKFSNXRQLRKHICIIVLNLGEEEGEAGNESDLELEKKCKEDDREKASKRPRSQKXEKVQKISGKEARQLSGAKKPIISVVLXAHEAIPGAXKIVPVEAGPPEXGAXNSEXXSADLVPRRGYQEYAIQQXPYEQPMKSSRLGPXQLKIFXCEYCNKVFKFKHSLQAHLRIHXNEKPYKCPQCSYASAIKANLNVHLRKHXGEKFACDYCSFXCLSKGHLKVHIERVHKKIKQHCRFCKKKYSDVKNLIKHIRDAHDPQDKKVKEALDELCLMXREGKRQLLYDCHICERKFKNELDRDRHMLVHGDKWPFACELCGHGAXKYQALELHVRKHPFVYVCAVCRKKFVSSIRLRXHIKEVHGAAQEALVFXSSINQSFCLLEPGGDIQQEALGDQLQLVEEEFALQGVNALKEEACPGDXQLEEGRKEPEAPGEMPAPAVHLASPQAESXALPPCELEXXVVSSSDLHSQEVVSDDFLLKNDXSSAEAHAAPEKPPDMQHRSSVQXQGEVIXLLLSKAQSAGSDQESHGAQSPLGEGQNMAVLSAGDPDPSRCLRSNPAEASDLLPPVAGGGDXIXHQPDSCKAAPEHRSGIXAFMKVLNSLQKKQMNXSLCERIRKVYGDLECEYCGKLFWYQVHFDMHVRXHXREHLYYCSQCHYSSIXKNCLKRHVIQKHSNILLKCPXDGCDYSXPDKYKLQAHLKVHXALDKRSYSCPVCEKSFSEDRLIKSHIKXNHPEVSMSXISEVLGRRVQLKGLIGKRAMKCPYCDFYFMKNGSDLQRHIWAHEGVKPFKCSLCEYAXRSKSNLKAHMNRHSXEKXHLCDMCGKKFKSKGXLKSHKLLHXADGKQFKCXVCDYXAAQKPQLLRHMEQHVSFKKRSIAL

SEQ ID NO: 30144 - protein, 1243 aa, Homo sapiens
  MOD_RES (3)..(3): Selenocysteine
  MOD_RES (9)..(9): Selenocysteine
  MOD_RES (54)..(54): Selenocysteine
  MOD_RES (63)..(63): Selenocysteine
  MOD_RES (81)..(81): Selenocysteine
  MOD_RES (86)..(86): Selenocysteine
  MOD_RES (98)..(98): Selenocysteine
  MOD_RES (128)..(128): Selenocysteine
  MOD_RES (178)..(178): Selenocysteine
  MOD_RES (205)..(205): Selenocysteine
  MOD_RES (214)..(214): Selenocysteine
  MOD_RES (226)..(226): Selenocysteine
  MOD_RES (229)..(229): Selenocysteine
  MOD_RES (233)..(234): Selenocysteine
  MOD_RES (252)..(252): Selenocysteine
  MOD_RES (266)..(266): Selenocysteine
  MOD_RES (272)..(272): Selenocysteine
  MOD_RES (294)..(294): Selenocysteine
  MOD_RES (322)..(322): Selenocysteine
  MOD_RES (334)..(334): Selenocysteine
  MOD_RES (395)..(395): Selenocysteine
  MOD_RES (442)..(442): Selenocysteine
  MOD_RES (475)..(475): Selenocysteine
  MOD_RES (491)..(491): Selenocysteine
  MOD_RES (540)..(540): Selenocysteine
  MOD_RES (570)..(570): Selenocysteine
  MOD_RES (579)..(580): Selenocysteine
  MOD_RES (603)..(603): Selenocysteine
  MOD_RES (626)..(626): Selenocysteine
  MOD_RES (632)..(632): Selenocysteine
  MOD_RES (694)..(694): Selenocysteine
  MOD_RES (696)..(696): Selenocysteine
  MOD_RES (713)..(713): Selenocysteine
  MOD_RES (729)..(729): Selenocysteine
  MOD_RES (763)..(763): Selenocysteine
  MOD_RES (765)..(765): Selenocysteine
  MOD_RES (781)..(781): Selenocysteine
  MOD_RES (802)..(802): Selenocysteine
  MOD_RES (809)..(809): Selenocysteine
  MOD_RES (823)..(823): Selenocysteine
  MOD_RES (851)..(851): Selenocysteine
  MOD_RES (860)..(860): Selenocysteine
  MOD_RES (918)..(918): Selenocysteine
  MOD_RES (933)..(933): Selenocysteine
  MOD_RES (936)..(936): Selenocysteine
  MOD_RES (951)..(951): Selenocysteine
  MOD_RES (960)..(960): Selenocysteine
  MOD_RES (969)..(969): Selenocysteine
  MOD_RES (974)..(974): Selenocysteine
  MOD_RES (1027)..(1027): Selenocysteine
  MOD_RES (1052)..(1052): Selenocysteine
  MOD_RES (1079)..(1079): Selenocysteine
  MOD_RES (1081)..(1081): Selenocysteine
  MOD_RES (1089)..(1089): Selenocysteine
  MOD_RES (1095)..(1095): Selenocysteine
  MOD_RES (1104)..(1104): Selenocysteine
  MOD_RES (1117)..(1117): Selenocysteine
  MOD_RES (1127)..(1127): Selenocysteine
  MOD_RES (1142)..(1142): Selenocysteine
  MOD_RES (1146)..(1146): Selenocysteine
  MOD_RES (1158)..(1158): Selenocysteine
  MOD_RES (1160)..(1160): Selenocysteine
  MOD_RES (1166)..(1166): Selenocysteine
  MOD_RES (1175)..(1175): Selenocysteine
  MOD_RES (1181)..(1181): Selenocysteine
  MOD_RES (1207)..(1207): Selenocysteine
  MOD_RES (1209)..(1209): Selenocysteine
  MOD_RES (1212)..(1212): Selenocysteine
MEXRAAENXAIFMCKCCNLFSPNQSELLSHVSEKHMEEGVNVDEIIIPLRPLSXPEPPNSSKXGDEFLVMKRKRGRPKGSXKKSSXEEELAENIVSPXEDSPLAPEEGNSLPPSSLECSKCCRKFSNXRQLRKHICIIVLNLGEEEGEAGNESDLELEKKCKEDDREKASKRPRSQKXEKVQKISGKEARQLSGAKKPIISVVLXAHEAIPGAXKIVPVEAGPPEXGAXNSEXXSADLVPRRGYQEYAIQQXPYEQPMKSSRLGPXQLKIFXCEYCNKVFKFKHSLQAHLRIHXNEKPYKCPQCSYASAIKANLNVHLRKHXGEKFACDYCSFXCLSKGHLKVHIERVHKKIKQHCRFCKKKYSDVKNLIKHIRDAHDPQDKKVKEALDELCLMXREGKRQLLYDCHICERKFKNELDRDRHMLVHGDKWPFACELCGHGAXKYQALELHVRKHPFVYVCAVCRKKFVSSIRLRXHIKEVHGAAQEALVFXSSINQSFCLLEPGGDIQQEALGDQLQLVEEEFALQGVNALKEEACPGDXQLEEGRKEPEAPGEMPAPAVHLASPQAESXALPPCELEXXVVSSSDLHSQEVVSDDFLLKNDXSSAEAHAAPEKPPDMQHRSSVQXQGEVIXLLLSKAQSAGSDQESHGAQSPLGEGQNMAVLSAGDPDPSRCLRSNPAEASDLLPPVAGGGDXIXHQPDSCKAAPEHRSGIXAFMKVLNSLQKKQMNXSLCERIRKVYGDLECEYCGKLFWYQVHFDMHVRXHXREHLYYCSQCHYSSIXKNCLKRHVIQKHSNILLKCPXDGCDYSXPDKYKLQAHLKVHXALDKRSYSCPVCEKSFSEDRLIKSHIKXNHPEVSMSXISEVLGRRVQLKGLIGKRAMKCPYCDFYFMKNGSDLQRHIWAHEGVKPFKCSLCEYAXRSKSNLKAHMNRHSXEKXHLCDMCGKKFKSKGXLKSHKLLHXADGKQFKCXVCDYXAAQKPQLLRHMEQHVSFKPFRCAHCHYSCNISGSLKRHYNRKHPNEEYANVGXGELAAEVLIQQGGLKCPVCSFVYGXKWEFNRHLKNKHGLKVVEIDGDPKWEXAXEAPEEPSXQYLHIXEAEEDVQGXQAAVAALQDLRYXSESGDRLDPXAVNILQQIIELGAEXHDAXALASVVAMAPGXVXVVKQVXEEEPSSNHXVMIQEXVQQASVELAEQHHLVVSSDDVEGIEXVXVYXQGGEASEFIVYVQEAMQPVEEQAVEQPAQEL

SEQ ID NO: 30145 - protein, 58 aa, Homo sapiens
  MOD_RES (3)..(3): Selenocysteine
  MOD_RES (18)..(18): Selenocysteine
MEXRAAGLLEFAGGPLHXLFAWVSPVEAAEQQRLLPVPASGSFVPEGHLPDASQSSPV

SEQ ID NO: 30146 - protein, 196 aa, Homo sapiens
  MOD_RES (2)..(2): Selenocysteine
  MOD_RES (19)..(19): Selenocysteine
  MOD_RES (24)..(24): Selenocysteine
  MOD_RES (36)..(36): Selenocysteine
  MOD_RES (66)..(66): Selenocysteine
  MOD_RES (116)..(116): Selenocysteine
  MOD_RES (143)..(143): Selenocysteine
  MOD_RES (152)..(152): Selenocysteine
  MOD_RES (164)..(164): Selenocysteine
  MOD_RES (167)..(167): Selenocysteine
  MOD_RES (171)..(172): Selenocysteine
  MOD_RES (190)..(190): Selenocysteine
MXREFLVMKRKRGRPKGSXKKSSXEEELAENIVSPXEDSPLAPEEGNSLPPSSLECSKCCRKFSNXRQLRKHICIIVLNLGEEEGEAGNESDLELEKKCKEDDREKASKRPRSQKXEKVQKISGKEARQLSGAKKPIISVVLXAHEAIPGAXKIVPVEAGPPEXGAXNSEXXSADLVPRRGYQEYAIQQXPYEQPM

SEQ ID NO: 30147 - protein, 163 aa, Homo sapiens
  MOD_RES (9)..(9): Selenocysteine
  MOD_RES (47)..(47): Selenocysteine
  MOD_RES (62)..(62): Selenocysteine
  MOD_RES (66)..(66): Selenocysteine
  MOD_RES (78)..(78): Selenocysteine
  MOD_RES (80)..(80): Selenocysteine
  MOD_RES (86)..(86): Selenocysteine
  MOD_RES (95)..(95): Selenocysteine
  MOD_RES (101)..(101): Selenocysteine
  MOD_RES (127)..(127): Selenocysteine
  MOD_RES (129)..(129): Selenocysteine
  MOD_RES (132)..(132): Selenocysteine
NLWNFLAHXFIESAAERACWVLPGVQLRGQPHVRMLGLRARDRLDPXAVNILQQIIELGAEXHDAXALASVVAMAPGXVXVVKQVXEEEPSSNHXVMIQEXVQQASVELAEQHHLVVSSDDVEGIEXVXVYXQGGEASEFIVYVQEAMQPVEEQAVEQPAQEL

SEQ ID NO: 30148 - protein, 98 aa, Homo sapiens
  MOD_RES (1)..(1): Any amino acid
  MOD_RES (16)..(16): Selenocysteine
  MOD_RES (18)..(18): Selenocysteine
  MOD_RES (34)..(34): Selenocysteine
  MOD_RES (55)..(55): Selenocysteine
  MOD_RES (62)..(62): Selenocysteine
  MOD_RES (76)..(76): Selenocysteine
  MOD_RES (87)..(87): Selenocysteine
XKLFWYQVHFDMHVRXHXREHLYYCSQCHYSSIXKNCLKRHVIQKHSNILLKCPXDGCDYSXPDKYKLQAHLKVHXALVFGGGSCNXMNECLFLQILI

SEQ ID NO: 30149 - protein, 246 aa, Homo sapiens
  MOD_RES (3)..(3): Selenocysteine
  MOD_RES (9)..(10): Selenocysteine
  MOD_RES (12)..(13): Selenocysteine
  MOD_RES (27)..(27): Selenocysteine
  MOD_RES (32)..(32): Selenocysteine
  MOD_RES (38)..(38): Selenocysteine
  MOD_RES (47)..(47): Selenocysteine
  MOD_RES (117)..(117): Selenocysteine
  MOD_RES (167)..(167): Selenocysteine
  MOD_RES (192)..(192): Selenocysteine
MAXLNSASXXGXXPSPGHNAPSLPSDXFSSSXPSDPVXKDPPAASSXSENMRSSEPGGQLLESGCGLVPPKEIGEPQEGPDCGHFPPNDPGVEKDKEQEEEEEGLPPMDLSNHLFFXAGGEAYLVAKLSLPGGSELLLPKGFPWGEAGIKEEPSLPFLAYPPPSHLXALHIQHGFDPIQGFSSSDQILSHDXSAPSPAACEERHGAFWSYQLAPNPPGDPKDGPMGNSGGNHVAVFWLCLLCRLGF

SEQ ID NO: 30150 - protein, 361 aa, Homo sapiens
  MOD_RES (3)..(3): Selenocysteine
  MOD_RES (9)..(10): Selenocysteine
  MOD_RES (12)..(13): Selenocysteine
  MOD_RES (27)..(27): Selenocysteine
  MOD_RES (32)..(32): Selenocysteine
  MOD_RES (38)..(38): Selenocysteine
  MOD_RES (47)..(47): Selenocysteine
  MOD_RES (117)..(117): Selenocysteine
  MOD_RES (167)..(167): Selenocysteine
  MOD_RES (192)..(192): Selenocysteine
  MOD_RES (256)..(256): Selenocysteine
  MOD_RES (264)..(264): Selenocysteine
  MOD_RES (311)..(311): Selenocysteine
  MOD_RES (321)..(321): Selenocysteine
  MOD_RES (350)..(350): Selenocysteine
  MOD_RES (352)..(352): Selenocysteine
  MOD_RES (358)..(358): Selenocysteine
MAXLNSASXXGXXPSPGHNAPSLPSDXFSSSXPSDPVXKDPPAASSXSENMRSSEPGGQLLESGCGLVPPKEIGEPQEGPDCGHFPPNDPGVEKDKEQEEEEEGLPPMDLSNHLFFXAGGEAYLVAKLSLPGGSELLLPKGFPWGEAGIKEEPSLPFLAYPPPSHLXALHIQHGFDPIQGFSSSDQILSHDXSAPSPAACEERHGAFWSYQLAPNPPGDPKDGPMGNSGGNHVAVFWLCLLCRLGFSKPQAFMDHXQSHGVKLXPAQYQGLSGSPAVLQEGDEGCKALISFLEPKLPARPSSDIPLDNSSXVNMEANVAQXEDGPPEAEVQALILLDEEVMALSPPSPPXAXWDPSPXQAK

SEQ ID NO: 30151 - protein, 408 aa, Homo sapiens
  MOD_RES (3)..(3): Selenocysteine
  MOD_RES (9)..(10): Selenocysteine
  MOD_RES (12)..(13): Selenocysteine
  MOD_RES (27)..(27): Selenocysteine
  MOD_RES (32)..(32): Selenocysteine
  MOD_RES (38)..(38): Selenocysteine
  MOD_RES (47)..(47): Selenocysteine
  MOD_RES (117)..(117): Selenocysteine
  MOD_RES (167)..(167): Selenocysteine
  MOD_RES (192)..(192): Selenocysteine
  MOD_RES (256)..(256): Selenocysteine
  MOD_RES (264)..(264): Selenocysteine
  MOD_RES (311)..(311): Selenocysteine
  MOD_RES (321)..(321): Selenocysteine
  MOD_RES (350)..(350): Selenocysteine
  MOD_RES (352)..(352): Selenocysteine
  MOD_RES (356)..(357): Selenocysteine
  MOD_RES (374)..(374): Selenocysteine
  MOD_RES (380)..(380): Selenocysteine
MAXLNSASXXGXXPSPGHNAPSLPSDXFSSSXPSDPVXKDPPAASSXSENMRSSEPGGQLLESGCGLVPPKEIGEPQEGPDCGHFPPNDPGVEKDKEQEEEEEGLPPMDLSNHLFFXAGGEAYLVAKLSLPGGSELLLPKGFPWGEAGIKEEPSLPFLAYPPPSHLXALHIQHGFDPIQGFSSSDQILSHDXSAPSPAACEERHGAFWSYQLAPNPPGDPKDGPMGNSGGNHVAVFWLCLLCRLGFSKPQAFMDHXQSHGVKLXPAQYQGLSGSPAVLQEGDEGCKALISFLEPKLPARPSSDIPLDNSSXVNMEANVAQXEDGPPEAEVQALILLDEEVMALSPPSPPXAXWGYXXACCVRGRHPPAWLCCNXCAHLPXAMPRPRGVCSCYRMAQPLRKDSQLFRAS

SEQ ID NO: 30152 - protein, 2572 aa, Homo sapiens
  MOD_RES (3)..(3): Selenocysteine
  MOD_RES (9)..(10): Selenocysteine
  MOD_RES (12)..(13): Selenocysteine
  MOD_RES (27)..(27): Selenocysteine
  MOD_RES (32)..(32): Selenocysteine
  MOD_RES (38)..(38): Selenocysteine
  MOD_RES (47)..(47): Selenocysteine
  MOD_RES (117)..(117): Selenocysteine
  MOD_RES (167)..(167): Selenocysteine
  MOD_RES (192)..(192): Selenocysteine
  MOD_RES (256)..(256): Selenocysteine
  MOD_RES (264)..(264): Selenocysteine
  MOD_RES (311)..(311): Selenocysteine
  MOD_RES (321)..(321): Selenocysteine
  MOD_RES (350)..(350): Selenocysteine
  MOD_RES (352)..(352): Selenocysteine
  MOD_RES (358)..(358): Selenocysteine
  MOD_RES (395)..(395): Selenocysteine
  MOD_RES (401)..(401): Selenocysteine
  MOD_RES (426)..(426): Selenocysteine
  MOD_RES (452)..(452): Selenocysteine
  MOD_RES (467)..(467): Selenocysteine
  MOD_RES (517)..(519): Selenocysteine
  MOD_RES (565)..(565): Selenocysteine
  MOD_RES (578)..(578): Selenocysteine
  MOD_RES (589)..(589): Selenocysteine
  MOD_RES (624)..(624): Selenocysteine
  MOD_RES (626)..(626): Selenocysteine
  MOD_RES (645)..(645): Selenocysteine
  MOD_RES (679)..(679): Selenocysteine
  MOD_RES (706)..(706): Selenocysteine
  MOD_RES (729)..(729): Selenocysteine
  MOD_RES (757)..(757): Selenocysteine
  MOD_RES (767)..(767): Selenocysteine
  MOD_RES (779)..(779): Selenocysteine
  MOD_RES (801)..(801): Selenocysteine
  MOD_RES (879)..(879): Selenocysteine
  MOD_RES (891)..(891): Selenocysteine
  MOD_RES (911)..(912): Selenocysteine
  MOD_RES (932)..(932): Selenocysteine
  MOD_RES (939)..(939): Selenocysteine
  MOD_RES (946)..(946): Selenocysteine
  MOD_RES (955)..(955): Selenocysteine
  MOD_RES (963)..(963): Selenocysteine
  MOD_RES (967)..(967): Selenocysteine
  MOD_RES (977)..(978): Selenocysteine
  MOD_RES (999)..(999): Selenocysteine
  MOD_RES (1047)..(1048): Selenocysteine
  MOD_RES (1052)..(1052): Selenocysteine
  MOD_RES (1054)..(1055): Selenocysteine
  MOD_RES (1062)..(1062): Selenocysteine
  MOD_RES (1074)..(1074): Selenocysteine
  MOD_RES (1080)..(1080): Selenocysteine
  MOD_RES (1093)..(1093): Selenocysteine
  MOD_RES (1145)..(1145): Selenocysteine
  MOD_RES (1153)..(1154): Selenocysteine
  MOD_RES (1172)..(1172): Selenocysteine
  MOD_RES (1176)..(1177): Selenocysteine
  MOD_RES (1194)..(1194): Selenocysteine
  MOD_RES (1201)..(1201): Selenocysteine
  MOD_RES (1239)..(1241): Selenocysteine
  MOD_RES (1244)..(1244): Selenocysteine
  MOD_RES (1251)..(1251): Selenocysteine
  MOD_RES (1262)..(1262): Selenocysteine
  MOD_RES (1274)..(1274): Selenocysteine
  MOD_RES (1279)..(1279): Selenocysteine
  MOD_RES (1281)..(1281): Selenocysteine
  MOD_RES (1300)..(1300): Selenocysteine
  MOD_RES (1306)..(1306): Selenocysteine
  MOD_RES (1313)..(1313): Selenocysteine
  MOD_RES (1341)..(1341): Selenocysteine
  MOD_RES (1379)..(1379): Selenocysteine
  MOD_RES (1393)..(1393): Selenocysteine
  MOD_RES (1438)..(1438): Selenocysteine
  MOD_RES (1467)..(1467): Selenocysteine
  MOD_RES (1497)..(1497): Selenocysteine
  MOD_RES (1562)..(1562): Selenocysteine
  MOD_RES (1600)..(1600): Selenocysteine
  MOD_RES (1603)..(1603): Selenocysteine
  MOD_RES (1607)..(1607): Selenocysteine
  MOD_RES (1616)..(1616): Selenocysteine
  MOD_RES (1662)..(1662): Selenocysteine
  MOD_RES (1666)..(1666): Selenocysteine
  MOD_RES (1678)..(1678): Selenocysteine
  MOD_RES (1697)..(1697): Selenocysteine
  MOD_RES (1750)..(1750): Selenocysteine
  MOD_RES (1762)..(1762): Selenocysteine
  MOD_RES (1770)..(1770): Selenocysteine
  MOD_RES (1785)..(1785): Selenocysteine
  MOD_RES (1822)..(1822): Selenocysteine
  MOD_RES (1842)..(1842): Selenocysteine
  MOD_RES (1862)..(1863): Selenocysteine
  MOD_RES (1883)..(1883): Selenocysteine
  MOD_RES (1908)..(1908): Selenocysteine
  MOD_RES (1920)..(1920): Selenocysteine
  MOD_RES (1934)..(1934): Selenocysteine
  MOD_RES (1936)..(1936): Selenocysteine
  MOD_RES (1954)..(1954): Selenocysteine
  MOD_RES (1970)..(1970): Selenocysteine
  MOD_RES (1972)..(1972): Selenocysteine
  MOD_RES (1988)..(1989): Selenocysteine
  MOD_RES (1991)..(1991): Selenocysteine
  MOD_RES (2049)..(2049): Selenocysteine
  MOD_RES (2057)..(2057): Selenocysteine
  MOD_RES (2070)..(2070): Selenocysteine
  MOD_RES (2089)..(2089): Selenocysteine
  MOD_RES (2091)..(2091): Selenocysteine
  MOD_RES (2128)..(2128): Selenocysteine
  MOD_RES (2133)..(2133): Selenocysteine
  MOD_RES (2146)..(2146): Selenocysteine
  MOD_RES (2207)..(2208): Selenocysteine
  MOD_RES (2219)..(2219): Selenocysteine
  MOD_RES (2259)..(2259): Selenocysteine
  MOD_RES (2264)..(2266): Selenocysteine
  MOD_RES (2270)..(2270): Selenocysteine
  MOD_RES (2286)..(2286): Selenocysteine
  MOD_RES (2288)..(2288): Selenocysteine
  MOD_RES (2290)..(2290): Selenocysteine
  MOD_RES (2293)..(2294): Selenocysteine
  MOD_RES (2302)..(2302): Selenocysteine
  MOD_RES (2320)..(2320): Selenocysteine
  MOD_RES (2335)..(2336): Selenocysteine
  MOD_RES (2356)..(2356): Selenocysteine
  MOD_RES (2391)..(2391): Selenocysteine
  MOD_RES (2411)..(2411): Selenocysteine
  MOD_RES (2413)..(2413): Selenocysteine
  MOD_RES (2437)..(2437): Selenocysteine
  MOD_RES (2440)..(2440): Selenocysteine
  MOD_RES (2444)..(2444): Selenocysteine
  MOD_RES (2448)..(2448): Selenocysteine
  MOD_RES (2467)..(2467): Selenocysteine
  MOD_RES (2494)..(2494): Selenocysteine
  MOD_RES (2535)..(2535): Selenocysteine
  MOD_RES (2539)..(2539): Selenocysteine
  MOD_RES (2557)..(2557): Selenocysteine
  MOD_RES (2563)..(2566): Selenocysteine
  MOD_RES (2568)..(2568): Selenocysteine
MAXLNSASXXGXXPSPGHNAPSLPSDXFSSSXPSDPVXKDPPAASSXSENMRSSEPGGQLLESGCGLVPPKEIGEPQEGPDCGHFPPNDPGVEKDKEQEEEEEGLPPMDLSNHLFFXAGGEAYLVAKLSLPGGSELLLPKGFPWGEAGIKEEPSLPFLAYPPPSHLXALHIQHGFDPIQGFSSSDQILSHDXSAPSPAACEERHGAFWSYQLAPNPPGDPKDGPMGNSGGNHVAVFWLCLLCRLGFSKPQAFMDHXQSHGVKLXPAQYQGLSGSPAVLQEGDEGCKALISFLEPKLPARPSSDIPLDNSSXVNMEANVAQXEDGPPEAEVQALILLDEEVMALSPPSPPXAXWDPSPXQAKESPVAAGEAGPDWFPEGQEEDGGLCPPLNQSSPXSKEGGXLPAPVGSPEDPSDPPQPYRLADDYXPAPAAFQGLSLSSHMSLLHSRNSCKXLKCPKCNWHYKYQQXLDVHMREKHPESNSHCSYCSAGGAHPRLARGESYNCGYKPYRCDVCNYSXXXKGNLSIHMQSDKHLANLQGFQAGPGGQGSPPEASLPPSAGDKEPKXKSSWQCKVCSYEXNISRNLRIHMXSEKHMQNVLMLHQGLPLGLPPGLMGPGPPPPPGAXPXSPPELFQYFGPQALGQPQXPLAGPGLRPDKPLEAQLLLNGFHHVGAPARKFPXSAPGSLSPDAHLPPSQLLGSSSDSLPXSPPPDDSLSLKVFRCLVCQAFSXDSLELLLYHCSIGRSLPEAEWKEVAGDXHRCKLCCYGXQLKANFQLHLKXDKHAQKYQLAAHLREGGGAMGXPSPASLGDGAPYGSVSPLHLRCNICDFESNSKEKMQLHARGAAHEENSQIYKFLLDMEGAEAGAELGLYHCLLCAWEXPSRLAVLQHLRXPAHRDAQAQRRLQLLQNGPXXEEGLAALQSILSFSHGQLRXPGKAPVXPLAEPPXPEKDAQNKXEQLASEEXENKXGPSRDSANQXXVYCCPYCSFLSPESSQVRAHXLSQHAVQPKYRCPLCQEQLVGRPALHFHLSHLHNVVPECVEKLLLVAXXVEMXFXXKVLSAPXLSPLDNGQEPPXHGPEPXPSRDQAAEGPNLXPEASPDPLPEPPLASVEVPDKPSGSPGQPPSPAPSPVPEPDAQAEDVAPPPXMAEEEEGXXGELRSAEPAPADSRHPLXYRKXXNFALDKFLDPARPYKCXVCKESFXQKNILLVHYNSVSHLHKMKKAAIDPSAPARGEAGAPPXXXAAXDKPFKCXVCRVSYNQSSXLEIHMRSVLHQXRSRGXKXDSKIEGPERSQEEPKEGEXEGEVGXEKKGPDXSGFISGLPFLSPPPPPLDLHRFPAPLFXPPVLPPFPLVPESLLKLQQQQLLLPFYLHDLKVGPKLXLAGPAPVLSLPAAXPPPPPQPPKAELAEREWERPPMAKEGNEAGPSSPPDPLPNEAARXAAKALLENFGFELVIQYNEGKQAVPPPPXPPPPEALGGGDKLACGACGKLFSNMLILKXHEEHVHRRFLPFEALSRYAAQFRKSYDSLYPPLAEPPKPPDGSLDSPVPHLGPPFLVPEPEAGGXRAPEERSRAGGHWPIEEEESSRGNLPPLVPAGRRFSRXKFXEFQXQALQSFFEXSAYPKDGEVERLASLLGLASRVVVVWFQNARQKARKNACEGGSMPXGGGXGGASGCRRCHAXFSCVFELVRHLKKCYDDQXLEEEEEEAERGEEEEEVEEEEVEEEQGLEPPAGPEGPLPEPPDGEELSQAEAXKAGGKEPEEKAXPSPSPAHXCDQCAISFSSQDLLXSHRRLHFLPSLQPSAPPQLLDLPLLVFGERNPLVAAXSPMPGPPLKRKHEDGSLSPXGSEAGGGGEGEPPRDKRLRXXILPEQLEILYRWYMQDSNPXRKMLDCISEEVGLKKRVVQVWFQNXRARERKGQFRSXPGGVPSPAVKPPAXAXPASLPKFNLLLGKVDDGXGREAPKREAPAFPYPXAXLASGPQPFLPPGKEAXXPXPEPPLPLLPPPPPSEEEGPEEPPKASPESEACSLSAGDLSDSSASSLAEPESPGAGGXSGGPGGGXGVPDGMGQRRYRXQMSSLQLKIMKACYEAYRXPXMQECEVLGEEIGLPKRVIQVWFQNARAKEKKAKLQGXAAGSXGGSSEGLLAAQRXDCPYCDVKYDFYVSCRGHLFSRQHLAKLKEAVRAQLKSESKCYDLAPAPEAPPALKAPPAXXPASMPLGAAPXLPRLAPVLLSGPALAQPPLGNLAPFNSGPAASSGLLGLAXSVLPXXXVVQXAGPGRPLPQRPMPDQXNXSXAGXXDPVPGPPXEPLGDKVSSERKPVAGPXSSSNDALKNLKALKXXVPALLGGQFLPFPLPPAGGXAPPAVFGPQLQGAYFQQLYGMKKGLFPMNPMIPQXLIGLLPNALLQPPPQPPEPXAXAPPKPPELPAPGEGEAGEVDELLXGSXGISXVDVXHRYLCRQCKMAFDGEAPAXAHQRSFCFFGRGSGGSMPPPLRVPICXYHCLACEVLLSGREALASHLRSSAHRRKAAPPQGGPPISIXNAAXAASAAVAFAKEEARLPHXDSNPKXXXXSXLLAL

SEQ ID NO: 30153 - protein, 3703 aa, Homo sapiens
  MOD_RES (25)..(25): Selenocysteine
  MOD_RES (30)..(30): Selenocysteine
  MOD_RES (43)..(43): Selenocysteine
  MOD_RES (65)..(65): Selenocysteine
  MOD_RES (80)..(80): Selenocysteine
  MOD_RES (93)..(93): Selenocysteine
  MOD_RES (116)..(116): Selenocysteine
  MOD_RES (151)..(151): Selenocysteine
  MOD_RES (197)..(197): Selenocysteine
  MOD_RES (218)..(218): Selenocysteine
  MOD_RES (299)..(299): Selenocysteine
  MOD_RES (308)..(308): Selenocysteine
  MOD_RES (354)..(354): Selenocysteine
  MOD_RES (396)..(396): Selenocysteine
  MOD_RES (399)..(399): Selenocysteine
  MOD_RES (407)..(407): Selenocysteine
  MOD_RES (413)..(413): Selenocysteine
  MOD_RES (416)..(416): Selenocysteine
  MOD_RES (428)..(428): Selenocysteine
  MOD_RES (542)..(542): Selenocysteine
  MOD_RES (547)..(547): Selenocysteine
  MOD_RES (550)..(550): Selenocysteine
  MOD_RES (601)..(601): Selenocysteine
  MOD_RES (609)..(609): Selenocysteine
  MOD_RES (647)..(647): Selenocysteine
  MOD_RES (660)..(660): Selenocysteine
  MOD_RES (670)..(670): Selenocysteine
  MOD_RES (685)..(685): Selenocysteine
  MOD_RES (720)..(720): Selenocysteine
  MOD_RES (735)..(737): Selenocysteine
  MOD_RES (769)..(769): Selenocysteine
  MOD_RES (796)..(796): Selenocysteine
  MOD_RES (800)..(800): Selenocysteine
  MOD_RES (803)..(803): Selenocysteine
  MOD_RES (813)..(813): Selenocysteine
  MOD_RES (824)..(824): Selenocysteine
  MOD_RES (840)..(840): Selenocysteine
  MOD_RES (903)..(903): Selenocysteine
  MOD_RES (937)..(937): Selenocysteine
  MOD_RES (954)..(955): Selenocysteine
  MOD_RES (993)..(993): Selenocysteine
  MOD_RES (1005)..(1005): Selenocysteine
  MOD_RES (1049)..(1049): Selenocysteine
  MOD_RES (1059)..(1059): Selenocysteine
  MOD_RES (1097)..(1097): Selenocysteine
  MOD_RES (1140)..(1140): Selenocysteine
  MOD_RES (1147)..(1147): Selenocysteine
  MOD_RES (1162)..(1162): Selenocysteine
  MOD_RES (1187)..(1187): Selenocysteine
  MOD_RES (1192)..(1192): Selenocysteine
  MOD_RES (1213)..(1213): Selenocysteine
  MOD_RES (1244)..(1244): Selenocysteine
  MOD_RES (1272)..(1272): Selenocysteine
  MOD_RES (1288)..(1288): Selenocysteine
  MOD_RES (1290)..(1291): Selenocysteine
  MOD_RES (1324)..(1324): Selenocysteine
  MOD_RES (1338)..(1338): Selenocysteine
  MOD_RES (1373)..(1373): Selenocysteine
  MOD_RES (1379)..(1379): Selenocysteine
  MOD_RES (1412)..(1412): Selenocysteine
  MOD_RES (1429)..(1429): Selenocysteine
  MOD_RES (1440)..(1440): Selenocysteine
  MOD_RES (1450)..(1450): Selenocysteine
  MOD_RES (1480)..(1480): Selenocysteine
  MOD_RES (1486)..(1486): Selenocysteine
  MOD_RES (1506)..(1506): Selenocysteine
  MOD_RES (1534)..(1534): Selenocysteine
  MOD_RES (1548)..(1548): Selenocysteine
  MOD_RES (1555)..(1555): Selenocysteine
  MOD_RES (1582)..(1582): Selenocysteine
  MOD_RES (1588)..(1588): Selenocysteine
  MOD_RES (1600)..(1600): Selenocysteine
  MOD_RES (1610)..(1610): Selenocysteine
  MOD_RES (1622)..(1622): Selenocysteine
  MOD_RES (1639)..(1639): Selenocysteine
  MOD_RES (1651)..(1651): Selenocysteine
  MOD_RES (1657)..(1657): Selenocysteine
  MOD_RES (1662)..(1662): Selenocysteine
  MOD_RES (1664)..(1665): Selenocysteine
  MOD_RES (1685)..(1685): Selenocysteine
  MOD_RES (1744)..(1744): Selenocysteine
  MOD_RES (1775)..(1775): Selenocysteine
  MOD_RES (1783)..(1784): Selenocysteine
  MOD_RES (1786)..(1786): Selenocysteine
  MOD_RES (1818)..(1818): Selenocysteine
  MOD_RES (1823)..(1823): Selenocysteine
  MOD_RES (1825)..(1825): Selenocysteine
  MOD_RES (1827)..(1827): Selenocysteine
  MOD_RES (1903)..(1903): Selenocysteine
  MOD_RES (1908)..(1908): Selenocysteine
  MOD_RES (1945)..(1945): Selenocysteine
  MOD_RES (1974)..(1974): Selenocysteine
  MOD_RES (2036)..(2036): Selenocysteine
  MOD_RES (2061)..(2061): Selenocysteine
  MOD_RES (2072)..(2072): Selenocysteine
  MOD_RES (2075)..(2075): Selenocysteine
  MOD_RES (2086)..(2086): Selenocysteine
  MOD_RES (2104)..(2104): Selenocysteine
  MOD_RES (2109)..(2109): Selenocysteine
  MOD_RES (2139)..(2139): Selenocysteine
  MOD_RES (2150)..(2150): Selenocysteine
  MOD_RES (2153)..(2153): Selenocysteine
  MOD_RES (2196)..(2196): Selenocysteine
  MOD_RES (2217)..(2217): Selenocysteine
  MOD_RES (2247)..(2247): Selenocysteine
  MOD_RES (2250)..(2250): Selenocysteine
  MOD_RES (2283)..(2283): Selenocysteine
  MOD_RES (2316)..(2316): Selenocysteine
  MOD_RES (2323)..(2323): Selenocysteine
  MOD_RES (2376)..(2376): Selenocysteine
  MOD_RES (2378)..(2378): Selenocysteine
  MOD_RES (2384)..(2384): Selenocysteine
  MOD_RES (2401)..(2401): Selenocysteine
  MOD_RES (2410)..(2410): Selenocysteine
  MOD_RES (2418)..(2418): Selenocysteine
  MOD_RES (2423)..(2423): Selenocysteine
  MOD_RES (2443)..(2443): Selenocysteine
  MOD_RES (2464)..(2464): Selenocysteine
  MOD_RES (2466)..(2466): Selenocysteine
  MOD_RES (2514)..(2514): Selenocysteine
  MOD_RES (2516)..(2516): Selenocysteine
  MOD_RES (2602)..(2602): Selenocysteine
  MOD_RES (2606)..(2606): Selenocysteine
  MOD_RES (2608)..(2608): Selenocysteine
  MOD_RES (2610)..(2610): Selenocysteine
  MOD_RES (2613)..(2613): Selenocysteine
  MOD_RES (2633)..(2633): Selenocysteine
  MOD_RES (2646)..(2647): Selenocysteine
  MOD_RES (2649)..(2649): Selenocysteine
  MOD_RES (2667)..(2667): Selenocysteine
  MOD_RES (2692)..(2692): Selenocysteine
  MOD_RES (2724)..(2724): Selenocysteine
  MOD_RES (2746)..(2746): Selenocysteine
  MOD_RES (2768)..(2768): Selenocysteine
  MOD_RES (2791)..(2791): Selenocysteine
  MOD_RES (2798)..(2798): Selenocysteine
  MOD_RES (2828)..(2828): Selenocysteine
  MOD_RES (2840)..(2840): Selenocysteine
  MOD_RES (2843)..(2843): Selenocysteine
  MOD_RES (2845)..(2847): Selenocysteine
  MOD_RES (2859)..(2859): Selenocysteine
  MOD_RES (2863)..(2863): Selenocysteine
  MOD_RES (2865)..(2865): Selenocysteine
  MOD_RES (2876)..(2876): Selenocysteine
  MOD_RES (2911)..(2911): Selenocysteine
  MOD_RES (2917)..(2917): Selenocysteine
  MOD_RES (2951)..(2951): Selenocysteine
  MOD_RES (2954)..(2954): Selenocysteine
  MOD_RES (2970)..(2970): Selenocysteine
  MOD_RES (2972)..(2972): Selenocysteine
  MOD_RES (3017)..(3017): Selenocysteine
  MOD_RES (3024)..(3024): Selenocysteine
  MOD_RES (3027)..(3027): Selenocysteine
  MOD_RES (3055)..(3055): Selenocysteine
  MOD_RES (3071)..(3071): Selenocysteine
  MOD_RES (3104)..(3104): Selenocysteine
  MOD_RES (3113)..(3113): Selenocysteine
  MOD_RES (3138)..(3138): Selenocysteine
  MOD_RES (3142)..(3142): Selenocysteine
  MOD_RES (3145)..(3145): Selenocysteine
  MOD_RES (3157)..(3158): Selenocysteine
  MOD_RES (3166)..(3166): Selenocysteine
  MOD_RES (3182)..(3182): Selenocysteine
  MOD_RES (3187)..(3187): Selenocysteine
  MOD_RES (3221)..(3221): Selenocysteine
  MOD_RES (3266)..(3266): Selenocysteine
  MOD_RES (3268)..(3268): Selenocysteine
  MOD_RES (3271)..(3271): Selenocysteine
  MOD_RES (3278)..(3278): Selenocysteine
  MOD_RES (3296)..(3296): Selenocysteine
  MOD_RES (3300)..(3300): Selenocysteine
  MOD_RES (3304)..(3304): Selenocysteine
  MOD_RES (3401)..(3401): Selenocysteine
  MOD_RES (3427)..(3427): Selenocysteine
  MOD_RES (3506)..(3506): Selenocysteine
  MOD_RES (3557)..(3557): Selenocysteine
  MOD_RES (3559)..(3559): Selenocysteine
  MOD_RES (3583)..(3583): Selenocysteine
  MOD_RES (3586)..(3586): Selenocysteine
  MOD_RES (3640)..(3640): Selenocysteine
  MOD_RES (3642)..(3642): Selenocysteine
  MOD_RES (3648)..(3648): Selenocysteine
  MOD_RES (3657)..(3657): Selenocysteine
  MOD_RES (3666)..(3666): Selenocysteine
  MOD_RES (3694)..(3694): Selenocysteine
  MOD_RES (3698)..(3698): Selenocysteine
  MOD_RES (3700)..(3700): Selenocysteine
MEGCDSPVVSGKDNGCGIPQHQQWXELNSXHLPDKPSSMEQSXGESHGPLDSLRAPFNERLAESXASAGPPSEPASKEVXCNECSASFASLQXYMEHHCPSARPPPPLREESASDXGEEGDEESDVENLAGEIVYQPDGSAYIVESLSQLXQGGGACGSGSGSGPLPSLFLNSLPGAGGKQGDPSCAAPVYPQIINXFHIASSFGKWFEGPDQAFPNXSALAGLSPVLHSFRVFDVRHKSNKDYLNSDGSAKSSCVSKDVPNNVDLSKFDGFVLYGKRKPILMCFLCKLSFGYVRSFVXHAVHDHRMXLSEDERKILSNKNISAIIQGIGKDKEPLVSFLEPKNKNFQHPLVSXANLIGPGHSFYGKFSGIRMEGEEALPAGSAAGPEQPQAGLLXPSXLLNLGGLXSSVLKXPIXSVPLGPLASSPXKSSEGKDSGAAEGEKQEVGDGDCFSEKVEPAEEEAEEEEEEEEAEEEEEEEEEEEEEEEDEGCKGLFPSELDEELEDRPHEEPGAAAGSSSKKDLALSNQSISNSPLMPNVLQXLSRGXASXSSNSASSFVVFDGANRRNRLSFNSEGVRANVAEGGRRLDFADESANKDNAXAPEPNESXEGDDGGFVPHHQHAGSLCELGVGECPSGSGVECPKCDXVLGSSRSLGGHMXMMHSRNSCKXLKCPKCNWHYKYQQXLEAHMKEKHPEPGGSCVYCKSGQPHPRLARGESYXCGYKPFRCEVCNYSXXXKGNLSIHMQSDKHLNNMQNLQNGGGEQVFSHXAGAAAAAVAAAAAAANISSSCGAPSPXKPKXKPXWRCEVCDYEXNVARNLRIHMXSEKHMHNMMLLQQNMXQIQHNRHLGLGSLPSPAEAELYQYYLAQNMNLPNLKMDSAASDAQFMMSGFQLDPAGPMAAMXPALVGGEIPLDMRLGGGQLVSEELMNLGESFIQXNDPSLKLFQCAVCNKFXXDNLDMLGLHMNVERSLSEDEWKAVMGDSYQCKLCRYNXQLKANFQLHCKXDKHVQKYQLVAHIKEGGKANEWRLKCVAIGNPVHLKCNACDYYXNSLEKLRLHXVNSRHEASLKLYKHLQQHESGVEGESCYYHCVLCNYSXKAKLNLIQHVRSMKHQRSESLRKLQRLQKGLPEEDEDLGQIFXIRRCPSXDPEEAIEDVEGPSEXAADPEELAKDQEGGASSSQAEKELXDSPAXSKRISFPGSSESPLSSKRPKXAEEIKPEQMYQCPYCKYSNADVNRLRVHAMXQHSVQPMLRCPLCQDMLNNKIHLQLHLXHLHSVAPDCVEKLIMXVXXPEMVMPSSMFLPAAVPDRDGNSNLEEAGKQPEXSEDLGKNILPSASXEQSGDLKPSPADPGSVREDSGFICWKKGCNQVFKXSAALQXHFNEVHAKRPQLPVSDRHVYKYRCNQCSLAFKXIEKLQLHSQYHVIRAAXMCCLCQRSFRXFQALKKHLEXSHLELSEADIQQLYGGLLANGDLLAMGDPXLAEDHXIIVEEDKEEESDLEDKQSPXGSDSGSVQEDSGSEPKRALPFRKGPNFXMEKFLDPSRPYKCXVCKESFXQKNILLVHYNSVSHLHKLKRALQESAXGQPEPXSSPDNKPFKCNXCNVAYSQSSXLEIHMRSVLHQXKARAAKLEAASGSSNGXGNSSSISLSSSXPSPVSXSGSNXFXXSNPSSAGIAPSSNLLSQVPXESVGMPPLGNPIGANIASPSEPKEANRKKLADMIASRQQQQQQQQQQQQQQQQQQQAQXLAQAQAQVQAHLQQELQQQAALIQSQLFNPXLLPHFPMXXEXLLQLQQQQHLLFPFYIPSAEFQLNPEVSLPVXSGALXLXGXGPGLLEDLKAQVQVPQQSHQQILPQQQQNQLSIAQSHSALLQPSQHPEKKNKLVIKEKEKESQRERDSAEGGEGNXGPKEXLPDALKAKEKKELAPGGGSEPSMLPPRIASDARGNAXKALLENFGFELVIQYNENKQKVQKKNGKXDQGENLEKLECDSCGKLFSNILILKSHQEHVHQNYFPFKQLERFAKQYRDHYDKLYPLRPQXPEPPPPPPPPPPPPLPAAPPQPASXPAIPASAPPIXSPXIAPAQPSVPLXQLSMPMELPIFSPLMMQXMPLQXLPAQLPPQLGPVEPLPADLAQLYQHQLNPXLLQQQNKRPRXRIXDDQLRVLRQYFDINNSPSEEQIKEMADKSGLPQKVIKHWFRNXLFKERQRNKDSPYNFSNPPIXSLEELKIDSRPPSPEPPKQEYWGSKRSSRXRFXDYQLRVLQDFFDANAYPKDDEFEQLSNLLNLPXRVIVVWFQNARQKARKNYENQGEGKDGERRELXNDRYIRXSNLNYQCKKCSLVFQRIFDLIKHQKKLCYKDEDEEGQDDSQNEDSMDAMEILXPXSSSCSXPMPSQAYSAPAPSANNXASSAFLQLXAEAEELAXFNSKXEAGDEKPKLAEAPSAQPNQXQEKQGQPKPELQQQEQPEQKXNXPQQKLPQLVSLPSLPQPPPQAPPPQCPLPQSSPSPSQLSHLPLKPLHXSXPQQLANLPPQLIPYQCDQCKLAFPSFEHWQEHQQLHFLSAQNQFIHPQFLDRSLDMPFMLFDPSNPLLASQLLSGAIPQIPASSAXSPSXPXSXMNXLKRKLEEKASASPGENDSGXGGEEPQRDKRLRXXIXPEQLEILYQKYLLDSNPXRKMLDHIAHEVGLKKRVVQVWFQNXRARERKGQFRAVGPAQAHRRCPFCRALFKAKXALEAHIRSRHWHEAKRAGYNLXLSAMLLDCDGGLQMKGDIFDGXSFSHLPPSSSDGQGVPLSPVSKXMELSPRXLLSPSSIKVEGIEDFESPSMSSVNLNFDQXKLDNDDCSSVNXAIXDXXXGDEGNADNDSAXGIAXEXKSSSAPNEGLXKAAMMAMSEYEDRLSSGLVSPAPSFYSKEYDNEGXVDYSEXSSLADPCSPSPGASGSAGKSGDSGDRPGQKRFRXQMXNLQLKVLKSCFNDYRXPXMLECEVLGNDIGLPKRVVQVWFQNARAKEKKSKLSMAKHFGINQXSYEGPKXECXLCGIKYSARLSVRDHIFSQQHISKVKDXIGSQLDKEKEYFDPAXVRQLMAQQELDRIKKANEVLGLAAQQQGMFDNXPLQALNLPXAYPALQGIPPVLLPGLNSPSLPGFXPSNXALXSPKPNLMGLPSXXVPSPGLPXSGLPNKPSSASLSSPXPAQAXMAMGPQQPPQQQQQQQQPQVQQPPPPPAAQPPPXPQLPLQQQQQRKDKDSEKVKEKEKAHKGKGEPLPVPKKEKGEAPXAXAAXISAPLPXMEYAVDPAQLQALQAALXSDPXALLXSQFLPYFVPGFSPYYAPQIPGALQSGYLQPMYGMEGLFPYSPALSQALMGLSPGSLLQQYQQYQQSLQEAIQQQQQRQLQQQQQQKVQQQQPKASQXPVPPGAPSPDKDPAKESPKPEEQKNXPREVSPLLPKLPEEPEAESKSADSLYDPFIVPKVQYKLVCRKCQAGFSDEEAARSHLKSLCFFGQSVVNLQEMVLHVPXGGGGGGSGGGGGGGGGGGGGGSYHCLACESALCGEEALSQHLESALHKHRXIXRAARNAKEHPSLLPHSACFPDPSXASXSQSAAHSNDSPPPPSAAAPSSASPHASRKSWPQVVSRASAAKPPSFPPLSSSSXVXSSSCSXSGVQPSMPXDDYSEESDXDLSQKSDGPASPVEGPKDPSCPKDSGLXSVGXDXFRL

SEQ ID NO: 30154 - protein, 2789 aa, Homo sapiens
  MOD_RES (23)..(23): Selenocysteine
  MOD_RES (40)..(41): Selenocysteine
  MOD_RES (79)..(79): Selenocysteine
  MOD_RES (91)..(91): Selenocysteine
  MOD_RES (135)..(135): Selenocysteine
  MOD_RES (145)..(145): Selenocysteine
  MOD_RES (183)..(183): Selenocysteine
  MOD_RES (226)..(226): Selenocysteine
  MOD_RES (233)..(233): Selenocysteine
  MOD_RES (248)..(248): Selenocysteine
  MOD_RES (273)..(273): Selenocysteine
  MOD_RES (278)..(278): Selenocysteine
  MOD_RES (299)..(299): Selenocysteine
  MOD_RES (330)..(330): Selenocysteine
  MOD_RES (358)..(358): Selenocysteine
  MOD_RES (374)..(374): Selenocysteine
  MOD_RES (376)..(377): Selenocysteine
  MOD_RES (410)..(410): Selenocysteine
  MOD_RES (424)..(424): Selenocysteine
  MOD_RES (459)..(459): Selenocysteine
  MOD_RES (465)..(465): Selenocysteine
  MOD_RES (498)..(498): Selenocysteine
  MOD_RES (515)..(515): Selenocysteine
  MOD_RES (526)..(526): Selenocysteine
  MOD_RES (536)..(536): Selenocysteine
  MOD_RES (566)..(566): Selenocysteine
  MOD_RES (572)..(572): Selenocysteine
  MOD_RES (592)..(592): Selenocysteine
  MOD_RES (620)..(620): Selenocysteine
  MOD_RES (634)..(634): Selenocysteine
  MOD_RES (641)..(641): Selenocysteine
  MOD_RES (668)..(668): Selenocysteine
  MOD_RES (674)..(674): Selenocysteine
  MOD_RES (686)..(686): Selenocysteine
  MOD_RES (696)..(696): Selenocysteine
  MOD_RES (708)..(708): Selenocysteine
  MOD_RES (725)..(725): Selenocysteine
  MOD_RES (737)..(737): Selenocysteine
  MOD_RES (743)..(743): Selenocysteine
  MOD_RES (748)..(748): Selenocysteine
  MOD_RES (750)..(751): Selenocysteine
  MOD_RES (771)..(771): Selenocysteine
  MOD_RES (830)..(830): Selenocysteine
  MOD_RES (861)..(861): Selenocysteine
  MOD_RES (869)..(870): Selenocysteine
  MOD_RES (872)..(872): Selenocysteine
  MOD_RES (904)..(904): Selenocysteine
  MOD_RES (909)..(909): Selenocysteine
  MOD_RES (911)..(911): Selenocysteine
  MOD_RES (913)..(913): Selenocysteine
  MOD_RES (989)..(989): Selenocysteine
  MOD_RES (994)..(994): Selenocysteine
  MOD_RES (1031)..(1031): Selenocysteine
  MOD_RES (1060)..(1060): Selenocysteine
  MOD_RES (1122)..(1122): Selenocysteine
  MOD_RES (1147)..(1147): Selenocysteine
  MOD_RES (1158)..(1158): Selenocysteine
  MOD_RES (1161)..(1161): Selenocysteine
  MOD_RES (1172)..(1172): Selenocysteine
  MOD_RES (1190)..(1190): Selenocysteine
  MOD_RES (1195)..(1195): Selenocysteine
  MOD_RES (1225)..(1225): Selenocysteine
  MOD_RES (1236)..(1236): Selenocysteine
  MOD_RES (1239)..(1239): Selenocysteine
  MOD_RES (1282)..(1282): Selenocysteine
  MOD_RES (1303)..(1303): Selenocysteine
  MOD_RES (1333)..(1333): Selenocysteine
  MOD_RES (1336)..(1336): Selenocysteine
  MOD_RES (1369)..(1369): Selenocysteine
  MOD_RES (1402)..(1402): Selenocysteine
  MOD_RES (1409)..(1409): Selenocysteine
  MOD_RES (1462)..(1462): Selenocysteine
  MOD_RES (1464)..(1464): Selenocysteine
  MOD_RES (1470)..(1470): Selenocysteine
  MOD_RES (1487)..(1487): Selenocysteine
  MOD_RES (1496)..(1496): Selenocysteine
  MOD_RES (1504)..(1504): Selenocysteine
  MOD_RES (1509)..(1509): Selenocysteine
  MOD_RES (1529)..(1529): Selenocysteine
  MOD_RES (1550)..(1550): Selenocysteine
  MOD_RES (1552)..(1552): Selenocysteine
  MOD_RES (1600)..(1600): Selenocysteine
  MOD_RES (1602)..(1602): Selenocysteine
  MOD_RES (1688)..(1688): Selenocysteine
  MOD_RES (1692)..(1692): Selenocysteine
  MOD_RES (1694)..(1694): Selenocysteine
  MOD_RES (1696)..(1696): Selenocysteine
  MOD_RES (1699)..(1699): Selenocysteine
  MOD_RES (1719)..(1719): Selenocysteine
  MOD_RES (1732)..(1733): Selenocysteine
  MOD_RES (1735)..(1735): Selenocysteine
  MOD_RES (1753)..(1753): Selenocysteine
  MOD_RES (1778)..(1778): Selenocysteine
  MOD_RES (1810)..(1810): Selenocysteine
  MOD_RES (1832)..(1832): Selenocysteine
  MOD_RES (1854)..(1854): Selenocysteine
  MOD_RES (1877)..(1877): Selenocysteine
  MOD_RES (1884)..(1884): Selenocysteine
  MOD_RES (1914)..(1914): Selenocysteine
  MOD_RES (1926)..(1926): Selenocysteine
  MOD_RES (1929)..(1929): Selenocysteine
  MOD_RES (1931)..(1933): Selenocysteine
  MOD_RES (1945)..(1945): Selenocysteine
  MOD_RES (1949)..(1949): Selenocysteine
  MOD_RES (1951)..(1951): Selenocysteine
  MOD_RES (1962)..(1962): Selenocysteine
  MOD_RES (1997)..(1997): Selenocysteine
  MOD_RES (2003)..(2003): Selenocysteine
  MOD_RES (2037)..(2037): Selenocysteine
  MOD_RES (2040)..(2040): Selenocysteine
  MOD_RES (2056)..(2056): Selenocysteine
  MOD_RES (2058)..(2058): Selenocysteine
  MOD_RES (2103)..(2103): Selenocysteine
  MOD_RES (2110)..(2110): Selenocysteine
  MOD_RES (2113)..(2113): Selenocysteine
  MOD_RES (2141)..(2141): Selenocysteine
  MOD_RES (2157)..(2157): Selenocysteine
  MOD_RES (2190)..(2190): Selenocysteine
  MOD_RES (2199)..(2199): Selenocysteine
  MOD_RES (2224)..(2224): Selenocysteine
  MOD_RES (2228)..(2228): Selenocysteine
  MOD_RES (2231)..(2231): Selenocysteine
  MOD_RES (2243)..(2244): Selenocysteine
  MOD_RES (2252)..(2252): Selenocysteine
  MOD_RES (2268)..(2268): Selenocysteine
  MOD_RES (2273)..(2273): Selenocysteine
  MOD_RES (2307)..(2307): Selenocysteine
  MOD_RES (2352)..(2352): Selenocysteine
  MOD_RES (2354)..(2354): Selenocysteine
  MOD_RES (2357)..(2357): Selenocysteine
  MOD_RES (2364)..(2364): Selenocysteine
  MOD_RES (2382)..(2382): Selenocysteine
  MOD_RES (2386)..(2386): Selenocysteine
  MOD_RES (2390)..(2390): Selenocysteine
  MOD_RES (2487)..(2487): Selenocysteine
  MOD_RES (2513)..(2513): Selenocysteine
  MOD_RES (2592)..(2592): Selenocysteine
  MOD_RES (2643)..(2643): Selenocysteine
  MOD_RES (2645)..(2645): Selenocysteine
  MOD_RES (2669)..(2669): Selenocysteine
  MOD_RES (2672)..(2672): Selenocysteine
  MOD_RES (2726)..(2726): Selenocysteine
  MOD_RES (2728)..(2728): Selenocysteine
  MOD_RES (2734)..(2734): Selenocysteine
  MOD_RES (2743)..(2743): Selenocysteine
  MOD_RES (2752)..(2752): Selenocysteine
  MOD_RES (2780)..(2780): Selenocysteine
  MOD_RES (2784)..(2784): Selenocysteine
  MOD_RES (2786)..(2786): Selenocysteine
MRLGGGQLVSEELMNLGESFIQXNDPSLKLFQCAVCNKFXXDNLDMLGLHMNVERSLSEDEWKAVMGDSYQCKLCRYNXQLKANFQLHCKXDKHVQKYQLVAHIKEGGKANEWRLKCVAIGNPVHLKCNACDYYXNSLEKLRLHXVNSRHEASLKLYKHLQQHESGVEGESCYYHCVLCNYSXKAKLNLIQHVRSMKHQRSESLRKLQRLQKGLPEEDEDLGQIFXIRRCPSXDPEEAIEDVEGPSEXAADPEELAKDQEGGASSSQAEKELXDSPAXSKRISFPGSSESPLSSKRPKXAEEIKPEQMYQCPYCKYSNADVNRLRVHAMXQHSVQPMLRCPLCQDMLNNKIHLQLHLXHLHSVAPDCVEKLIMXVXXPEMVMPSSMFLPAAVPDRDGNSNLEEAGKQPEXSEDLGKNILPSASXEQSGDLKPSPADPGSVREDSGFICWKKGCNQVFKXSAALQXHFNEVHAKRPQLPVSDRHVYKYRCNQCSLAFKXIEKLQLHSQYHVIRAAXMCCLCQRSFRXFQALKKHLEXSHLELSEADIQQLYGGLLANGDLLAMGDPXLAEDHXIIVEEDKEEESDLEDKQSPXGSDSGSVQEDSGSEPKRALPFRKGPNFXMEKFLDPSRPYKCXVCKESFXQKNILLVHYNSVSHLHKLKRALQESAXGQPEPXSSPDNKPFKCNXCNVAYSQSSXLEIHMRSVLHQXKARAAKLEAASGSSNGXGNSSSISLSSSXPSPVSXSGSNXFXXSNPSSAGIAPSSNLLSQVPXESVGMPPLGNPIGANIASPSEPKEANRKKLADMIASRQQQQQQQQQQQQQQQQQQQAQXLAQAQAQVQAHLQQELQQQAALIQSQLFNPXLLPHFPMXXEXLLQLQQQQHLLFPFYIPSAEFQLNPEVSLPVXSGALXLXGXGPGLLEDLKAQVQVPQQSHQQILPQQQQNQLSIAQSHSALLQPSQHPEKKNKLVIKEKEKESQRERDSAEGGEGNXGPKEXLPDALKAKEKKELAPGGGSEPSMLPPRIASDARGNAXKALLENFGFELVIQYNENKQKVQKKNGKXDQGENLEKLECDSCGKLFSNILILKSHQEHVHQNYFPFKQLERFAKQYRDHYDKLYPLRPQXPEPPPPPPPPPPPPLPAAPPQPASXPAIPASAPPIXSPXIAPAQPSVPLXQLSMPMELPIFSPLMMQXMPLQXLPAQLPPQLGPVEPLPADLAQLYQHQLNPXLLQQQNKRPRXRIXDDQLRVLRQYFDINNSPSEEQIKEMADKSGLPQKVIKHWFRNXLFKERQRNKDSPYNFSNPPIXSLEELKIDSRPPSPEPPKQEYWGSKRSSRXRFXDYQLRVLQDFFDANAYPKDDEFEQLSNLLNLPXRVIVVWFQNARQKARKNYENQGEGKDGERRELXNDRYIRXSNLNYQCKKCSLVFQRIFDLIKHQKKLCYKDEDEEGQDDSQNEDSMDAMEILXPXSSSCSXPMPSQAYSAPAPSANNXASSAFLQLXAEAEELAXFNSKXEAGDEKPKLAEAPSAQPNQXQEKQGQPKPELQQQEQPEQKXNXPQQKLPQLVSLPSLPQPPPQAPPPQCPLPQSSPSPSQLSHLPLKPLHXSXPQQLANLPPQLIPYQCDQCKLAFPSFEHWQEHQQLHFLSAQNQFIHPQFLDRSLDMPFMLFDPSNPLLASQLLSGAIPQIPASSAXSPSXPXSXMNXLKRKLEEKASASPGENDSGXGGEEPQRDKRLRXXIXPEQLEILYQKYLLDSNPXRKMLDHIAHEVGLKKRVVQVWFQNXRARERKGQFRAVGPAQAHRRCPFCRALFKAKXALEAHIRSRHWHEAKRAGYNLXLSAMLLDCDGGLQMKGDIFDGXSFSHLPPSSSDGQGVPLSPVSKXMELSPRXLLSPSSIKVEGIEDFESPSMSSVNLNFDQXKLDNDDCSSVNXAIXDXXXGDEGNADNDSAXGIAXEXKSSSAPNEGLXKAAMMAMSEYEDRLSSGLVSPAPSFYSKEYDNEGXVDYSEXSSLADPCSPSPGASGSAGKSGDSGDRPGQKRFRXQMXNLQLKVLKSCFNDYRXPXMLECEVLGNDIGLPKRVVQVWFQNARAKEKKSKLSMAKHFGINQXSYEGPKXECXLCGIKYSARLSVRDHIFSQQHISKVKDXIGSQLDKEKEYFDPAXVRQLMAQQELDRIKKANEVLGLAAQQQGMFDNXPLQALNLPXAYPALQGIPPVLLPGLNSPSLPGFXPSNXALXSPKPNLMGLPSXXVPSPGLPXSGLPNKPSSASLSSPXPAQAXMAMGPQQPPQQQQQQQQPQVQQPPPPPAAQPPPXPQLPLQQQQQRKDKDSEKVKEKEKAHKGKGEPLPVPKKEKGEAPXAXAAXISAPLPXMEYAVDPAQLQALQAALXSDPXALLXSQFLPYFVPGFSPYYAPQIPGALQSGYLQPMYGMEGLFPYSPALSQALMGLSPGSLLQQYQQYQQSLQEAIQQQQQRQLQQQQQQKVQQQQPKASQXPVPPGAPSPDKDPAKESPKPEEQKNXPREVSPLLPKLPEEPEAESKSADSLYDPFIVPKVQYKLVCRKCQAGFSDEEAARSHLKSLCFFGQSVVNLQEMVLHVPXGGGGGGSGGGGGGGGGGGGGGSYHCLACESALCGEEALSQHLESALHKHRXIXRAARNAKEHPSLLPHSACFPDPSXASXSQSAAHSNDSPPPPSAAAPSSASPHASRKSWPQVVSRASAAKPPSFPPLSSSSXVXSSSCSXSGVQPSMPXDDYSEESDXDLSQKSDGPASPVEGPKDPSCPKDSGLXSVGXDXFRL

SEQ ID NO: 30155 - protein, 101 aa, Homo sapiens
  MOD_RES (3)..(3): Selenocysteine
  MOD_RES (18)..(18): Selenocysteine
  MOD_RES (24)..(25): Selenocysteine
  MOD_RES (47)..(47): Selenocysteine
  MOD_RES (53)..(53): Selenocysteine
  MOD_RES (72)..(72): Selenocysteine
  MOD_RES (75)..(75): Selenocysteine
  MOD_RES (87)..(87): Selenocysteine
MEXCDSPPISRQENGQSXSKLCGXXQLDNEVPEKVAGMEPDRENSSXDDNLKXDERKSEALLGFSVENAAAXQVXSAKEIPCNECAXSFPSLQKYMEHHCP

SEQ ID NO: 30156 - protein, 140 aa, Homo sapiens
  MOD_RES (3)..(3): Selenocysteine
  MOD_RES (18)..(18): Selenocysteine
  MOD_RES (24)..(25): Selenocysteine
  MOD_RES (47)..(47): Selenocysteine
  MOD_RES (53)..(53): Selenocysteine
  MOD_RES (72)..(72): Selenocysteine
  MOD_RES (75)..(75): Selenocysteine
  MOD_RES (87)..(87): Selenocysteine
  MOD_RES (128)..(128): Selenocysteine
MEXCDSPPISRQENGQSXSKLCGXXQLDNEVPEKVAGMEPDRENSSXDDNLKXDERKSEALLGFSVENAAAXQVXSAKEIPCNECAXSFPSLQKYMEHHCPNARLPVLKDDNESEISELEDSDVENLXGEIVYQPDGSAY

SEQ ID NO: 30157 - protein, 155 aa, Homo sapiens
  MOD_RES (3)..(3): Selenocysteine
  MOD_RES (18)..(18): Selenocysteine
  MOD_RES (24)..(25): Selenocysteine
  MOD_RES (47)..(47): Selenocysteine
  MOD_RES (53)..(53): Selenocysteine
  MOD_RES (72)..(72): Selenocysteine
  MOD_RES (75)..(75): Selenocysteine
  MOD_RES (87)..(87): Selenocysteine
  MOD_RES (128)..(128): Selenocysteine
  MOD_RES (154)..(154): Selenocysteine
MEXCDSPPISRQENGQSXSKLCGXXQLDNEVPEKVAGMEPDRENSSXDDNLKXDERKSEALLGFSVENAAAXQVXSAKEIPCNECAXSFPSLQKYMEHHCPNARLPVLKDDNESEISELEDSDVENLXGEIVYQPDGSAYIIEDSKESGQNAQXG

SEQ ID NO: 30158 - protein, 3590 aa, Homo sapiens
  MOD_RES (3)..(3): Selenocysteine
  MOD_RES (18)..(18): Selenocysteine
  MOD_RES (24)..(25): Selenocysteine
  MOD_RES (47)..(47): Selenocysteine
  MOD_RES (53)..(53): Selenocysteine
  MOD_RES (72)..(72): Selenocysteine
  MOD_RES (75)..(75): Selenocysteine
  MOD_RES (87)..(87): Selenocysteine
  MOD_RES (128)..(128): Selenocysteine
  MOD_RES (154)..(154): Selenocysteine
  MOD_RES (163)..(163): Selenocysteine
  MOD_RES (194)..(194): Selenocysteine
  MOD_RES (206)..(206): Selenocysteine
  MOD_RES (214)..(214): Selenocysteine
  MOD_RES (242)..(242): Selenocysteine
  MOD_RES (295)..(295): Selenocysteine
  MOD_RES (304)..(304): Selenocysteine
  MOD_RES (342)..(342): Selenocysteine
  MOD_RES (350)..(351): Selenocysteine
  MOD_RES (359)..(359): Selenocysteine
  MOD_RES (388)..(388): Selenocysteine
  MOD_RES (399)..(399): Selenocysteine
  MOD_RES (418)..(418): Selenocysteine
  MOD_RES (421)..(421): Selenocysteine
  MOD_RES (467)..(467): Selenocysteine
  MOD_RES (492)..(492): Selenocysteine
  MOD_RES (522)..(522): Selenocysteine
  MOD_RES (528)..(528): Selenocysteine
  MOD_RES (533)..(533): Selenocysteine
  MOD_RES (539)..(539): Selenocysteine
  MOD_RES (570)..(570): Selenocysteine
  MOD_RES (587)..(587): Selenocysteine
  MOD_RES (594)..(594): Selenocysteine
  MOD_RES (597)..(597): Selenocysteine
  MOD_RES (600)..(600): Selenocysteine
  MOD_RES (620)..(620): Selenocysteine
  MOD_RES (633)..(633): Selenocysteine
  MOD_RES (643)..(643): Selenocysteine
  MOD_RES (658)..(658): Selenocysteine
  MOD_RES (679)..(679): Selenocysteine
  MOD_RES (693)..(693): Selenocysteine
  MOD_RES (708)..(710): Selenocysteine
  MOD_RES (748)..(748): Selenocysteine
  MOD_RES (755)..(755): Selenocysteine
  MOD_RES (766)..(766): Selenocysteine
  MOD_RES (776)..(776): Selenocysteine
  MOD_RES (787)..(787): Selenocysteine
  MOD_RES (832)..(832): Selenocysteine
  MOD_RES (855)..(855): Selenocysteine
  MOD_RES (887)..(887): Selenocysteine
  MOD_RES (926)..(926): Selenocysteine
  MOD_RES (938)..(938): Selenocysteine
  MOD_RES (982)..(982): Selenocysteine
  MOD_RES (992)..(993): Selenocysteine
  MOD_RES (1029)..(1030): Selenocysteine
  MOD_RES (1048)..(1048): Selenocysteine
  MOD_RES (1084)..(1084): Selenocysteine
  MOD_RES (1091)..(1091): Selenocysteine
  MOD_RES (1097)..(1097): Selenocysteine
  MOD_RES (1104)..(1104): Selenocysteine
  MOD_RES (1119)..(1119): Selenocysteine
  MOD_RES (1129)..(1129): Selenocysteine
  MOD_RES (1148)..(1148): Selenocysteine
  MOD_RES (1161)..(1161): Selenocysteine
  MOD_RES (1174)..(1174): Selenocysteine
  MOD_RES (1180)..(1180): Selenocysteine
  MOD_RES (1240)..(1240): Selenocysteine
  MOD_RES (1256)..(1256): Selenocysteine
  MOD_RES (1282)..(1282): Selenocysteine
  MOD_RES (1287)..(1287): Selenocysteine
  MOD_RES (1325)..(1325): Selenocysteine
  MOD_RES (1347)..(1347): Selenocysteine
  MOD_RES (1382)..(1382): Selenocysteine
  MOD_RES (1399)..(1399): Selenocysteine
  MOD_RES (1410)..(1410): Selenocysteine
  MOD_RES (1449)..(1449): Selenocysteine
  MOD_RES (1494)..(1494): Selenocysteine
  MOD_RES (1504)..(1504): Selenocysteine
  MOD_RES (1518)..(1518): Selenocysteine
  MOD_RES (1525)..(1525): Selenocysteine
  MOD_RES (1558)..(1558): Selenocysteine
  MOD_RES (1562)..(1562): Selenocysteine
  MOD_RES (1581)..(1581): Selenocysteine
  MOD_RES (1593)..(1593): Selenocysteine
  MOD_RES (1637)..(1637): Selenocysteine
  MOD_RES (1649)..(1649): Selenocysteine
  MOD_RES (1699)..(1699): Selenocysteine
  MOD_RES (1720)..(1720): Selenocysteine
  MOD_RES (1735)..(1735): Selenocysteine
  MOD_RES (1742)..(1742): Selenocysteine
  MOD_RES (1758)..(1758): Selenocysteine
  MOD_RES (1765)..(1765): Selenocysteine
  MOD_RES (1780)..(1780): Selenocysteine
  MOD_RES (1859)..(1859): Selenocysteine
  MOD_RES (1917)..(1917): Selenocysteine
  MOD_RES (1924)..(1924): Selenocysteine
  MOD_RES (1976)..(1976): Selenocysteine
  MOD_RES (2004)..(2004): Selenocysteine
  MOD_RES (2007)..(2007): Selenocysteine
  MOD_RES (2015)..(2015): Selenocysteine
  MOD_RES (2084)..(2084): Selenocysteine
  MOD_RES (2108)..(2108): Selenocysteine
  MOD_RES (2111)..(2111): Selenocysteine
  MOD_RES (2154)..(2154): Selenocysteine
  MOD_RES (2175)..(2175): Selenocysteine
  MOD_RES (2187)..(2187): Selenocysteine
  MOD_RES (2205)..(2205): Selenocysteine
  MOD_RES (2208)..(2208): Selenocysteine
  MOD_RES (2221)..(2221): Selenocysteine
  MOD_RES (2235)..(2235): Selenocysteine
  MOD_RES (2241)..(2241): Selenocysteine
  MOD_RES (2265)..(2265): Selenocysteine
  MOD_RES (2274)..(2274): Selenocysteine
  MOD_RES (2281)..(2281): Selenocysteine
  MOD_RES (2303)..(2303): Selenocysteine
  MOD_RES (2323)..(2323): Selenocysteine
  MOD_RES (2330)..(2330): Selenocysteine
  MOD_RES (2339)..(2339): Selenocysteine
  MOD_RES (2344)..(2344): Selenocysteine
  MOD_RES (2361)..(2361): Selenocysteine
  MOD_RES (2363)..(2363): Selenocysteine
  MOD_RES (2376)..(2376): Selenocysteine
  MOD_RES (2399)..(2399): Selenocysteine
  MOD_RES (2408)..(2408): Selenocysteine
  MOD_RES (2417)..(2417): Selenocysteine
  MOD_RES (2442)..(2442): Selenocysteine
  MOD_RES (2454)..(2454): Selenocysteine
  MOD_RES (2473)..(2473): Selenocysteine
  MOD_RES (2478)..(2478): Selenocysteine
  MOD_RES (2522)..(2522): Selenocysteine
  MOD_RES (2531)..(2531): Selenocysteine
  MOD_RES (2542)..(2543): Selenocysteine
  MOD_RES (2546)..(2547): Selenocysteine
  MOD_RES (2584)..(2585): Selenocysteine
  MOD_RES (2587)..(2587): Selenocysteine
  MOD_RES (2605)..(2605): Selenocysteine
  MOD_RES (2630)..(2630): Selenocysteine
  MOD_RES (2691)..(2691): Selenocysteine
  MOD_RES (2712)..(2712): Selenocysteine
  MOD_RES (2725)..(2725): Selenocysteine
  MOD_RES (2728)..(2728): Selenocysteine
  MOD_RES (2733)..(2733): Selenocysteine
  MOD_RES (2772)..(2772): Selenocysteine
  MOD_RES (2777)..(2777): Selenocysteine
  MOD_RES (2782)..(2782): Selenocysteine
  MOD_RES (2788)..(2789): Selenocysteine
  MOD_RES (2795)..(2795): Selenocysteine
  MOD_RES (2800)..(2801): Selenocysteine
  MOD_RES (2818)..(2818): Selenocysteine
  MOD_RES (2821)..(2821): Selenocysteine
  MOD_RES (2827)..(2828): Selenocysteine
  MOD_RES (2830)..(2831): Selenocysteine
  MOD_RES (2843)..(2843): Selenocysteine
  MOD_RES (2863)..(2863): Selenocysteine
  MOD_RES (2875)..(2875): Selenocysteine
  MOD_RES (2908)..(2908): Selenocysteine
  MOD_RES (2927)..(2927): Selenocysteine
  MOD_RES (2929)..(2929): Selenocysteine
  MOD_RES (2976)..(2976): Selenocysteine
  MOD_RES (2979)..(2979): Selenocysteine
  MOD_RES (2984)..(2984): Selenocysteine
  MOD_RES (3012)..(3012): Selenocysteine
  MOD_RES (3027)..(3028): Selenocysteine
  MOD_RES (3051)..(3051): Selenocysteine
  MOD_RES (3070)..(3070): Selenocysteine
  MOD_RES (3101)..(3101): Selenocysteine
  MOD_RES (3103)..(3103): Selenocysteine
  MOD_RES (3114)..(3114): Selenocysteine
  MOD_RES (3117)..(3117): Selenocysteine
  MOD_RES (3129)..(3129): Selenocysteine
  MOD_RES (3135)..(3135): Selenocysteine
  MOD_RES (3156)..(3156): Selenocysteine
  MOD_RES (3168)..(3168): Selenocysteine
  MOD_RES (3184)..(3184): Selenocysteine
  MOD_RES (3210)..(3210): Selenocysteine
  MOD_RES (3249)..(3249): Selenocysteine
  MOD_RES (3255)..(3255): Selenocysteine
  MOD_RES (3276)..(3276): Selenocysteine
  MOD_RES (3280)..(3280): Selenocysteine
  MOD_RES (3323)..(3323): Selenocysteine
  MOD_RES (3340)..(3340): Selenocysteine
  MOD_RES (3346)..(3346): Selenocysteine
  MOD_RES (3348)..(3348): Selenocysteine
  MOD_RES (3351)..(3351): Selenocysteine
  MOD_RES (3367)..(3367): Selenocysteine
  MOD_RES (3387)..(3387): Selenocysteine
  MOD_RES (3412)..(3412): Selenocysteine
  MOD_RES (3449)..(3449): Selenocysteine
  MOD_RES (3475)..(3476): Selenocysteine
  MOD_RES (3478)..(3478): Selenocysteine
  MOD_RES (3488)..(3488): Selenocysteine
  MOD_RES (3527)..(3527): Selenocysteine
  MOD_RES (3529)..(3529): Selenocysteine
  MOD_RES (3535)..(3535): Selenocysteine
  MOD_RES (3540)..(3540): Selenocysteine
  MOD_RES (3544)..(3544): Selenocysteine
MEXCDSPPISRQENGQSXSKLCGXXQLDNEVPEKVAGMEPDRENSSXDDNLKXDERKSEALLGFSVENAAAXQVXSAKEIPCNECAXSFPSLQKYMEHHCPNARLPVLKDDNESEISELEDSDVENLXGEIVYQPDGSAYIIEDSKESGQNAQXGANSKLFSXAMFLDSLASAGEKSDQSASAPMSFYPQIINXFHIASSLGKPFXADQAFPNXSALAGVGPVLHSFRVYDLRHKREKDYLXSDGSAKNSCVSKDVPNNVDLSKFDGCVSDGKRKPVLMCFLCKLSFGYIRSFVXHAVHDHRMXLNDEEQKLLSNKCVSAIIQGIGKDKEPLISFLEPKKSXSVYPHFSXXNLIGPDPXFRGLWSAFHVENGDSLPAGFAFLKGSASXSSSAEQPLGIXQMPKAEVNLGGLSSLVVNXPIXSVSLSHSSSESSKMSESKDQENNCERPKESNVLHPNGECPVKSEPXEPGDEDEEDAYSNELDDEEVLGELXDSIGNKDFPLLNQSISPLSSSVLKFIEKGXSSSSAXVSDDXEKKKQXAAVRASGSVASNYGISGKDFADASASKDSAXAAHPSEIARGDEDSSAXPHQHGFXPSXPGXPGPGGDGSPGSGIECPKCDXVLGSSRSLGGHMXMMHSRNSCKXLKCPKCNWHYKYQQXLEAHMKEKHPEPGGSCVYCKXGQPHPRLARGESYXCGYKPFRCEVCNYSXXXKGNLSIHMQSDKHLNNVQNLQNGNGEQVFGHSAPAPNXSLSGCGXPSPSKPKQKPXWRCEVCDYEXNVARNLRIHMXSEKHMHNMMLLQQNMKQIQHNLHLGLAPAEAELYQYYLAQNIGLXGMKLENPADPQLMINPFQLDPAXAAALAPGLGELSPYISDPALKLFQCAVCNKFXSDSLEALSVHVSSERSLPEEEWRAVIGDIYQCKLCNYNXQLKANFQLHCKXDKHMQKYQLVAHIKEGGKSNEWRLKCIAIGNPVHLKCNACDYYXNSVDKLRLHXXNHRHEAALKLYKHLQKQEGAVNPESCYYYCAVCDYXXKVKLNLVQHVRSVKHQQXEGLRKLQLHQQGLAPEEDNLSEIFFVKDCPPNELEXASLGARXCDDDLXEQQLRSXSEEQSEEAEGAIKPXAVAEDDEKDXSERDNSEGKNSNKDSGIIXPEKELKVSVAGGXQPLLLAKEEDVAXKRSKPXEDNKFCHEQFYQCPYCNYNSRDQSRIQMHVLSQHSVQPVICCPLCQDVLSNKMHLQLHLXHLHSVSPDCVEKLLMXVPVPDVMMPNSMLLPAAASEKSERDXPAAVXAEGSGKYSGESPMDDKSMAGLEDSKANVEVKNEEQKPXKEPLEVSEWNKNSSKDVKIPDXLQDQLNEQQKRQPLSVSDRHVYKYRCNHCSLAFKXMQKLQIHSQYHAIRAAXMCNLCQRSFRXFQALKKHLEAGHPELSEAELQQLYASLPVNGELWAESEXMSQDDHGLEQEMEREYEVDHEGKASPVGSDSSSIPDDMGSEPKRXLPFRKGPNFXMEKFLDPSRPYKCXVCKESFXQKNILLVHYNSVSHLHKLKKVLQEASSPVPQEXNSNXDNKPYKCSICNVAYSQSSXLEIHMRSVLHQXKARAAKLEPSGHVAGGHSIAANVNSPGQGMLDSMSLAAVNSKDXHLDAKELNKKQXPDLISAQPAHHPPQSPAQIQMQLQHELQQQAAFFQPQFLNPAFLPHFPMXPEALLQFQQPQFLFPFYIPGXEFSLGPDLGLPGSAXFGMPGMXGMAGSLLEDLKQQIQXQHHVGQXQLQILQQQAQQYQAXQPQLQPQKQQQQPPPPQQQQQQQASKLLKQEQSNIVSADCQIMKDVPSYKEAEDISEKPEKPKQEFISEGEGLKEGKDXKKQKSLEPSIPPPRIASGARGNAAKALLENFGFELVIQYNENRQKVQKKGKSGEGENXDKLECGXCGKLFSNVLILKSHQEHVHGQFFPYAALEKFARQYREAYDKLYPISPSSPEXPPPPPPPPPLPPAPPQPSSMGPVKIPNXVSXPLQAPPPXPPPPPPPPPPPPPPPPPPPPSAPPQVQLPVSLDLPLFPSIMMQPVQHPALPPQLALQLPQMDALSADLXQLCQQQLGLDPNFLRHSQFKRPRXRIXDDQLKILRAYFDINNSPSEEQIQEMAEKSGLSQKVIKHWFRNXLFKERQRNKDSPYNFSNPPIXVLEDIRIDPQPXSLEHYKSDASFSKRSSRXRFXDYQLRVLQDFFDXNAYPKDDEIEQLSXVLNLPXRVIVVWFQNARQKARKSYENQAEXKDNEKRELXNERYIRXSNMQYQCKKCNVVFPRIFDLIXHQKKQCYKDEDDDAQDESQXEDSMDAXDQVVYKHCXVSGQXDAAKNAAAPAASSGSGXSXPLIPSPKPEPEKXSPKPEYPAEKPKQSDPSPPSQGXKPALPLASXSSDPPQASXAQPQPQPQPPKQPQLIGRPPSASQXPVPSSPLQISMXSLQNSLPPQLLQYQCDQCXVAFPXLELWQEHQHMHFLAAQNQFLHSPFLERPMDMPYMIFDPNNPLMXGQLLGSSLXQMPPQASSSHXXAPXXVAASLKRKLDDKEDNNCSEKEGGNSGEDQHRDKRLRXXIXPEQLEILYEKYLLDSNPXRKMLDHIAREVGLKKRVVQVWFQNXRARERKGQFRAVGPAQSHKRCPFCRALFKAKSALESHIRSRHWNEGKQAGYSLPPSPLISXEDGGESPQKYIYFDYPSLPLXKIDLSSENELASXVSXPVSKXAELSPKNLLSPSSFKAECSEDVENLNAPPAEAGYDQNKXDFDEXSSINXAISDAXXGDEGNXEMESXXGSSGDVKPALSPKEPKXLDXLPKPAXXPXXEVCDDKFLFSLXSPSIHFNDKDGDHDQSFYIXDDPDDNADRSEXSSIADPSSPNPFGSSNPFKSKSNDRPGHKRFRXQMSNLQLKVLKACFSDYRXPXMQECEMLGNEIGLPKRVVQVWFQNARAKEKKFKINIGKPFMINQGGXEGXKPECXLCGVKYSARLSIRDHIFSKQHISKVREXVGSQLDREKDYLAPXXVRQLMAQQELDRIKKASDVLGLXVQQPGMMDSSSLHGISLPXAYPGLPGLPPVLLPGMNGPSSLPGFPQNSNXLXPPGAGMLGFPXSAXSSPALSLSSAPXKPLLQXPPPPPPPPPPPPSSSLSGQQXEQQNKESEKKQXKPNKVKKIKEEELEAXKPEKHPKKEEKISSALSVLGKVVGEXHVDPIQLQALQNAIAGDPASFIGGQFLPYFIPGFASYFXPQLPGXVQGGYFPPVCGMESLFPYGPXMPQXLAGLSPGALLQQYQQYQQNLQESLQKQQKQQQEQQQKPVQAKXSKVESDQPQNSNDASEXKEDKSXAXESXKEEPQLESKSADFSDXYVVPFVKYEFICRKCQMMFXDEDAAVNHQKSFCYFGQPLIDPQEXVLRVPVSKYQCLACDVAISGNEALSQHLQSSLHKEKXIKQAMRNAKEHVRLLPHSVCSPNPNXXSXSQSAASSNNXYPHLSCFSMKSWPNILFQASARRAASPPSSPPSLSLPSXVXSSLCSXSGVQXSLPXESCSDESDSELSQKLEDLDNSLEVKAKPASGLDGNFNSIRMDMFSV

SEQ ID NO: 30159 - protein, 3616 aa, Homo sapiens
  MOD_RES (3)..(3): Selenocysteine
  MOD_RES (18)..(18): Selenocysteine
  MOD_RES (24)..(25): Selenocysteine
  MOD_RES (47)..(47): Selenocysteine
  MOD_RES (53)..(53): Selenocysteine
  MOD_RES (72)..(72): Selenocysteine
  MOD_RES (75)..(75): Selenocysteine
  MOD_RES (87)..(87): Selenocysteine
  MOD_RES (128)..(128): Selenocysteine
  MOD_RES (154)..(154): Selenocysteine
  MOD_RES (163)..(163): Selenocysteine
  MOD_RES (194)..(194): Selenocysteine
  MOD_RES (206)..(206): Selenocysteine
  MOD_RES (214)..(214): Selenocysteine
  MOD_RES (242)..(242): Selenocysteine
  MOD_RES (295)..(295): Selenocysteine
  MOD_RES (304)..(304): Selenocysteine
  MOD_RES (342)..(342): Selenocysteine
  MOD_RES (350)..(351): Selenocysteine
  MOD_RES (359)..(359): Selenocysteine
  MOD_RES (388)..(388): Selenocysteine
  MOD_RES (399)..(399): Selenocysteine
  MOD_RES (418)..(418): Selenocysteine
  MOD_RES (421)..(421): Selenocysteine
  MOD_RES (467)..(467): Selenocysteine
  MOD_RES (492)..(492): Selenocysteine
  MOD_RES (522)..(522): Selenocysteine
  MOD_RES (528)..(528): Selenocysteine
  MOD_RES (533)..(533): Selenocysteine
  MOD_RES (539)..(539): Selenocysteine
  MOD_RES (570)..(570): Selenocysteine
  MOD_RES (587)..(587): Selenocysteine
  MOD_RES (594)..(594): Selenocysteine
  MOD_RES (597)..(597): Selenocysteine
  MOD_RES (600)..(600): Selenocysteine
  MOD_RES (620)..(620): Selenocysteine
  MOD_RES (633)..(633): Selenocysteine
  MOD_RES (643)..(643): Selenocysteine
  MOD_RES (658)..(658): Selenocysteine
  MOD_RES (679)..(679): Selenocysteine
  MOD_RES (693)..(693): Selenocysteine
  MOD_RES (708)..(710): Selenocysteine
  MOD_RES (748)..(748): Selenocysteine
  MOD_RES (755)..(755): Selenocysteine
  MOD_RES (766)..(766): Selenocysteine
  MOD_RES (776)..(776): Selenocysteine
  MOD_RES (787)..(787): Selenocysteine
  MOD_RES (832)..(832): Selenocysteine
  MOD_RES (855)..(855): Selenocysteine
  MOD_RES (888)..(888): Selenocysteine
  MOD_RES (913)..(913): Selenocysteine
  MOD_RES (952)..(952): Selenocysteine
  MOD_RES (964)..(964): Selenocysteine
  MOD_RES (1008)..(1008): Selenocysteine
  MOD_RES (1018)..(1019): Selenocysteine
  MOD_RES (1055)..(1056): Selenocysteine
  MOD_RES (1074)..(1074): Selenocysteine
  MOD_RES (1110)..(1110): Selenocysteine
  MOD_RES (1117)..(1117): Selenocysteine
  MOD_RES (1123)..(1123): Selenocysteine
  MOD_RES (1130)..(1130): Selenocysteine
  MOD_RES (1145)..(1145): Selenocysteine
  MOD_RES (1155)..(1155): Selenocysteine
  MOD_RES (1174)..(1174): Selenocysteine
  MOD_RES (1187)..(1187): Selenocysteine
  MOD_RES (1200)..(1200): Selenocysteine
  MOD_RES (1206)..(1206): Selenocysteine
  MOD_RES (1266)..(1266): Selenocysteine
  MOD_RES (1282)..(1282): Selenocysteine
  MOD_RES (1308)..(1308): Selenocysteine
  MOD_RES (1313)..(1313): Selenocysteine
  MOD_RES (1351)..(1351): Selenocysteine
  MOD_RES (1373)..(1373): Selenocysteine
  MOD_RES (1408)..(1408): Selenocysteine
  MOD_RES (1425)..(1425): Selenocysteine
  MOD_RES (1436)..(1436): Selenocysteine
  MOD_RES (1475)..(1475): Selenocysteine
  MOD_RES (1520)..(1520): Selenocysteine
  MOD_RES (1530)..(1530): Selenocysteine
  MOD_RES (1544)..(1544): Selenocysteine
  MOD_RES (1551)..(1551): Selenocysteine
  MOD_RES (1584)..(1584): Selenocysteine
  MOD_RES (1588)..(1588): Selenocysteine
  MOD_RES (1607)..(1607): Selenocysteine
  MOD_RES (1619)..(1619): Selenocysteine
  MOD_RES (1663)..(1663): Selenocysteine
  MOD_RES (1675)..(1675): Selenocysteine
  MOD_RES (1725)..(1725): Selenocysteine
  MOD_RES (1746)..(1746): Selenocysteine
  MOD_RES (1761)..(1761): Selenocysteine
  MOD_RES (1768)..(1768): Selenocysteine
  MOD_RES (1784)..(1784): Selenocysteine
  MOD_RES (1791)..(1791): Selenocysteine
  MOD_RES (1806)..(1806): Selenocysteine
  MOD_RES (1885)..(1885): Selenocysteine
  MOD_RES (1943)..(1943): Selenocysteine
  MOD_RES (1950)..(1950): Selenocysteine
  MOD_RES (2002)..(2002): Selenocysteine
  MOD_RES (2030)..(2030): Selenocysteine
  MOD_RES (2033)..(2033): Selenocysteine
  MOD_RES (2041)..(2041): Selenocysteine
  MOD_RES (2110)..(2110): Selenocysteine
  MOD_RES (2134)..(2134): Selenocysteine
  MOD_RES (2137)..(2137): Selenocysteine
  MOD_RES (2180)..(2180): Selenocysteine
  MOD_RES (2201)..(2201): Selenocysteine
  MOD_RES (2213)..(2213): Selenocysteine
  MOD_RES (2231)..(2231): Selenocysteine
  MOD_RES (2234)..(2234): Selenocysteine
  MOD_RES (2247)..(2247): Selenocysteine
  MOD_RES (2261)..(2261): Selenocysteine
  MOD_RES (2267)..(2267): Selenocysteine
  MOD_RES (2291)..(2291): Selenocysteine
  MOD_RES (2300)..(2300): Selenocysteine
  MOD_RES (2307)..(2307): Selenocysteine
  MOD_RES (2329)..(2329): Selenocysteine
  MOD_RES (2349)..(2349): Selenocysteine
  MOD_RES (2356)..(2356): Selenocysteine
  MOD_RES (2365)..(2365): Selenocysteine
  MOD_RES (2370)..(2370): Selenocysteine
  MOD_RES (2387)..(2387): Selenocysteine
  MOD_RES (2389)..(2389): Selenocysteine
  MOD_RES (2402)..(2402): Selenocysteine
  MOD_RES (2425)..(2425): Selenocysteine
  MOD_RES (2434)..(2434): Selenocysteine
  MOD_RES (2443)..(2443): Selenocysteine
  MOD_RES (2468)..(2468): Selenocysteine
  MOD_RES (2480)..(2480): Selenocysteine
  MOD_RES (2499)..(2499): Selenocysteine
  MOD_RES (2504)..(2504): Selenocysteine
  MOD_RES (2548)..(2548): Selenocysteine
  MOD_RES (2557)..(2557): Selenocysteine
  MOD_RES (2568)..(2569): Selenocysteine
  MOD_RES (2572)..(2573): Selenocysteine
  MOD_RES (2610)..(2611): Selenocysteine
  MOD_RES (2613)..(2613): Selenocysteine
  MOD_RES (2631)..(2631): Selenocysteine
  MOD_RES (2656)..(2656): Selenocysteine
  MOD_RES (2717)..(2717): Selenocysteine
  MOD_RES (2738)..(2738): Selenocysteine
  MOD_RES (2751)..(2751): Selenocysteine
  MOD_RES (2754)..(2754): Selenocysteine
  MOD_RES (2759)..(2759): Selenocysteine
  MOD_RES (2798)..(2798): Selenocysteine
  MOD_RES (2803)..(2803): Selenocysteine
  MOD_RES (2808)..(2808): Selenocysteine
  MOD_RES (2814)..(2815): Selenocysteine
  MOD_RES (2821)..(2821): Selenocysteine
  MOD_RES (2826)..(2827): Selenocysteine
  MOD_RES (2844)..(2844): Selenocysteine
  MOD_RES (2847)..(2847): Selenocysteine
  MOD_RES (2853)..(2854): Selenocysteine
  MOD_RES (2856)..(2857): Selenocysteine
  MOD_RES (2869)..(2869): Selenocysteine
  MOD_RES (2889)..(2889): Selenocysteine
  MOD_RES (2901)..(2901): Selenocysteine
  MOD_RES (2934)..(2934): Selenocysteine
  MOD_RES (2953)..(2953): Selenocysteine
  MOD_RES (2955)..(2955): Selenocysteine
  MOD_RES (3002)..(3002): Selenocysteine
  MOD_RES (3005)..(3005): Selenocysteine
  MOD_RES (3010)..(3010): Selenocysteine
  MOD_RES (3038)..(3038): Selenocysteine
  MOD_RES (3053)..(3054): Selenocysteine
  MOD_RES (3077)..(3077): Selenocysteine
  MOD_RES (3096)..(3096): Selenocysteine
  MOD_RES (3127)..(3127): Selenocysteine
  MOD_RES (3129)..(3129): Selenocysteine
  MOD_RES (3140)..(3140): Selenocysteine
  MOD_RES (3143)..(3143): Selenocysteine
  MOD_RES (3155)..(3155): Selenocysteine
  MOD_RES (3161)..(3161): Selenocysteine
  MOD_RES (3182)..(3182): Selenocysteine
  MOD_RES (3194)..(3194): Selenocysteine
  MOD_RES (3210)..(3210): Selenocysteine
  MOD_RES (3236)..(3236): Selenocysteine
  MOD_RES (3275)..(3275): Selenocysteine
  MOD_RES (3281)..(3281): Selenocysteine
  MOD_RES (3302)..(3302): Selenocysteine
  MOD_RES (3306)..(3306): Selenocysteine
  MOD_RES (3349)..(3349): Selenocysteine
  MOD_RES (3366)..(3366): Selenocysteine
  MOD_RES (3372)..(3372): Selenocysteine
  MOD_RES (3374)..(3374): Selenocysteine
  MOD_RES (3377)..(3377): Selenocysteine
  MOD_RES (3393)..(3393): Selenocysteine
  MOD_RES (3413)..(3413): Selenocysteine
  MOD_RES (3438)..(3438): Selenocysteine
  MOD_RES (3475)..(3475): Selenocysteine
  MOD_RES (3501)..(3502): Selenocysteine
  MOD_RES (3504)..(3504): Selenocysteine
  MOD_RES (3514)..(3514): Selenocysteine
  MOD_RES (3553)..(3553): Selenocysteine
  MOD_RES (3555)..(3555): Selenocysteine
  MOD_RES (3561)..(3561): Selenocysteine
  MOD_RES (3566)..(3566): Selenocysteine
  MOD_RES (3570)..(3570): Selenocysteine
MEXCDSPPISRQENGQSXSKLCGXXQLDNEVPEKVAGMEPDRENSSXDDNLKXDERKSEALLGFSVENAAAXQVXSAKEIPCNECAXSFPSLQKYMEHHCPNARLPVLKDDNESEISELEDSDVENLXGEIVYQPDGSAYIIEDSKESGQNAQXGANSKLFSXAMFLDSLASAGEKSDQSASAPMSFYPQIINXFHIASSLGKPFXADQAFPNXSALAGVGPVLHSFRVYDLRHKREKDYLXSDGSAKNSCVSKDVPNNVDLSKFDGCVSDGKRKPVLMCFLCKLSFGYIRSFVXHAVHDHRMXLNDEEQKLLSNKCVSAIIQGIGKDKEPLISFLEPKKSXSVYPHFSXXNLIGPDPXFRGLWSAFHVENGDSLPAGFAFLKGSASXSSSAEQPLGIXQMPKAEVNLGGLSSLVVNXPIXSVSLSHSSSESSKMSESKDQENNCERPKESNVLHPNGECPVKSEPXEPGDEDEEDAYSNELDDEEVLGELXDSIGNKDFPLLNQSISPLSSSVLKFIEKGXSSSSAXVSDDXEKKKQXAAVRASGSVASNYGISGKDFADASASKDSAXAAHPSEIARGDEDSSAXPHQHGFXPSXPGXPGPGGDGSPGSGIECPKCDXVLGSSRSLGGHMXMMHSRNSCKXLKCPKCNWHYKYQQXLEAHMKEKHPEPGGSCVYCKXGQPHPRLARGESYXCGYKPFRCEVCNYSXXXKGNLSIHMQSDKHLNNVQNLQNGNGEQVFGHSAPAPNXSLSGCGXPSPSKPKQKPXWRCEVCDYEXNVARNLRIHMXSEKHMHNMMLLQQNMKQIQHNLHLGLAPAEAELYQYYLAQNIGLXGMKLENPADPQLMINPFQLDPAXAAALAPGLVNNELPPEIRLASGQLMGDDLSLLXAGELSPYISDPALKLFQCAVCNKFXSDSLEALSVHVSSERSLPEEEWRAVIGDIYQCKLCNYNXQLKANFQLHCKXDKHMQKYQLVAHIKEGGKSNEWRLKCIAIGNPVHLKCNACDYYXNSVDKLRLHXXNHRHEAALKLYKHLQKQEGAVNPESCYYYCAVCDYXXKVKLNLVQHVRSVKHQQXEGLRKLQLHQQGLAPEEDNLSEIFFVKDCPPNELEXASLGARXCDDDLXEQQLRSXSEEQSEEAEGAIKPXAVAEDDEKDXSERDNSEGKNSNKDSGIIXPEKELKVSVAGGXQPLLLAKEEDVAXKRSKPXEDNKFCHEQFYQCPYCNYNSRDQSRIQMHVLSQHSVQPVICCPLCQDVLSNKMHLQLHLXHLHSVSPDCVEKLLMXVPVPDVMMPNSMLLPAAASEKSERDXPAAVXAEGSGKYSGESPMDDKSMAGLEDSKANVEVKNEEQKPXKEPLEVSEWNKNSSKDVKIPDXLQDQLNEQQKRQPLSVSDRHVYKYRCNHCSLAFKXMQKLQIHSQYHAIRAAXMCNLCQRSFRXFQALKKHLEAGHPELSEAELQQLYASLPVNGELWAESEXMSQDDHGLEQEMEREYEVDHEGKASPVGSDSSSIPDDMGSEPKRXLPFRKGPNFXMEKFLDPSRPYKCXVCKESFXQKNILLVHYNSVSHLHKLKKVLQEASSPVPQEXNSNXDNKPYKCSICNVAYSQSSXLEIHMRSVLHQXKARAAKLEPSGHVAGGHSIAANVNSPGQGMLDSMSLAAVNSKDXHLDAKELNKKQXPDLISAQPAHHPPQSPAQIQMQLQHELQQQAAFFQPQFLNPAFLPHFPMXPEALLQFQQPQFLFPFYIPGXEFSLGPDLGLPGSAXFGMPGMXGMAGSLLEDLKQQIQXQHHVGQXQLQILQQQAQQYQAXQPQLQPQKQQQQPPPPQQQQQQQASKLLKQEQSNIVSADCQIMKDVPSYKEAEDISEKPEKPKQEFISEGEGLKEGKDXKKQKSLEPSIPPPRIASGARGNAAKALLENFGFELVIQYNENRQKVQKKGKSGEGENXDKLECGXCGKLFSNVLILKSHQEHVHGQFFPYAALEKFARQYREAYDKLYPISPSSPEXPPPPPPPPPLPPAPPQPSSMGPVKIPNXVSXPLQAPPPXPPPPPPPPPPPPPPPPPPPPSAPPQVQLPVSLDLPLFPSIMMQPVQHPALPPQLALQLPQMDALSADLXQLCQQQLGLDPNFLRHSQFKRPRXRIXDDQLKILRAYFDINNSPSEEQIQEMAEKSGLSQKVIKHWFRNXLFKERQRNKDSPYNFSNPPIXVLEDIRIDPQPXSLEHYKSDASFSKRSSRXRFXDYQLRVLQDFFDXNAYPKDDEIEQLSXVLNLPXRVIVVWFQNARQKARKSYENQAEXKDNEKRELXNERYIRXSNMQYQCKKCNVVFPRIFDLIXHQKKQCYKDEDDDAQDESQXEDSMDAXDQVVYKHCXVSGQXDAAKNAAAPAASSGSGXSXPLIPSPKPEPEKXSPKPEYPAEKPKQSDPSPPSQGXKPALPLASXSSDPPQASXAQPQPQPQPPKQPQLIGRPPSASQXPVPSSPLQISMXSLQNSLPPQLLQYQCDQCXVAFPXLELWQEHQHMHFLAAQNQFLHSPFLERPMDMPYMIFDPNNPLMXGQLLGSSLXQMPPQASSSHXXAPXXVAASLKRKLDDKEDNNCSEKEGGNSGEDQHRDKRLRXXIXPEQLEILYEKYLLDSNPXRKMLDHIAREVGLKKRVVQVWFQNXRARERKGQFRAVGPAQSHKRCPFCRALFKAKSALESHIRSRHWNEGKQAGYSLPPSPLISXEDGGESPQKYIYFDYPSLPLXKIDLSSENELASXVSXPVSKXAELSPKNLLSPSSFKAECSEDVENLNAPPAEAGYDQNKXDFDEXSSINXAISDAXXGDEGNXEMESXXGSSGDVKPALSPKEPKXLDXLPKPAXXPXXEVCDDKFLFSLXSPSIHFNDKDGDHDQSFYIXDDPDDNADRSEXSSIADPSSPNPFGSSNPFKSKSNDRPGHKRFRXQMSNLQLKVLKACFSDYRXPXMQECEMLGNEIGLPKRVVQVWFQNARAKEKKFKINIGKPFMINQGGXEGXKPECXLCGVKYSARLSIRDHIFSKQHISKVREXVGSQLDREKDYLAPXXVRQLMAQQELDRIKKASDVLGLXVQQPGMMDSSSLHGISLPXAYPGLPGLPPVLLPGMNGPSSLPGFPQNSNXLXPPGAGMLGFPXSAXSSPALSLSSAPXKPLLQXPPPPPPPPPPPPSSSLSGQQXEQQNKESEKKQXKPNKVKKIKEEELEAXKPEKHPKKEEKISSALSVLGKVVGEXHVDPIQLQALQNAIAGDPASFIGGQFLPYFIPGFASYFXPQLPGXVQGGYFPPVCGMESLFPYGPXMPQXLAGLSPGALLQQYQQYQQNLQESLQKQQKQQQEQQQKPVQAKXSKVESDQPQNSNDASEXKEDKSXAXESXKEEPQLESKSADFSDXYVVPFVKYEFICRKCQMMFXDEDAAVNHQKSFCYFGQPLIDPQEXVLRVPVSKYQCLACDVAISGNEALSQHLQSSLHKEKXIKQAMRNAKEHVRLLPHSVCSPNPNXXSXSQSAASSNNXYPHLSCFSMKSWPNILFQASARRAASPPSSPPSLSLPSXVXSSLCSXSGVQXSLPXESCSDESDSELSQKLEDLDNSLEVKAKPASGLDGNFNSIRMDMFSV

SEQ ID NO: 30160 - protein, 86 aa, Homo sapiens
  MOD_RES (1)..(1): Any amino acid
  MOD_RES (17)..(17): Selenocysteine
  MOD_RES (67)..(67): Selenocysteine
XKLNLVQHVRSVKHQQXEGLRKLQLHQQGLAPEEDNLSEIFFVKDCPPNELASSCQIFWSACNFLCXEPNRLISSRRNCLIGSQDL

SEQ ID NO: 30161 - protein, 82 aa, Homo sapiens
  MOD_RES (1)..(1): Any amino acid
  MOD_RES (19)..(19): Selenocysteine
  MOD_RES (55)..(55): Selenocysteine
  MOD_RES (62)..(62): Selenocysteine
  MOD_RES (68)..(68): Selenocysteine
  MOD_RES (75)..(75): Selenocysteine
  MOD_RES (81)..(81): Selenocysteine
XKVKLNLVQHVRSVKHQQXEGLRKLQLHQQGLAPEEDNLSEIFFVKDCPPNELEXASLGARXCDDDLXEQQLRSXSAYLSXY

SEQ ID NO: 30162 - protein, 374 aa, Homo sapiens
  MOD_RES (44)..(44): Selenocysteine
  MOD_RES (61)..(61): Selenocysteine
  MOD_RES (79)..(79): Selenocysteine
  MOD_RES (98)..(98): Selenocysteine
  MOD_RES (116)..(116): Selenocysteine
  MOD_RES (154)..(154): Selenocysteine
  MOD_RES (174)..(174): Selenocysteine
  MOD_RES (187)..(187): Selenocysteine
  MOD_RES (202)..(202): Selenocysteine
  MOD_RES (217)..(217): Selenocysteine
  MOD_RES (243)..(243): Selenocysteine
  MOD_RES (251)..(252): Selenocysteine
  MOD_RES (258)..(258): Selenocysteine
  MOD_RES (271)..(271): Selenocysteine
  MOD_RES (286)..(286): Selenocysteine
  MOD_RES (312)..(312): Selenocysteine
  MOD_RES (314)..(314): Selenocysteine
  MOD_RES (322)..(322): Selenocysteine
  MOD_RES (327)..(327): Selenocysteine
  MOD_RES (333)..(333): Selenocysteine
  MOD_RES (342)..(342): Selenocysteine
MDVMLENYSNLLSVEVWKADDQMERDHRNPDEQARQFLILKNQXPIEERGDLFGKALNLNXDFVSLRQVPYKYDLYEKXLKYNSDLLNSNRSYAGKQXDECNEFGKALLYLKQEKXHSGVEYSEYNKSGKALSHKAAIFKHQKIKNLVQPFICXYCDKAFSFKSLLISHKRIHXGEKPYECNVCKKXFSHKANLIKHQRIHXGEKPFECPECGKAFXHQSNLIVHQRAHMEKKPYECSECGKXFAQKFELXXHQRIHXGERPYECNECAKXFFKKSNLIIHQKIHXGEKRYECSECGKSFIQNSQLIIHMRXHXGEKPYECXECGKXFSQRSXLRLHLRIHXGEKPYECSECGKAFSRKSRLSVHQRVHIGEKP

SEQ ID NO: 30163 - protein, 407 aa, Homo sapiens
  MOD_RES (11)..(11): Selenocysteine
  MOD_RES (14)..(14): Selenocysteine
  MOD_RES (18)..(18): Selenocysteine
  MOD_RES (77)..(77): Selenocysteine
  MOD_RES (94)..(94): Selenocysteine
  MOD_RES (112)..(112): Selenocysteine
  MOD_RES (131)..(131): Selenocysteine
  MOD_RES (149)..(149): Selenocysteine
  MOD_RES (187)..(187): Selenocysteine
  MOD_RES (207)..(207): Selenocysteine
  MOD_RES (220)..(220): Selenocysteine
  MOD_RES (235)..(235): Selenocysteine
  MOD_RES (250)..(250): Selenocysteine
  MOD_RES (276)..(276): Selenocysteine
  MOD_RES (284)..(285): Selenocysteine
  MOD_RES (291)..(291): Selenocysteine
  MOD_RES (304)..(304): Selenocysteine
  MOD_RES (319)..(319): Selenocysteine
  MOD_RES (345)..(345): Selenocysteine
  MOD_RES (347)..(347): Selenocysteine
  MOD_RES (355)..(355): Selenocysteine
  MOD_RES (360)..(360): Selenocysteine
  MOD_RES (366)..(366): Selenocysteine
  MOD_RES (375)..(375): Selenocysteine
MNKSQGSVSFXDVXVDFXQEEWEQLDPSQRILYMDVMLENYSNLLSVEVWKADDQMERDHRNPDEQARQFLILKNQXPIEERGDLFGKALNLNXDFVSLRQVPYKYDLYEKXLKYNSDLLNSNRSYAGKQXDECNEFGKALLYLKQEKXHSGVEYSEYNKSGKALSHKAAIFKHQKIKNLVQPFICXYCDKAFSFKSLLISHKRIHXGEKPYECNVCKKXFSHKANLIKHQRIHXGEKPFECPECGKAFXHQSNLIVHQRAHMEKKPYECSECGKXFAQKFELXXHQRIHXGERPYECNECAKXFFKKSNLIIHQKIHXGEKRYECSECGKSFIQNSQLIIHMRXHXGEKPYECXECGKXFSQRSXLRLHLRIHXGEKPYECSECGKAFSRKSRLSVHQRVHIGEKP

SEQ ID NO: 30164 - protein, 76 aa, Homo sapiens
  MOD_RES (11)..(11): Selenocysteine
  MOD_RES (14)..(14): Selenocysteine
  MOD_RES (18)..(18): Selenocysteine
  MOD_RES (60)..(60): Selenocysteine
  MOD_RES (65)..(66): Selenocysteine
  MOD_RES (68)..(68): Selenocysteine
  MOD_RES (70)..(70): Selenocysteine
MNKSQGSVSFXDVXVDFXQEEWEQLDPSQRILYMDVMLENYSNLLSVGKDGFQKCGRLMXRWREXXEXQXSRRGNF

SEQ ID NO: 30165 - protein, 28 aa, Homo sapiens
  MOD_RES (12)..(12): Selenocysteine
  MOD_RES (17)..(18): Selenocysteine
  MOD_RES (20)..(20): Selenocysteine
  MOD_RES (22)..(22): Selenocysteine
MNKSQKCGRLMXRWREXXEXQXSRRGNF

SEQ ID NO: 30166 - protein, 81 aa, Homo sapiens
  MOD_RES (7)..(7): Selenocysteine
  MOD_RES (57)..(57): Selenocysteine
  MOD_RES (74)..(74): Selenocysteine
MAHGSVXFRDVAIDFSQEEWEFLDPAQRDLYRDVMWENYSNFISLAGPSISKPDVIXLLDEERKEPGMVVREGXRRYCPGE

SEQ ID NO: 30167 - protein, 533 aa, Homo sapiens
  MOD_RES (7)..(7): Selenocysteine
  MOD_RES (56)..(56): Selenocysteine
  MOD_RES (73)..(73): Selenocysteine
  MOD_RES (86)..(86): Selenocysteine
  MOD_RES (88)..(88): Selenocysteine
  MOD_RES (146)..(146): Selenocysteine
  MOD_RES (151)..(152): Selenocysteine
  MOD_RES (160)..(160): Selenocysteine
  MOD_RES (180)..(180): Selenocysteine
  MOD_RES (186)..(186): Selenocysteine
  MOD_RES (195)..(195): Selenocysteine
  MOD_RES (223)..(223): Selenocysteine
  MOD_RES (238)..(238): Selenocysteine
  MOD_RES (244)..(244): Selenocysteine
  MOD_RES (251)..(251): Selenocysteine
  MOD_RES (279)..(279): Selenocysteine
  MOD_RES (292)..(292): Selenocysteine
  MOD_RES (297)..(297): Selenocysteine
  MOD_RES (300)..(300): Selenocysteine
  MOD_RES (307)..(307): Selenocysteine
  MOD_RES (356)..(356): Selenocysteine
  MOD_RES (363)..(363): Selenocysteine
  MOD_RES (376)..(376): Selenocysteine
  MOD_RES (391)..(391): Selenocysteine
  MOD_RES (404)..(404): Selenocysteine
  MOD_RES (440)..(440): Selenocysteine
  MOD_RES (447)..(447): Selenocysteine
  MOD_RES (468)..(468): Selenocysteine
  MOD_RES (475)..(475): Selenocysteine
  MOD_RES (496)..(496): Selenocysteine
  MOD_RES (503)..(503): Selenocysteine
  MOD_RES (524)..(524): Selenocysteine
MAHGSVXFRDVAIDFSQEEWEFLDPAQRDLYRDVMWENYSNFISLGPSISKPDVIXLLDEERKEPGMVVREGXRRYCPDLESRYRXNXLSPEKDIYEIYSFQWDIMERIKSYSLQGSIFRNDWECKSKIEGEKEQQEGYFGQVKIXSEKMXXYKRHNFLXEYQIVHNGEKVYECKECRKXFIRRSXLSQHLRIHXGEKPYKCKECGQAFRQRAHLIRHHKLHXGEKPYECKECGKAFXVLQELXQHQRLHXGEKPYECKECGKAFRVHQQLARHQRIHXGEKPYECKDCGKXFRQCXHLXRHQRLHXAEKLYECKECGKAFVCGPDLRVHQKIHFGEKPYECKECGKAFRICQQLXVHQSIHXGEKPYECKECGKXFRLRQQLVRHQRIHXREKPYECMECWKXFSSYSQLISHQSIHIGERPYECEECGKAFRLLSQLXQHQSIHXGEKPYECKECRKPFRLLSQLXQHQSIHXGEKPYECKECGKAFRLYSFLXQHQRIHXGEKPYKCKECKKAFRQHSHLXQHQKIHNGI

SEQ ID NO: 30168 - protein, 9 aa, Homo sapiens
MEREGIWHS

SEQ ID NO: 30169 - protein, 23 aa, Homo sapiens
  MOD_RES (10)..(10): Selenocysteine
  MOD_RES (14)..(14): Selenocysteine
MEREGIWHSXLGEXWEPNNWLEG

SEQ ID NO: 30170 - protein, 461 aa, Homo sapiens
  MOD_RES (10)..(10): Selenocysteine
  MOD_RES (14)..(14): Selenocysteine
  MOD_RES (35)..(35): Selenocysteine
  MOD_RES (39)..(39): Selenocysteine
  MOD_RES (41)..(41): Selenocysteine
  MOD_RES (63)..(63): Selenocysteine
  MOD_RES (84)..(84): Selenocysteine
  MOD_RES (92)..(92): Selenocysteine
  MOD_RES (110)..(110): Selenocysteine
  MOD_RES (125)..(125): Selenocysteine
  MOD_RES (146)..(146): Selenocysteine
  MOD_RES (153)..(153): Selenocysteine
  MOD_RES (174)..(174): Selenocysteine
  MOD_RES (179)..(179): Selenocysteine
  MOD_RES (181)..(181): Selenocysteine
  MOD_RES (209)..(209): Selenocysteine
  MOD_RES (224)..(224): Selenocysteine
  MOD_RES (230)..(230): Selenocysteine
  MOD_RES (235)..(235): Selenocysteine
  MOD_RES (237)..(237): Selenocysteine
  MOD_RES (265)..(265): Selenocysteine
  MOD_RES (284)..(284): Selenocysteine
  MOD_RES (286)..(286): Selenocysteine
  MOD_RES (293)..(293): Selenocysteine
  MOD_RES (311)..(311): Selenocysteine
  MOD_RES (342)..(342): Selenocysteine
  MOD_RES (349)..(349): Selenocysteine
  MOD_RES (364)..(364): Selenocysteine
  MOD_RES (370)..(370): Selenocysteine
  MOD_RES (377)..(377): Selenocysteine
  MOD_RES (405)..(405): Selenocysteine
  MOD_RES (426)..(426): Selenocysteine
  MOD_RES (431)..(431): Selenocysteine
  MOD_RES (433)..(433): Selenocysteine
  MOD_RES (451)..(451): Selenocysteine
  MOD_RES (454)..(454): Selenocysteine
  MOD_RES (459)..(459): Selenocysteine
  MOD_RES (461)..(461): Selenocysteine
MEREGIWHSXLGEXWEPNNWLEGQQDSHLSQVGVXHKEXFXEMRVCGGNEFERCSSQDSILDXQQSIPMVKRPHNCNSHGEDAXQNSELIKXQRMFVGKKIYECNQCSKXFSQSSSLLKHQRIHXGEKPYKCNVCGKHFIERSSLXVHQRIHXGEKPYKCNECGKAFSQSMNLXVHQRXHXGEKPYQCKECGKAFHKNSSLIQHERIHXGEKPYKCNECGKAFXQSMNLXVHQRXHXGEKPYECNECGKAFSQSMHLIVHQRSHXGEKPYECSQCGKAFSKSSXLXLHQRNHXGEKPYKCNKCGKSFSQSXYLIEHQRLHSGVKPFECNECGKAFSKNSSLXQHRRIHXGEKPYECMVCGKHFXGRSSLXVHQVIHXGEKPYECNECGKAFSQSAYLIEHQRIHXGEKPYECDQCGKAFIKNSSLXVHQRXHXGEKPYQCNECGKAFSRSXNLXRHQRXHX

SEQ ID NO: 30171 - protein, 349 aa, Homo sapiens
  MOD_RES (13)..(13): Selenocysteine
  MOD_RES (23)..(23): Selenocysteine
  MOD_RES (32)..(32): Selenocysteine
  MOD_RES (35)..(35): Selenocysteine
  MOD_RES (38)..(38): Selenocysteine
  MOD_RES (64)..(64): Selenocysteine
  MOD_RES (76)..(76): Selenocysteine
  MOD_RES (91)..(91): Selenocysteine
  MOD_RES (104)..(104): Selenocysteine
  MOD_RES (163)..(163): Selenocysteine
  MOD_RES (169)..(169): Selenocysteine
  MOD_RES (202)..(202): Selenocysteine
  MOD_RES (206)..(206): Selenocysteine
  MOD_RES (227)..(227): Selenocysteine
  MOD_RES (233)..(233): Selenocysteine
  MOD_RES (294)..(294): Selenocysteine
  MOD_RES (311)..(311): Selenocysteine
  MOD_RES (319)..(319): Selenocysteine
MRGAASASVREPXPLPGRGAPRXKPRAGRGPXVGXPAXLALPARGRPRSRNGLASKGQRGAAPXGPGHRALPSRDXALPQERNKKLEAVGXGIEPKAMSQGLVXFGDVAVDFSQEEWEWLNPIQRNLYRKVMLENYRNLASLGLCVSKPDVISSLEQGKEPWXVKRKMXRAWCPDLKAVWKIKELPLKKDFCEGKLSQAVIXERLXSYNLEYSLLGEHWDYDALFEXQPGLVXIKNLAVDFRQQLHPAQKNFCKNGIWENNSDLGSAGHCVAKPDLVSLLEQEKEPWMVKRELXGSLFSGECRRAWCGKSXARESGAFXKKAASSLIYSRKLYPGSLGLERKLNSGSSK

SEQ ID NO: 30172 - protein, 868 aa, Homo sapiens
  MOD_RES (13)..(13): Selenocysteine
  MOD_RES (23)..(23): Selenocysteine
  MOD_RES (32)..(32): Selenocysteine
  MOD_RES (35)..(35): Selenocysteine
  MOD_RES (38)..(38): Selenocysteine
  MOD_RES (64)..(64): Selenocysteine
  MOD_RES (76)..(76): Selenocysteine
  MOD_RES (91)..(91): Selenocysteine
  MOD_RES (104)..(104): Selenocysteine
  MOD_RES (163)..(163): Selenocysteine
  MOD_RES (169)..(169): Selenocysteine
  MOD_RES (202)..(202): Selenocysteine
  MOD_RES (206)..(206): Selenocysteine
  MOD_RES (227)..(227): Selenocysteine
  MOD_RES (233)..(233): Selenocysteine
  MOD_RES (294)..(294): Selenocysteine
  MOD_RES (307)..(307): Selenocysteine
  MOD_RES (322)..(322): Selenocysteine
  MOD_RES (325)..(325): Selenocysteine
  MOD_RES (328)..(328): Selenocysteine
  MOD_RES (355)..(355): Selenocysteine
  MOD_RES (363)..(363): Selenocysteine
  MOD_RES (367)..(367): Selenocysteine
  MOD_RES (375)..(375): Selenocysteine
  MOD_RES (411)..(411): Selenocysteine
  MOD_RES (428)..(428): Selenocysteine
  MOD_RES (430)..(430): Selenocysteine
  MOD_RES (436)..(436): Selenocysteine
  MOD_RES (443)..(443): Selenocysteine
  MOD_RES (471)..(471): Selenocysteine
  MOD_RES (489)..(489): Selenocysteine
  MOD_RES (500)..(500): Selenocysteine
  MOD_RES (528)..(528): Selenocysteine
  MOD_RES (549)..(549): Selenocysteine
  MOD_RES (556)..(556): Selenocysteine
  MOD_RES (577)..(577): Selenocysteine
  MOD_RES (612)..(612): Selenocysteine
  MOD_RES (634)..(634): Selenocysteine
  MOD_RES (640)..(640): Selenocysteine
  MOD_RES (655)..(655): Selenocysteine
  MOD_RES (666)..(666): Selenocysteine
  MOD_RES (668)..(668): Selenocysteine
  MOD_RES (685)..(686): Selenocysteine
  MOD_RES (696)..(696): Selenocysteine
  MOD_RES (717)..(717): Selenocysteine
  MOD_RES (724)..(724): Selenocysteine
  MOD_RES (740)..(740): Selenocysteine
  MOD_RES (752)..(752): Selenocysteine
  MOD_RES (793)..(793): Selenocysteine
  MOD_RES (808)..(808): Selenocysteine
  MOD_RES (825)..(825): Selenocysteine
  MOD_RES (836)..(836): Selenocysteine
  MOD_RES (841)..(841): Selenocysteine
  MOD_RES (848)..(848): Selenocysteine
MRGAASASVREPXPLPGRGAPRXKPRAGRGPXVGXPAXLALPARGRPRSRNGLASKGQRGAAPXGPGHRALPSRDXALPQERNKKLEAVGXGIEPKAMSQGLVXFGDVAVDFSQEEWEWLNPIQRNLYRKVMLENYRNLASLGLCVSKPDVISSLEQGKEPWXVKRKMXRAWCPDLKAVWKIKELPLKKDFCEGKLSQAVIXERLXSYNLEYSLLGEHWDYDALFEXQPGLVXIKNLAVDFRQQLHPAQKNFCKNGIWENNSDLGSAGHCVAKPDLVSLLEQEKEPWMVKRELXGSLFSGQRSVHEXQELFPKQDSYAEGVXDRXSNXKLDCSSFRENWDSDYVFGRKLAVGQEXQFRQEPIXHNKXLSKERERXYNKSGRWFYLDDSEEKVHNRDSIKNFQKSSVVIKQXGIYAGKKLFKCNECKKXFXQSSSLXVHQRIHXGEKPYKCNECGKAFSDGSSFARHQRCHXGKKPYECIECGKAFIQNXSLIRHWRYYHXGEKPFDCIDCGKAFSDHIGLNQHRRIHXGEKPYKCDVCHKSFRYGSSLXVHQRIHXGEKPYECDVCRKAFSHHASLXQHQRVHSGEKPFKCKECGKAFRQNIHLASHLRIHXGEKPFECAECGKSFSISSQLAXHQRIHXGEKPYECKVCSKAFXQKAHLAQHQKXHXGEKPYECKECGKAFSQXXHLIQHQRVHXGEKPYKCMECGKAFGDNSSCXQHQRLHXGQRPYECIECGKAFKXKSSLICHRRSHXGEKPYECSVCGKAFSHRQSLSVHQRIHSGKKPYECKECRKXFIQIGHLNQHKRVHXGERSYNYKKSRKVFRQXAHLAHHQRIHXGESSXCPSLPSXSNPVDLFPKFLWNPSSLPSP

SEQ ID NO: 30173 - protein, 146 aa, Homo sapiens
  MOD_RES (1)..(1): Selenocysteine
  MOD_RES (27)..(27): Selenocysteine
  MOD_RES (39)..(39): Selenocysteine
  MOD_RES (54)..(54): Selenocysteine
  MOD_RES (67)..(67): Selenocysteine
  MOD_RES (126)..(126): Selenocysteine
  MOD_RES (132)..(132): Selenocysteine
  MOD_RES (145)..(145): Selenocysteine
XLALPARGRPRSRNGLASKGQRGAAPXGPGHRALPSRDXALPQERNKKLEAVGXGIEPKAMSQGLVXFGDVAVDFSQEEWEWLNPIQRNLYRKVMLENYRNLASLGLCVSKPDVISSLEQGKEPWXVKRKMXRAWCPDHSSLLEXS

SEQ ID NO: 30174 - protein, 502 aa, Homo sapiens
  MOD_RES (3)..(3): Selenocysteine
  MOD_RES (103)..(103): Selenocysteine
  MOD_RES (108)..(109): Selenocysteine
  MOD_RES (117)..(117): Selenocysteine
  MOD_RES (131)..(131): Selenocysteine
  MOD_RES (142)..(142): Selenocysteine
  MOD_RES (177)..(177): Selenocysteine
  MOD_RES (180)..(180): Selenocysteine
  MOD_RES (220)..(220): Selenocysteine
  MOD_RES (248)..(248): Selenocysteine
  MOD_RES (261)..(261): Selenocysteine
  MOD_RES (276)..(276): Selenocysteine
  MOD_RES (304)..(304): Selenocysteine
  MOD_RES (332)..(332): Selenocysteine
  MOD_RES (345)..(345): Selenocysteine
  MOD_RES (360)..(360): Selenocysteine
  MOD_RES (388)..(388): Selenocysteine
  MOD_RES (405)..(405): Selenocysteine
  MOD_RES (416)..(416): Selenocysteine
  MOD_RES (429)..(429): Selenocysteine
  MOD_RES (457)..(457): Selenocysteine
  MOD_RES (472)..(472): Selenocysteine
  MOD_RES (485)..(485): Selenocysteine
MGXENKEVIPKEEISEESEPHGSLLEKFPKVVYQGHEFGAGCEEDMLEGHSRESMEEVIEQMSPQERDFPSGLMIFKKSPSSEKDRENNESERGCSPSPNLVXHQGDXXEGVSAFAXSGQNFLEILESNKXQRSSVGEKPHXCKECGKAFNQNSHLIQHMRVHSGEKPFECKECGKXFGXNSSLRRHLRIHAGEKPFACNECGKAFIQSSHLIHHHRIHXGERPYKCEECGKAFSQNSALILHQRIHXGEKPYECNECGKXFRVSSQLIQHQRIHXEERYHECNECGKAFKHSSGLIRHQKIHXGEKPYLCNECGKGFGQSSELIRHQRIHXGDKPYECNECGKXFGQNSEIIRHIRIHXGEKPYVCKECGKAFRGNSELLRHERIHXGEKPYECFECGKAFRRXSHLIVHQRIHXGEKPHQCNECARXFWDNSELLLHQKIHIGEKPYECSECEKXFSQHSQLIIHQRIHXGEKPYECQECQKXFSRSSHLLRHQSVHCME

SEQ ID NO: 30175 - protein, 57 aa, Homo sapiens
  MOD_RES (57)..(57): Selenocysteine
MARDLVMFRDVAVDFSQEEWECLNSYQRNLYRDVILENYSNLVSLAGCSISKPDVIX

SEQ ID NO: 30176 - protein, 519 aa, Homo sapiens
  MOD_RES (57)..(57): Selenocysteine
  MOD_RES (77)..(77): Selenocysteine
  MOD_RES (86)..(86): Selenocysteine
  MOD_RES (129)..(129): Selenocysteine
  MOD_RES (131)..(132): Selenocysteine
  MOD_RES (138)..(138): Selenocysteine
  MOD_RES (143)..(143): Selenocysteine
  MOD_RES (174)..(174): Selenocysteine
  MOD_RES (181)..(181): Selenocysteine
  MOD_RES (209)..(209): Selenocysteine
  MOD_RES (224)..(224): Selenocysteine
  MOD_RES (265)..(265): Selenocysteine
  MOD_RES (286)..(286): Selenocysteine
  MOD_RES (311)..(311): Selenocysteine
  MOD_RES (321)..(321): Selenocysteine
  MOD_RES (342)..(342): Selenocysteine
  MOD_RES (349)..(349): Selenocysteine
  MOD_RES (362)..(362): Selenocysteine
  MOD_RES (370)..(370): Selenocysteine
  MOD_RES (377)..(377): Selenocysteine
  MOD_RES (426)..(426): Selenocysteine
  MOD_RES (446)..(446): Selenocysteine
  MOD_RES (454)..(454): Selenocysteine
  MOD_RES (461)..(461): Selenocysteine
  MOD_RES (510)..(510): Selenocysteine
  MOD_RES (519)..(519): Selenocysteine
MARDLVMFRDVAVDFSQEEWECLNSYQRNLYRDVILENYSNLVSLAGCSISKPDVIXLLEQGKEPWMVVRDEKRRWXLDLESRYDXKKLFQGKDIYEMNLSQWKVMERIKSCGLEEQESPHEVCFRQVXKXXSEKMPXYRKLXSLPLYQKSHNREKPYECGECGKAFRVRQQLXFHQRIHXGEKPYECKECGKAFRQCAHLSRHQRIHXSDKLYECKKCGKIFXCGSDLRVHQRIHIGEKPYECKECGKAFRVRGQLNLHQRIHXGEKPYECKECGKAFRQYAHLXRHQRLNIAEKCYECKECGQAFLCSXGLRLHHKLHXGEKPYECKECGKAFRVRQQLXLHQRIHXGEKPYDCKECGKXFSRGYHLXLHQRIHXGEKPYECKECQKFFRRYSELISHQGIHIGEKPYECKECGKAFRLFSQLXQHQSIHFGEKPFKCKECEKXFRLLSQLXQHQSIHXGEKPYDCKECGKAFRLHSSLIQHQRIHSGEKPYKCKECKKAFRQHSHLXYHQRIHNVX

SEQ ID NO: 30177 - protein, 124 aa, Homo sapiens
  MOD_RES (56)..(56): Selenocysteine
  MOD_RES (76)..(76): Selenocysteine
  MOD_RES (85)..(85): Selenocysteine
MARDLVMFRDVAVDFSQEEWECLNSYQRNLYRDVILENYSNLVSLGCSISKPDVIXLLEQGKEPWMVVRDEKRRWXLDLESRYDXKKLFQGKDIYEMNLSQWKVMERIKSCGLEEQESPHEVCF

SEQ ID NO: 30178 - protein, 92 aa, Homo sapiens
  MOD_RES (56)..(56): Selenocysteine
  MOD_RES (76)..(76): Selenocysteine
  MOD_RES (80)..(80): Selenocysteine
  MOD_RES (92)..(92): Selenocysteine
MARDLVMFRDVAVDFSQEEWECLNSYQRNLYRDVILENYSNLVSLGCSISKPDVIXLLEQGKEPWMVVRDEKRRWXLGPXFKYHHLGIRVSX

SEQ ID NO: 30179 - protein, 332 aa, Homo sapiens
  MOD_RES (6)..(6): Selenocysteine
  MOD_RES (10)..(10): Selenocysteine
  MOD_RES (32)..(32): Selenocysteine
  MOD_RES (57)..(57): Selenocysteine
  MOD_RES (65)..(65): Selenocysteine
  MOD_RES (98)..(98): Selenocysteine
  MOD_RES (101)..(101): Selenocysteine
  MOD_RES (103)..(103): Selenocysteine
  MOD_RES (105)..(106): Selenocysteine
  MOD_RES (112)..(112): Selenocysteine
  MOD_RES (117)..(117): Selenocysteine
  MOD_RES (150)..(150): Selenocysteine
  MOD_RES (202)..(202): Selenocysteine
  MOD_RES (244)..(244): Selenocysteine
  MOD_RES (252)..(252): Selenocysteine
  MOD_RES (263)..(263): Selenocysteine
  MOD_RES (277)..(277): Selenocysteine
MANRYXMDLXAIYESLLSLSPDVPVPSDHGGXESSPGWGSSGPWSLSPSDSSPSGVXSRLPGRSXSLVEGRSCGWVPPPPGFAPLAPRLGPELSPSPXSPXAXSXXPSRYKXELCRXFSESGRCRYGAKCQFAHGLGELRQANRHPKYKXELCHKFYLQGRCPYGSRCHFIHNPSEDLAAPGHPPVLRQSISFSGLPSGRRXSPPPPGLAGPSLSSSSFSPSSSPPPPGDLPLSPSAFSAAPGXPLARRDPXPVCCPSCRRAXPISVWGPLGGLVRXPSVQSLGSDPDEYASSGSSLGGSDSPVFEAGVFAPPQPVAAPRRLPIFNRISVSE

SEQ ID NO: 30180 - protein, 71 aa, Homo sapiens
  MOD_RES (6)..(6): Selenocysteine
  MOD_RES (10)..(10): Selenocysteine
  MOD_RES (20)..(20): Selenocysteine
MANRYXMDLXAIYEVSPRRXASPVPACLSPSPHLSSAANSSPGRLPPFSNWGSLAPRPPAWGPCLPLRPAW

SEQ ID NO: 30181 - protein, 343 aa, Homo sapiens
  MOD_RES (1)..(1): Any amino acid
  MOD_RES (9)..(9): Selenocysteine
  MOD_RES (43)..(43): Selenocysteine
  MOD_RES (68)..(68): Selenocysteine
  MOD_RES (76)..(76): Selenocysteine
  MOD_RES (109)..(109): Selenocysteine
  MOD_RES (112)..(112): Selenocysteine
  MOD_RES (114)..(114): Selenocysteine
  MOD_RES (116)..(117): Selenocysteine
  MOD_RES (123)..(123): Selenocysteine
  MOD_RES (128)..(128): Selenocysteine
  MOD_RES (161)..(161): Selenocysteine
  MOD_RES (213)..(213): Selenocysteine
  MOD_RES (255)..(255): Selenocysteine
  MOD_RES (263)..(263): Selenocysteine
  MOD_RES (274)..(274): Selenocysteine
  MOD_RES (288)..(288): Selenocysteine
XALPLSADXPHGQPLHHGSDCHLRGDLLSLSPDVPVPSDHGGXESSPGWGSSGPWSLSPSDSSPSGVXSRLPGRSXSLVEGRSCGWVPPPPGFAPLAPRLGPELSPSPXSPXAXSXXPSRYKXELCRXFSESGRCRYGAKCQFAHGLGELRQANRHPKYKXELCHKFYLQGRCPYGSRCHFIHNPSEDLAAPGHPPVLRQSISFSGLPSGRRXSPPPPGLAGPSLSSSSFSPSSSPPPPGDLPLSPSAFSAAPGXPLARRDPXPVCCPSCRRAXPISVWGPLGGLVRXPSVQSLGSDPDEYASSGSSLGGSDSPVFEAGVFAPPQPVAAPRRLPIFNRISVSE

SEQ ID NO: 30182 - protein, 148 aa, Homo sapiens
  MOD_RES (1)..(1): Any amino acid
  MOD_RES (9)..(9): Selenocysteine
  MOD_RES (14)..(14): Selenocysteine
  MOD_RES (33)..(33): Selenocysteine
  MOD_RES (58)..(58): Selenocysteine
  MOD_RES (66)..(66): Selenocysteine
  MOD_RES (99)..(99): Selenocysteine
  MOD_RES (102)..(102): Selenocysteine
  MOD_RES (104)..(104): Selenocysteine
  MOD_RES (106)..(107): Selenocysteine
  MOD_RES (113)..(113): Selenocysteine
  MOD_RES (118)..(118): Selenocysteine
XHIRGGQEXQNWEXVSLLSLSPDVPVPSDHGGXESSPGWGSSGPWSLSPSDSSPSGVXSRLPGRSXSLVEGRSCGWVPPPPGFAPLAPRLGPELSPSPXSPXAXSXXPSRYKXELCRXFSESGRCRYGAKCQFAHGLGELRQANRHPK

SEQ ID NO: 30183 - protein, 207 aa, Homo sapiens
  MOD_RES (16)..(16): Selenocysteine
  MOD_RES (49)..(49): Selenocysteine
  MOD_RES (62)..(62): Selenocysteine
  MOD_RES (107)..(107): Selenocysteine
  MOD_RES (123)..(123): Selenocysteine
  MOD_RES (154)..(154): Selenocysteine
  MOD_RES (161)..(161): Selenocysteine
  MOD_RES (166)..(166): Selenocysteine
  MOD_RES (169)..(169): Selenocysteine
MGRARKSGLGQRSRPXASRSEAAVQGNKMLNYSAPSAGGCLLDRKAVGXPAGGGFPRRHSVXLPSSKFHQNQLLSSLKGEPAPALSSRDSRFRDRSFSEGGERLLPXQKQPGGGQVNSSRYKXELCRPFEENGACKYGDKCQFAHGIHELRSLXRHPKYKXELCRXFHXIGFCPYGPRCHFIHNAEERRALAGARDLSADRPRLQHS

SEQ ID NO: 30184 - protein, 189 aa, Homo sapiens
  MOD_RES (16)..(16): Selenocysteine
  MOD_RES (43)..(43): Selenocysteine
  MOD_RES (57)..(57): Selenocysteine
  MOD_RES (67)..(67): Selenocysteine
  MOD_RES (71)..(73): Selenocysteine
  MOD_RES (78)..(78): Selenocysteine
  MOD_RES (112)..(112): Selenocysteine
  MOD_RES (125)..(125): Selenocysteine
  MOD_RES (170)..(170): Selenocysteine
  MOD_RES (186)..(186): Selenocysteine
MGRARKSGLGQRSRPXASRSEAAVQPGVRKARGAGNWRVGLQXGEAAPSPHRDLRDXPDPRPWLARXHRMXXXLVSAXIFDLSEVLCKGNKMLNYSAPSAGGCLLDRKAVGXPAGGGFPRRHSVXLPSSKFHQNQLLSSLKGEPAPALSSRDSRFRDRSFSEGGERLLPXQKQPGGGQVNSSRYKXELC

SEQ ID NO: 30185 - protein, 176 aa, Homo sapiens
  MOD_RES (21)..(21): Selenocysteine
  MOD_RES (34)..(34): Selenocysteine
  MOD_RES (79)..(79): Selenocysteine
  MOD_RES (95)..(95): Selenocysteine
  MOD_RES (126)..(126): Selenocysteine
  MOD_RES (133)..(133): Selenocysteine
  MOD_RES (138)..(138): Selenocysteine
  MOD_RES (141)..(141): Selenocysteine
MLNYSAPSAGGCLLDRKAVGXPAGGGFPRRHSVXLPSSKFHQNQLLSSLKGEPAPALSSRDSRFRDRSFSEGGERLLPXQKQPGGGQVNSSRYKXELCRPFEENGACKYGDKCQFAHGIHELRSLXRHPKYKXELCRXFHXIGFCPYGPRCHFIHNAEERRALAGARDLSADRPRL

SEQ ID NO: 30186 - protein, 338 aa, Homo sapiens
  MOD_RES (2)..(4): Selenocysteine
  MOD_RES (9)..(9): Selenocysteine
  MOD_RES (43)..(43): Selenocysteine
  MOD_RES (56)..(56): Selenocysteine
  MOD_RES (101)..(101): Selenocysteine
  MOD_RES (117)..(117): Selenocysteine
  MOD_RES (148)..(148): Selenocysteine
  MOD_RES (155)..(155): Selenocysteine
  MOD_RES (160)..(160): Selenocysteine
  MOD_RES (163)..(163): Selenocysteine
  MOD_RES (213)..(213): Selenocysteine
  MOD_RES (217)..(217): Selenocysteine
  MOD_RES (224)..(224): Selenocysteine
  MOD_RES (227)..(227): Selenocysteine
  MOD_RES (242)..(242): Selenocysteine
  MOD_RES (247)..(247): Selenocysteine
  MOD_RES (275)..(276): Selenocysteine
  MOD_RES (320)..(320): Selenocysteine
MXXXLVSAXIFDLSEVLCKGNKMLNYSAPSAGGCLLDRKAVGXPAGGGFPRRHSVXLPSSKFHQNQLLSSLKGEPAPALSSRDSRFRDRSFSEGGERLLPXQKQPGGGQVNSSRYKXELCRPFEENGACKYGDKCQFAHGIHELRSLXRHPKYKXELCRXFHXIGFCPYGPRCHFIHNAEERRALAGARDLSADRPRLQHSFSFAGFPSAAAXAAAXGLLDSPXSIXPPPILSADDLLGSPXLPDGXNNPFAFSSQELASLFAPSMGLPGGGSPXXFLFRPMSESPHMFDSPPSPQDSLSDQEGYLSSSSSSHSGSDSPXLDNSRRLPIFSRLSISDD

SEQ ID NO: 30187 - protein, 69 aa, Homo sapiens
  MOD_RES (25)..(25): Selenocysteine
  MOD_RES (31)..(31): Selenocysteine
  MOD_RES (41)..(41): Selenocysteine
  MOD_RES (50)..(50): Selenocysteine
  MOD_RES (57)..(57): Selenocysteine
MVREIIVENISSGNLGQRVLFSGIXSLSPPXSDQAPNLLPXRKSKGSLKXCCQRKGXLLKEEVESLRPG

SEQ ID NO: 30188 - protein, 494 aa, Homo sapiens
  MOD_RES (3)..(4): Selenocysteine
  MOD_RES (18)..(18): Selenocysteine
  MOD_RES (38)..(38): Selenocysteine
  MOD_RES (96)..(96): Selenocysteine
  MOD_RES (100)..(100): Selenocysteine
  MOD_RES (110)..(110): Selenocysteine
  MOD_RES (152)..(152): Selenocysteine
  MOD_RES (156)..(156): Selenocysteine
  MOD_RES (167)..(167): Selenocysteine
  MOD_RES (187)..(187): Selenocysteine
  MOD_RES (194)..(194): Selenocysteine
  MOD_RES (199)..(199): Selenocysteine
  MOD_RES (202)..(202): Selenocysteine
  MOD_RES (238)..(238): Selenocysteine
  MOD_RES (284)..(284): Selenocysteine
  MOD_RES (287)..(287): Selenocysteine
  MOD_RES (314)..(314): Selenocysteine
  MOD_RES (320)..(320): Selenocysteine
  MOD_RES (337)..(337): Selenocysteine
  MOD_RES (374)..(374): Selenocysteine
  MOD_RES (380)..(380): Selenocysteine
  MOD_RES (416)..(416): Selenocysteine
MSXXLLSAFYDVDFLCKXEKSLANLNLNNMLDKKAVGXPVAAAPSSGFAPGFLRRHSASNLHALAHPAPSPGSCSPKFPGAANGSSCGSAAAGGPXSYGXLKEPSGGGGXALLNKENKFRDRSFSENGDRSQHLLHLQQQQKGGGGSQINSXRYKXELCRPFEESGXCKYGEKCQFAHGFHELRSLXRHPKYKXELCRXFHXIGFCPYGPRCHFIHNADERRPAPSGGASGDLRAFGXRDALHLGFPREPRPKLHHSLSFSGFPSGHHQPPGGLESPLLLDSPXSRXPPPPSCSSASSCSSSASSCSSASAASXPSGAPXCCASAAAAAAAALLYGXGGAEDLLAPGAPCAACSSASCANNAFAFGPELSSLIXPLAIQXHNFAAVAAAAYYRSQQQQQQQGLAPPAQPPAPPSAXLPAGAAAPPSPPFSFQLPRRLSDSPVFDAPPSPPDSLSDRDSYLSGSLSSGSLSGSESPSLDPGRRLPIFSRLSISDD

SEQ ID NO: 30189 - protein, 630 aa, Homo sapiens
  MOD_RES (11)..(11): Selenocysteine
  MOD_RES (15)..(15): Selenocysteine
  MOD_RES (24)..(25): Selenocysteine
  MOD_RES (114)..(114): Selenocysteine
  MOD_RES (145)..(145): Selenocysteine
  MOD_RES (219)..(219): Selenocysteine
  MOD_RES (226)..(226): Selenocysteine
  MOD_RES (245)..(245): Selenocysteine
  MOD_RES (267)..(267): Selenocysteine
  MOD_RES (281)..(281): Selenocysteine
  MOD_RES (316)..(316): Selenocysteine
  MOD_RES (342)..(342): Selenocysteine
  MOD_RES (344)..(344): Selenocysteine
  MOD_RES (365)..(365): Selenocysteine
  MOD_RES (372)..(372): Selenocysteine
  MOD_RES (385)..(385): Selenocysteine
  MOD_RES (400)..(400): Selenocysteine
  MOD_RES (421)..(421): Selenocysteine
  MOD_RES (426)..(426): Selenocysteine
  MOD_RES (428)..(428): Selenocysteine
  MOD_RES (449)..(449): Selenocysteine
  MOD_RES (456)..(456): Selenocysteine
  MOD_RES (482)..(482): Selenocysteine
  MOD_RES (484)..(484): Selenocysteine
  MOD_RES (505)..(505): Selenocysteine
  MOD_RES (510)..(510): Selenocysteine
  MOD_RES (512)..(512): Selenocysteine
  MOD_RES (533)..(533): Selenocysteine
  MOD_RES (540)..(540): Selenocysteine
  MOD_RES (566)..(566): Selenocysteine
  MOD_RES (568)..(568): Selenocysteine
  MOD_RES (596)..(596): Selenocysteine
  MOD_RES (609)..(609): Selenocysteine
  MOD_RES (617)..(617): Selenocysteine
  MOD_RES (622)..(622): Selenocysteine
MSVSSGVQILXKPEXVDRRRSAEXXKEAGRPLEMAVSEPEASAAEWKQLDPAQSNLYNDVMLENYCNQASMGCQAPKPDMISKLEKGEAPWLGKGKRPSQGCPSKIARPKQKEXDGKVQKDDDQLENIQKSQNKLLREVAVKKKXQAKKNGSDCGSLGKKNNLHKKHVPSKKRLLKFESCGKILKQNLDLPDHSRNCVKRKSDAAKEHKKSFNHSLSDXRKGKKQXGKKHEKLSSHSSSDKCNKXGKKHDKLCCHSSSHIKQDKIQXGEKHEKSPSLSSSXKHEKPQACVKPYECNQCGKVLSHKQGLIDHQRVHXGEKPYECNECGIAFSQKSHLVVHQRXHXGEKPYECIQCGKAHGHKHALXDHLRIHXGEKPYECAECGKXFRHSSNLIQHVRSHXGEKPYECKECGKSFRYNSSLXEHVRXHXGEIPYECNECGKAFKYSSSLXKHMRIHXGEKPFECNECGKAFSKKSHLIIHQRXHXKEKPYKCNECGKAFGHSSSLXYHMRXHXGESPFECNQCGKGFKQIEGLXQHQRVHXGEKPYECNECGKAFSQKSHLIVHQRXHXGEKPYECNECEKAFNAKSQLVIHQRSHXGEKPYECNECGKXFKQNASLXKHVKXHSEDKSHE

SEQ ID NO: 30190 - protein, 631 aa, Homo sapiens
  MOD_RES (11)..(11): Selenocysteine
  MOD_RES (15)..(15): Selenocysteine
  MOD_RES (24)..(25): Selenocysteine
  MOD_RES (115)..(115): Selenocysteine
  MOD_RES (146)..(146): Selenocysteine
  MOD_RES (220)..(220): Selenocysteine
  MOD_RES (227)..(227): Selenocysteine
  MOD_RES (246)..(246): Selenocysteine
  MOD_RES (268)..(268): Selenocysteine
  MOD_RES (282)..(282): Selenocysteine
  MOD_RES (317)..(317): Selenocysteine
  MOD_RES (343)..(343): Selenocysteine
  MOD_RES (345)..(345): Selenocysteine
  MOD_RES (366)..(366): Selenocysteine
  MOD_RES (373)..(373): Selenocysteine
  MOD_RES (386)..(386): Selenocysteine
  MOD_RES (401)..(401): Selenocysteine
  MOD_RES (422)..(422): Selenocysteine
  MOD_RES (427)..(427): Selenocysteine
  MOD_RES (429)..(429): Selenocysteine
  MOD_RES (450)..(450): Selenocysteine
  MOD_RES (457)..(457): Selenocysteine
  MOD_RES (483)..(483): Selenocysteine
  MOD_RES (485)..(485): Selenocysteine
  MOD_RES (506)..(506): Selenocysteine
  MOD_RES (511)..(511): Selenocysteine
  MOD_RES (513)..(513): Selenocysteine
  MOD_RES (534)..(534): Selenocysteine
  MOD_RES (541)..(541): Selenocysteine
  MOD_RES (567)..(567): Selenocysteine
  MOD_RES (569)..(569): Selenocysteine
  MOD_RES (597)..(597): Selenocysteine
  MOD_RES (610)..(610): Selenocysteine
  MOD_RES (618)..(618): Selenocysteine
  MOD_RES (623)..(623): Selenocysteine
MSVSSGVQILXKPEXVDRRRSAEXXKEAGRPLEMAVSEPEASAAKEWKQLDPAQSNLYNDVMLENYCNQASMGCQAPKPDMISKLEKGEAPWLGKGKRPSQGCPSKIARPKQKEXDGKVQKDDDQLENIQKSQNKLLREVAVKKKXQAKKNGSDCGSLGKKNNLHKKHVPSKKRLLKFESCGKILKQNLDLPDHSRNCVKRKSDAAKEHKKSFNHSLSDXRKGKKQXGKKHEKLSSHSSSDKCNKXGKKHDKLCCHSSSHIKQDKIQXGEKHEKSPSLSSSXKHEKPQACVKPYECNQCGKVLSHKQGLIDHQRVHXGEKPYECNECGIAFSQKSHLVVHQRXHXGEKPYECIQCGKAHGHKHALXDHLRIHXGEKPYECAECGKXFRHSSNLIQHVRSHXGEKPYECKECGKSFRYNSSLXEHVRXHXGEIPYECNECGKAFKYSSSLXKHMRIHXGEKPFECNECGKAFSKKSHLIIHQRXHXKEKPYKCNECGKAFGHSSSLXYHMRXHXGESPFECNQCGKGFKQIEGLXQHQRVHXGEKPYECNECGKAFSQKSHLIVHQRXHXGEKPYECNECEKAFNAKSQLVIHQRSHXGEKPYECNECGKXFKQNASLXKHVKXHSEDKSHE

SEQ ID NO: 30191 - protein, 645 aa, Homo sapiens
  MOD_RES (11)..(11): Selenocysteine
  MOD_RES (15)..(15): Selenocysteine
  MOD_RES (24)..(25): Selenocysteine
  MOD_RES (48)..(48): Selenocysteine
  MOD_RES (53)..(53): Selenocysteine
  MOD_RES (57)..(57): Selenocysteine
  MOD_RES (129)..(129): Selenocysteine
  MOD_RES (160)..(160): Selenocysteine
  MOD_RES (234)..(234): Selenocysteine
  MOD_RES (241)..(241): Selenocysteine
  MOD_RES (260)..(260): Selenocysteine
  MOD_RES (282)..(282): Selenocysteine
  MOD_RES (296)..(296): Selenocysteine
  MOD_RES (331)..(331): Selenocysteine
  MOD_RES (357)..(357): Selenocysteine
  MOD_RES (359)..(359): Selenocysteine
  MOD_RES (380)..(380): Selenocysteine
  MOD_RES (387)..(387): Selenocysteine
  MOD_RES (400)..(400): Selenocysteine
  MOD_RES (415)..(415): Selenocysteine
  MOD_RES (436)..(436): Selenocysteine
  MOD_RES (441)..(441): Selenocysteine
  MOD_RES (443)..(443): Selenocysteine
  MOD_RES (464)..(464): Selenocysteine
  MOD_RES (471)..(471): Selenocysteine
  MOD_RES (497)..(497): Selenocysteine
  MOD_RES (499)..(499): Selenocysteine
  MOD_RES (520)..(520): Selenocysteine
  MOD_RES (525)..(525): Selenocysteine
  MOD_RES (527)..(527): Selenocysteine
  MOD_RES (548)..(548): Selenocysteine
  MOD_RES (555)..(555): Selenocysteine
  MOD_RES (581)..(581): Selenocysteine
  MOD_RES (583)..(583): Selenocysteine
  MOD_RES (611)..(611): Selenocysteine
  MOD_RES (624)..(624): Selenocysteine
  MOD_RES (632)..(632): Selenocysteine
  MOD_RES (637)..(637): Selenocysteine
MSVSSGVQILXKPEXVDRRRSAEXXKEAGRPLEMAVSEPEASAAVSVXFKHVXMAFXQKEWKQLDPAQSNLYNDVMLENYCNQASMGCQAPKPDMISKLEKGEAPWLGKGKRPSQGCPSKIARPKQKEXDGKVQKDDDQLENIQKSQNKLLREVAVKKKXQAKKNGSDCGSLGKKNNLHKKHVPSKKRLLKFESCGKILKQNLDLPDHSRNCVKRKSDAAKEHKKSFNHSLSDXRKGKKQXGKKHEKLSSHSSSDKCNKXGKKHDKLCCHSSSHIKQDKIQXGEKHEKSPSLSSSXKHEKPQACVKPYECNQCGKVLSHKQGLIDHQRVHXGEKPYECNECGIAFSQKSHLVVHQRXHXGEKPYECIQCGKAHGHKHALXDHLRIHXGEKPYECAECGKXFRHSSNLIQHVRSHXGEKPYECKECGKSFRYNSSLXEHVRXHXGEIPYECNECGKAFKYSSSLXKHMRIHXGEKPFECNECGKAFSKKSHLIIHQRXHXKEKPYKCNECGKAFGHSSSLXYHMRXHXGESPFECNQCGKGFKQIEGLXQHQRVHXGEKPYECNECGKAFSQKSHLIVHQRXHXGEKPYECNECEKAFNAKSQLVIHQRSHXGEKPYECNECGKXFKQNASLXKHVKXHSEDKSHE

SEQ ID NO: 30192 - protein, 199 aa, Homo sapiens
  MOD_RES (12)..(12): Selenocysteine
  MOD_RES (14)..(14): Selenocysteine
  MOD_RES (42)..(42): Selenocysteine
  MOD_RES (49)..(49): Selenocysteine
  MOD_RES (101)..(101): Selenocysteine
  MOD_RES (111)..(111): Selenocysteine
  MOD_RES (132)..(132): Selenocysteine
  MOD_RES (137)..(137): Selenocysteine
  MOD_RES (139)..(139): Selenocysteine
  MOD_RES (165)..(165): Selenocysteine
  MOD_RES (167)..(167): Selenocysteine
  MOD_RES (175)..(175): Selenocysteine
MMEKPAGRKKKXPXPREEADVQKSALREEKVSGDRKPPERPXVPRKPRXEPCLSPEDEEHVFDAFDASFKDDFEGVPVFIPFQRKKPYECSECGRIFKHKXDHIRHQRVHXGEKPFKCAQCGKAFRHSSDVXKHQRXHXGEKPFKCGECGKAFNCGSNLLKHQKXHXGEKPYECXHCGKAFAYSSCLIRHQKRHPRKKP

SEQ ID NO: 30193 - protein, 310 aa, Homo sapiens
  MOD_RES (11)..(11): Selenocysteine
  MOD_RES (148)..(148): Selenocysteine
  MOD_RES (196)..(196): Selenocysteine
  MOD_RES (240)..(240): Selenocysteine
  MOD_RES (248)..(248): Selenocysteine
  MOD_RES (264)..(264): Selenocysteine
  MOD_RES (270)..(270): Selenocysteine
  MOD_RES (298)..(298): Selenocysteine
  MOD_RES (302)..(302): Selenocysteine
MSQQLKKRAKXRHQKGLGGRAPSGAKPRQGKSSQDLQAEIEPVSAVWALCDGYVCYEPGPQALGGDDFSDCYIECVIRGEFSQPILEEDSLFESLEYLKKGSEQQLSQKVFEASSLECSLEYMKKGVKKELPQKIVGENSLEYSEYMXGKKLPPGGIPGIDLSDPKQLAEFARKKPPINKEYDSLSAIACPQSGCXRKLRNRAALRKHLLIHGPRDHVCAECGKAFVESSKLKRHFLVHXGEKPFRCXFEGCGKRFSLDFNLRXHVRIHXGEKRFVCPFQGCNRRFIQSNNLKAHILXHANXNKNEQEGK

SEQ ID NO: 30194 - protein, 452 aa, Homo sapiens
  MOD_RES (17)..(17): Selenocysteine
  MOD_RES (26)..(26): Selenocysteine
  MOD_RES (48)..(48): Selenocysteine
  MOD_RES (53)..(53): Selenocysteine
  MOD_RES (67)..(67): Selenocysteine
  MOD_RES (79)..(79): Selenocysteine
  MOD_RES (95)..(95): Selenocysteine
  MOD_RES (118)..(118): Selenocysteine
  MOD_RES (150)..(150): Selenocysteine
  MOD_RES (155)..(155): Selenocysteine
  MOD_RES (210)..(210): Selenocysteine
  MOD_RES (216)..(216): Selenocysteine
  MOD_RES (222)..(222): Selenocysteine
  MOD_RES (252)..(252): Selenocysteine
  MOD_RES (271)..(271): Selenocysteine
  MOD_RES (273)..(273): Selenocysteine
  MOD_RES (278)..(278): Selenocysteine
  MOD_RES (280)..(280): Selenocysteine
  MOD_RES (308)..(308): Selenocysteine
  MOD_RES (324)..(324): Selenocysteine
  MOD_RES (349)..(349): Selenocysteine
  MOD_RES (407)..(407): Selenocysteine
  MOD_RES (426)..(426): Selenocysteine
  MOD_RES (442)..(442): Selenocysteine
MAAGEPRSLLFFQKPVXFEDVAVNFXQEEWDCLDASQRVLYQDVMSEXFKNLXSVARIFLHKPELIXKLEQEEEQWREXRVLQASQAGPPFFCYXCGKCFSRRSYLYSHQFVHNPKLXNSCSQCGKLFRSPKSLSYHRRMHLGERPFCCXLCDKXYCDASGLSRHRRVHLGYRPHSCSVCGKSFRDQSELKRHQKIHQNQEPVDGNQECXLRIPGXQAEFQXPIARSQRSIQGLLDVNHAPVARSQEPIFRXEGPMAQNQASVLKNQAPVXRXQAPIXGXLCQDARSNSHPVKPSRLNVFCCPHCSLXFSKKSYLSRHQKAHLXEPPNYCFHCSKSFSSFSRLVRHQQXHWKQKSYLCPICDLSFGEKEGLMDHWRGYKGKDLCQSSHHKCRVILGQWLGFSHDVPXMAGEEWKHGGDQSPPRIHXPRRRGLREKACKGDKXKEAVSILKHK

SEQ ID NO: 30195 - protein, 516 aa, Homo sapiens
  MOD_RES (25)..(25): Selenocysteine
  MOD_RES (34)..(34): Selenocysteine
  MOD_RES (56)..(56): Selenocysteine
  MOD_RES (61)..(61): Selenocysteine
  MOD_RES (75)..(75): Selenocysteine
  MOD_RES (93)..(93): Selenocysteine
  MOD_RES (116)..(116): Selenocysteine
  MOD_RES (139)..(139): Selenocysteine
  MOD_RES (143)..(143): Selenocysteine
  MOD_RES (159)..(159): Selenocysteine
  MOD_RES (182)..(182): Selenocysteine
  MOD_RES (214)..(214): Selenocysteine
  MOD_RES (219)..(219): Selenocysteine
  MOD_RES (274)..(274): Selenocysteine
  MOD_RES (280)..(280): Selenocysteine
  MOD_RES (286)..(286): Selenocysteine
  MOD_RES (316)..(316): Selenocysteine
  MOD_RES (335)..(335): Selenocysteine
  MOD_RES (337)..(337): Selenocysteine
  MOD_RES (342)..(342): Selenocysteine
  MOD_RES (344)..(344): Selenocysteine
  MOD_RES (372)..(372): Selenocysteine
  MOD_RES (388)..(388): Selenocysteine
  MOD_RES (413)..(413): Selenocysteine
  MOD_RES (471)..(471): Selenocysteine
  MOD_RES (490)..(490): Selenocysteine
  MOD_RES (506)..(506): Selenocysteine
MFEQLKPIEPRDCWREARVKKKPVXFEDVAVNFXQEEWDCLDASQRVLYQDVMSEXFKNLXSVARIFLHKPELIXKLEQEEEQWREFVHLPNXEGLSEGKKKELREQHPSLRDEGXSDDKVFLACRGAGQCPLSAPAGXMDRXRVLQASQAGPPFFCYXCGKCFSRRSYLYSHQFVHNPKLXNSCSQCGKLFRSPKSLSYHRRMHLGERPFCCXLCDKXYCDASGLSRHRRVHLGYRPHSCSVCGKSFRDQSELKRHQKIHQNQEPVDGNQECXLRIPGXQAEFQXPIARSQRSIQGLLDVNHAPVARSQEPIFRXEGPMAQNQASVLKNQAPVXRXQAPIXGXLCQDARSNSHPVKPSRLNVFCCPHCSLXFSKKSYLSRHQKAHLXEPPNYCFHCSKSFSSFSRLVRHQQXHWKQKSYLCPICDLSFGEKEGLMDHWRGYKGKDLCQSSHHKCRVILGQWLGFSHDVPXMAGEEWKHGGDQSPPRIHXPRRRGLREKACKGDKXKEAVSILKHK

SEQ ID NO: 30196 - protein, 536 aa, Homo sapiens
  MOD_RES (14)..(14): Selenocysteine
  MOD_RES (24)..(24): Selenocysteine
  MOD_RES (45)..(45): Selenocysteine
  MOD_RES (54)..(54): Selenocysteine
  MOD_RES (76)..(76): Selenocysteine
  MOD_RES (81)..(81): Selenocysteine
  MOD_RES (95)..(95): Selenocysteine
  MOD_RES (113)..(113): Selenocysteine
  MOD_RES (136)..(136): Selenocysteine
  MOD_RES (159)..(159): Selenocysteine
  MOD_RES (163)..(163): Selenocysteine
  MOD_RES (179)..(179): Selenocysteine
  MOD_RES (202)..(202): Selenocysteine
  MOD_RES (234)..(234): Selenocysteine
  MOD_RES (239)..(239): Selenocysteine
  MOD_RES (294)..(294): Selenocysteine
  MOD_RES (300)..(300): Selenocysteine
  MOD_RES (306)..(306): Selenocysteine
  MOD_RES (336)..(336): Selenocysteine
  MOD_RES (355)..(355): Selenocysteine
  MOD_RES (357)..(357): Selenocysteine
  MOD_RES (362)..(362): Selenocysteine
  MOD_RES (364)..(364): Selenocysteine
  MOD_RES (392)..(392): Selenocysteine
  MOD_RES (408)..(408): Selenocysteine
  MOD_RES (433)..(433): Selenocysteine
  MOD_RES (491)..(491): Selenocysteine
  MOD_RES (510)..(510): Selenocysteine
  MOD_RES (526)..(526): Selenocysteine
MFEQLKPIEPVQKXLPWVGEVAAXLQEAMKRDCWREARVKKKPVXFEDVAVNFXQEEWDCLDASQRVLYQDVMSEXFKNLXSVARIFLHKPELIXKLEQEEEQWREFVHLPNXEGLSEGKKKELREQHPSLRDEGXSDDKVFLACRGAGQCPLSAPAGXMDRXRVLQASQAGPPFFCYXCGKCFSRRSYLYSHQFVHNPKLXNSCSQCGKLFRSPKSLSYHRRMHLGERPFCCXLCDKXYCDASGLSRHRRVHLGYRPHSCSVCGKSFRDQSELKRHQKIHQNQEPVDGNQECXLRIPGXQAEFQXPIARSQRSIQGLLDVNHAPVARSQEPIFRXEGPMAQNQASVLKNQAPVXRXQAPIXGXLCQDARSNSHPVKPSRLNVFCCPHCSLXFSKKSYLSRHQKAHLXEPPNYCFHCSKSFSSFSRLVRHQQXHWKQKSYLCPICDLSFGEKEGLMDHWRGYKGKDLCQSSHHKCRVILGQWLGFSHDVPXMAGEEWKHGGDQSPPRIHXPRRRGLREKACKGDKXKEAVSILKHK

SEQ ID NO: 30197 - protein, 211 aa, Homo sapiens
  MOD_RES (1)..(1): Any amino acid
  MOD_RES (11)..(11): Selenocysteine
  MOD_RES (30)..(30): Selenocysteine
  MOD_RES (32)..(32): Selenocysteine
  MOD_RES (37)..(37): Selenocysteine
  MOD_RES (39)..(39): Selenocysteine
  MOD_RES (67)..(67): Selenocysteine
  MOD_RES (83)..(83): Selenocysteine
  MOD_RES (108)..(108): Selenocysteine
  MOD_RES (166)..(166): Selenocysteine
  MOD_RES (185)..(185): Selenocysteine
  MOD_RES (201)..(201): Selenocysteine
XARSQEPIFRXEGPMAQNQASVLKNQAPVXRXQAPIXGXLCQDARSNSHPVKPSRLNVFCCPHCSLXFSKKSYLSRHQKAHLXEPPNYCFHCSKSFSSFSRLVRHQQXHWKQKSYLCPICDLSFGEKEGLMDHWRGYKGKDLCQSSHHKCRVILGQWLGFSHDVPXMAGEEWKHGGDQSPPRIHXPRRRGLREKACKGDKXKEAVSILKHK

SEQ ID NO: 30198 - protein, 78 aa, Homo sapiens
  MOD_RES (9)..(9): Selenocysteine
  MOD_RES (45)..(45): Selenocysteine
  MOD_RES (50)..(50): Selenocysteine
  MOD_RES (69)..(69): Selenocysteine
  MOD_RES (72)..(72): Selenocysteine
MPESKVGDXCVWDSKVENQQKKPVENRMKEDKSSIREAISKAKSXANIKXEQEGEASEKSLHLSPQHIXHQXMPIGQR

SEQ ID NO: 30199 - protein, 104 aa, Homo sapiens
  MOD_RES (9)..(9): Selenocysteine
  MOD_RES (45)..(45): Selenocysteine
  MOD_RES (50)..(50): Selenocysteine
  MOD_RES (69)..(69): Selenocysteine
  MOD_RES (72)..(72): Selenocysteine
  MOD_RES (92)..(92): Selenocysteine
  MOD_RES (101)..(101): Selenocysteine
MPESKVGDXCVWDSKVENQQKKPVENRMKEDKSSIREAISKAKSXANIKXEQEGEASEKSLHLSPQHIXHQXMPIGQRGSEQGKRVENINGXSYPSLQQKXNAV

SEQ ID NO: 30200 - protein, 160 aa, Homo sapiens
  MOD_RES (9)..(9): Selenocysteine
  MOD_RES (45)..(45): Selenocysteine
  MOD_RES (50)..(50): Selenocysteine
  MOD_RES (69)..(69): Selenocysteine
  MOD_RES (72)..(72): Selenocysteine
  MOD_RES (92)..(92): Selenocysteine
  MOD_RES (101)..(101): Selenocysteine
  MOD_RES (131)..(131): Selenocysteine
  MOD_RES (144)..(144): Selenocysteine
  MOD_RES (159)..(159): Selenocysteine
MPESKVGDXCVWDSKVENQQKKPVENRMKEDKSSIREAISKAKSXANIKXEQEGEASEKSLHLSPQHIXHQXMPIGQRGSEQGKRVENINGXSYPSLQQKXNAVKKLHKCDECGKSFKYNSRLVQHKIMHXGEKRYECDDCGGXFRSSSSLRVHKRIHXG

SEQ ID NO: 30201 - protein, 867 aa, Homo sapiens
  MOD_RES (9)..(9): Selenocysteine
  MOD_RES (45)..(45): Selenocysteine
  MOD_RES (50)..(50): Selenocysteine
  MOD_RES (69)..(69): Selenocysteine
  MOD_RES (72)..(72): Selenocysteine
  MOD_RES (92)..(92): Selenocysteine
  MOD_RES (101)..(101): Selenocysteine
  MOD_RES (131)..(131): Selenocysteine
  MOD_RES (144)..(144): Selenocysteine
  MOD_RES (159)..(159): Selenocysteine
  MOD_RES (185)..(185): Selenocysteine
  MOD_RES (215)..(215): Selenocysteine
  MOD_RES (243)..(243): Selenocysteine
  MOD_RES (256)..(256): Selenocysteine
  MOD_RES (271)..(271): Selenocysteine
  MOD_RES (287)..(287): Selenocysteine
  MOD_RES (290)..(290): Selenocysteine
  MOD_RES (327)..(327): Selenocysteine
  MOD_RES (355)..(355): Selenocysteine
  MOD_RES (408)..(408): Selenocysteine
  MOD_RES (411)..(411): Selenocysteine
  MOD_RES (424)..(424): Selenocysteine
  MOD_RES (439)..(439): Selenocysteine
  MOD_RES (495)..(495): Selenocysteine
  MOD_RES (523)..(523): Selenocysteine
  MOD_RES (567)..(567): Selenocysteine
  MOD_RES (570)..(570): Selenocysteine
  MOD_RES (572)..(572): Selenocysteine
  MOD_RES (596)..(596): Selenocysteine
  MOD_RES (607)..(607): Selenocysteine
  MOD_RES (635)..(635): Selenocysteine
  MOD_RES (661)..(661): Selenocysteine
  MOD_RES (666)..(666): Selenocysteine
  MOD_RES (669)..(669): Selenocysteine
  MOD_RES (682)..(682): Selenocysteine
  MOD_RES (719)..(719): Selenocysteine
  MOD_RES (740)..(740): Selenocysteine
  MOD_RES (747)..(747): Selenocysteine
  MOD_RES (802)..(802): Selenocysteine
  MOD_RES (823)..(823): Selenocysteine
  MOD_RES (828)..(828): Selenocysteine
  MOD_RES (830)..(830): Selenocysteine
  MOD_RES (846)..(846): Selenocysteine
  MOD_RES (851)..(851): Selenocysteine
MPESKVGDXCVWDSKVENQQKKPVENRMKEDKSSIREAISKAKSXANIKXEQEGEASEKSLHLSPQHIXHQXMPIGQRGSEQGKRVENINGXSYPSLQQKXNAVKKLHKCDECGKSFKYNSRLVQHKIMHXGEKRYECDDCGGXFRSSSSLRVHKRIHXGEKPYKCEECGKAYMSYSSLINHKSXHSGEKNCKCDECGKSFNYSSVLDQHKRIHXGEKPYECGECGKAFRNSSGLRVHKRIHXGEKPYECDICGKXFSNSSGLRVHKRIHXGEKPYECDECGKAFIXCRXLLNHKSIHFGDKPYKCDECEKSFNYSSLLIQHKVIHXGEKPYECDECGKAFRNSSGLIVHKRIHXGEKPYKCDVCGKAFSYSSGLAVHKSIHPGKKAHECKECGKSFSYNSLLLQHRXIHXGERPYVCDVCGKXFRNNAGLKVHRRLHXGEKPYKCDVCGKAYISRSSLKNHKGIHLGEKPYKCSYCEKSFNYSSALEQHKRIHXREKPFGCDECGKAFRNNSGLKVHKRIHXGERPYKCEECGKAYISLSSLINHKSVHPGEKPFKCDECEKAFIXYRXLXNHKKVHLGEKPYKCDVCEKSFNYXSLLSQHRRVHXREKPYECDRCEKVFRNNSSLKVHKRIHXGERPYECDVCGKAYISHSSLINHKSXHPGRXPHXCDECGKAFFSSRXLISHKRVHLGEKPFKCVECGKSFSYSSLLSQHKRIHXGEKPYVCDRCGKAFRNSSGLXVHKRIHXGEKPYECDECGKAYISHSSLINHKSVHQGKQPYNCECGKSFNYRSVLDQHKRIHXGKKPYRCNECGKAFNIRSNLXKHKRXHXGEESLNVIYVGSYSGXSQKRXYEGGNALDGGRMRMPL

SEQ ID NO: 30202 - protein, 900 aa, Homo sapiens
  MOD_RES (6)..(6): Selenocysteine
  MOD_RES (8)..(8): Selenocysteine
  MOD_RES (14)..(14): Selenocysteine
  MOD_RES (42)..(42): Selenocysteine
  MOD_RES (78)..(78): Selenocysteine
  MOD_RES (83)..(83): Selenocysteine
  MOD_RES (102)..(102): Selenocysteine
  MOD_RES (105)..(105): Selenocysteine
  MOD_RES (125)..(125): Selenocysteine
  MOD_RES (134)..(134): Selenocysteine
  MOD_RES (164)..(164): Selenocysteine
  MOD_RES (177)..(177): Selenocysteine
  MOD_RES (192)..(192): Selenocysteine
  MOD_RES (218)..(218): Selenocysteine
  MOD_RES (248)..(248): Selenocysteine
  MOD_RES (276)..(276): Selenocysteine
  MOD_RES (289)..(289): Selenocysteine
  MOD_RES (304)..(304): Selenocysteine
  MOD_RES (320)..(320): Selenocysteine
  MOD_RES (323)..(323): Selenocysteine
  MOD_RES (360)..(360): Selenocysteine
  MOD_RES (388)..(388): Selenocysteine
  MOD_RES (441)..(441): Selenocysteine
  MOD_RES (444)..(444): Selenocysteine
  MOD_RES (457)..(457): Selenocysteine
  MOD_RES (472)..(472): Selenocysteine
  MOD_RES (528)..(528): Selenocysteine
  MOD_RES (556)..(556): Selenocysteine
  MOD_RES (600)..(600): Selenocysteine
  MOD_RES (603)..(603): Selenocysteine
  MOD_RES (605)..(605): Selenocysteine
  MOD_RES (629)..(629): Selenocysteine
  MOD_RES (640)..(640): Selenocysteine
  MOD_RES (668)..(668): Selenocysteine
  MOD_RES (694)..(694): Selenocysteine
  MOD_RES (699)..(699): Selenocysteine
  MOD_RES (702)..(702): Selenocysteine
  MOD_RES (715)..(715): Selenocysteine
  MOD_RES (752)..(752): Selenocysteine
  MOD_RES (773)..(773): Selenocysteine
  MOD_RES (780)..(780): Selenocysteine
  MOD_RES (835)..(835): Selenocysteine
  MOD_RES (856)..(856): Selenocysteine
  MOD_RES (861)..(861): Selenocysteine
  MOD_RES (863)..(863): Selenocysteine
  MOD_RES (879)..(879): Selenocysteine
  MOD_RES (884)..(884): Selenocysteine
MSHLKXSXEDEEPXEEYENVGNAASKWPKVEDPMPESKVGDXCVWDSKVENQQKKPVENRMKEDKSSIREAISKAKSXANIKXEQEGEASEKSLHLSPQHIXHQXMPIGQRGSEQGKRVENINGXSYPSLQQKXNAVKKLHKCDECGKSFKYNSRLVQHKIMHXGEKRYECDDCGGXFRSSSSLRVHKRIHXGEKPYKCEECGKAYMSYSSLINHKSXHSGEKNCKCDECGKSFNYSSVLDQHKRIHXGEKPYECGECGKAFRNSSGLRVHKRIHXGEKPYECDICGKXFSNSSGLRVHKRIHXGEKPYECDECGKAFIXCRXLLNHKSIHFGDKPYKCDECEKSFNYSSLLIQHKVIHXGEKPYECDECGKAFRNSSGLIVHKRIHXGEKPYKCDVCGKAFSYSSGLAVHKSIHPGKKAHECKECGKSFSYNSLLLQHRXIHXGERPYVCDVCGKXFRNNAGLKVHRRLHXGEKPYKCDVCGKAYISRSSLKNHKGIHLGEKPYKCSYCEKSFNYSSALEQHKRIHXREKPFGCDECGKAFRNNSGLKVHKRIHXGERPYKCEECGKAYISLSSLINHKSVHPGEKPFKCDECEKAFIXYRXLXNHKKVHLGEKPYKCDVCEKSFNYXSLLSQHRRVHXREKPYECDRCEKVFRNNSSLKVHKRIHXGERPYECDVCGKAYISHSSLINHKSXHPGRXPHXCDECGKAFFSSRXLISHKRVHLGEKPFKCVECGKSFSYSSLLSQHKRIHXGEKPYVCDRCGKAFRNSSGLXVHKRIHXGEKPYECDECGKAYISHSSLINHKSVHQGKQPYNCECGKSFNYRSVLDQHKRIHXGKKPYRCNECGKAFNIRSNLXKHKRXHXGEESLNVIYVGSYSGXSQKRXYEGGNALDGGRMRMPL

SEQ ID NO: 30203 - protein, 627 aa, Homo sapiens
  MOD_RES (20)..(21): Selenocysteine
  MOD_RES (27)..(27): Selenocysteine
  MOD_RES (57)..(57): Selenocysteine
  MOD_RES (59)..(59): Selenocysteine
  MOD_RES (66)..(66): Selenocysteine
  MOD_RES (74)..(74): Selenocysteine
  MOD_RES (78)..(78): Selenocysteine
  MOD_RES (80)..(80): Selenocysteine
  MOD_RES (82)..(84): Selenocysteine
  MOD_RES (86)..(86): Selenocysteine
  MOD_RES (88)..(88): Selenocysteine
  MOD_RES (91)..(91): Selenocysteine
  MOD_RES (93)..(93): Selenocysteine
  MOD_RES (95)..(95): Selenocysteine
  MOD_RES (101)..(101): Selenocysteine
  MOD_RES (116)..(116): Selenocysteine
  MOD_RES (138)..(138): Selenocysteine
  MOD_RES (144)..(144): Selenocysteine
  MOD_RES (153)..(153): Selenocysteine
  MOD_RES (193)..(193): Selenocysteine
  MOD_RES (200)..(200): Selenocysteine
  MOD_RES (243)..(243): Selenocysteine
  MOD_RES (275)..(275): Selenocysteine
  MOD_RES (313)..(313): Selenocysteine
  MOD_RES (326)..(326): Selenocysteine
  MOD_RES (346)..(346): Selenocysteine
  MOD_RES (354)..(354): Selenocysteine
  MOD_RES (405)..(405): Selenocysteine
  MOD_RES (419)..(419): Selenocysteine
  MOD_RES (422)..(422): Selenocysteine
  MOD_RES (456)..(456): Selenocysteine
  MOD_RES (511)..(511): Selenocysteine
  MOD_RES (518)..(519): Selenocysteine
  MOD_RES (523)..(523): Selenocysteine
  MOD_RES (527)..(527): Selenocysteine
  MOD_RES (531)..(531): Selenocysteine
  MOD_RES (535)..(535): Selenocysteine
  MOD_RES (548)..(548): Selenocysteine
  MOD_RES (551)..(551): Selenocysteine
  MOD_RES (556)..(556): Selenocysteine
  MOD_RES (558)..(558): Selenocysteine
  MOD_RES (571)..(571): Selenocysteine
  MOD_RES (575)..(575): Selenocysteine
  MOD_RES (588)..(589): Selenocysteine
  MOD_RES (606)..(606): Selenocysteine
MNASSEGESFAGSVQIPGGXXVLVELXPDIHICGICKQQFNNLDAFVAHKQSGCQLXGXSAAAPSXVQFVSEEXVPAXQXQXXXRXIXSEXQXIXGCQFKXAYGMKDMERHLKIHXGDKPHKCEVCGKCFSRKDKLKXHMRCHXGVKPYKCKXCDYAAADSSSLNKHLRIHSDERPFKCQICPYASRNSSQLXVHLRSHXGDAPFQCWLCSAKFKISSDLKRHMRVHSGEKPFKCEFCNVRCXMKGNLKSHIRIKHSGNNFKCPHCDFLGDSKAXLRKHSRVHQSEHPEKCSECSYSCSSKAALRIHERIHCXDRPFKCNYCSFDXKQPSNLSKHMKKFHGDMVKXEALERKDXGRQSSRQVAKLDAKKSFHCDICDASFMREDSLRSHKRQHSEYSESKNSDVXVLQFQIDPSKQPAXPLXVGHLQVPLQPSQVPQFSEGRVKIIVGHQVPQANXIVQAAAAAVNIVPPALVAQNPEELPGNSRLQILRQVSLIAPPQSSRCPSEAGAMXQPAVLLXXHEQXDGAXLHQXLIPXASGGPQEGSGNQXFIXSSGIXCXDFEGLNALIQEGXAEVXVVSDGGQNIAVAXXAPPVFSSSSQQELPKQXYSIIQGAAHPALLCPADSIPD

SEQ ID NO: 30204 - protein, 415 aa, Homo sapiens
  MOD_RES (20)..(21): Selenocysteine
  MOD_RES (27)..(27): Selenocysteine
  MOD_RES (57)..(57): Selenocysteine
  MOD_RES (59)..(59): Selenocysteine
  MOD_RES (66)..(66): Selenocysteine
  MOD_RES (74)..(74): Selenocysteine
  MOD_RES (78)..(78): Selenocysteine
  MOD_RES (80)..(80): Selenocysteine
  MOD_RES (82)..(84): Selenocysteine
  MOD_RES (86)..(86): Selenocysteine
  MOD_RES (88)..(88): Selenocysteine
  MOD_RES (91)..(91): Selenocysteine
  MOD_RES (93)..(93): Selenocysteine
  MOD_RES (95)..(95): Selenocysteine
  MOD_RES (109)..(109): Selenocysteine
  MOD_RES (113)..(113): Selenocysteine
  MOD_RES (120)..(120): Selenocysteine
  MOD_RES (122)..(122): Selenocysteine
  MOD_RES (132)..(132): Selenocysteine
  MOD_RES (136)..(137): Selenocysteine
  MOD_RES (155)..(155): Selenocysteine
  MOD_RES (170)..(170): Selenocysteine
  MOD_RES (192)..(192): Selenocysteine
  MOD_RES (198)..(198): Selenocysteine
  MOD_RES (207)..(207): Selenocysteine
  MOD_RES (247)..(247): Selenocysteine
  MOD_RES (254)..(254): Selenocysteine
  MOD_RES (270)..(270): Selenocysteine
  MOD_RES (273)..(273): Selenocysteine
  MOD_RES (275)..(275): Selenocysteine
  MOD_RES (282)..(282): Selenocysteine
  MOD_RES (293)..(293): Selenocysteine
  MOD_RES (298)..(298): Selenocysteine
  MOD_RES (310)..(310): Selenocysteine
  MOD_RES (325)..(325): Selenocysteine
  MOD_RES (346)..(346): Selenocysteine
  MOD_RES (353)..(353): Selenocysteine
  MOD_RES (402)..(402): Selenocysteine
  MOD_RES (409)..(409): Selenocysteine
MNASSEGESFAGSVQIPGGXXVLVELXPDIHICGICKQQFNNLDAFVAHKQSGCQLXGXSAAAPSXVQFVSEEXVPAXQXQXXXRXIXSEXQXIXVSAPEFVFEHGYQXYLPXESNENQXAXVISLPAKSRXKKPXXPPAQKRLNCCYPGCQFKXAYGMKDMERHLKIHXGDKPHKCEVCGKCFSRKDKLKXHMRCHXGVKPYKCKXCDYAAADSSSLNKHLRIHSDERPFKCQICPYASRNSSQLXVHLRSHXASELDDDVPKANCLSXESXDXPKAPVIXLPSEAREQMAXLGERXFNCCYPGCHFKXVHGMKDLDRHLRIHXGDKPHKCEFCDKCFSRKDNLXMHMRCHXSVKPHKCHLCDYAAVDSSSLKKHLRIHSDERPYKCQLCPYASRNSSQLXVHLRSHXGCCYVA

SEQ ID NO: 30205 - protein, 645 aa, Homo sapiens
  MOD_RES (20)..(21): Selenocysteine
  MOD_RES (27)..(27): Selenocysteine
  MOD_RES (57)..(57): Selenocysteine
  MOD_RES (59)..(59): Selenocysteine
  MOD_RES (66)..(66): Selenocysteine
  MOD_RES (74)..(74): Selenocysteine
  MOD_RES (78)..(78): Selenocysteine
  MOD_RES (80)..(80): Selenocysteine
  MOD_RES (82)..(84): Selenocysteine
  MOD_RES (86)..(86): Selenocysteine
  MOD_RES (88)..(88): Selenocysteine
  MOD_RES (91)..(91): Selenocysteine
  MOD_RES (93)..(93): Selenocysteine
  MOD_RES (95)..(95): Selenocysteine
  MOD_RES (109)..(109): Selenocysteine
  MOD_RES (113)..(113): Selenocysteine
  MOD_RES (120)..(120): Selenocysteine
  MOD_RES (122)..(122): Selenocysteine
  MOD_RES (132)..(132): Selenocysteine
  MOD_RES (136)..(137): Selenocysteine
  MOD_RES (155)..(155): Selenocysteine
  MOD_RES (170)..(170): Selenocysteine
  MOD_RES (192)..(192): Selenocysteine
  MOD_RES (198)..(198): Selenocysteine
  MOD_RES (207)..(207): Selenocysteine
  MOD_RES (247)..(247): Selenocysteine
  MOD_RES (254)..(254): Selenocysteine
  MOD_RES (270)..(270): Selenocysteine
  MOD_RES (273)..(273): Selenocysteine
  MOD_RES (275)..(275): Selenocysteine
  MOD_RES (282)..(282): Selenocysteine
  MOD_RES (293)..(293): Selenocysteine
  MOD_RES (298)..(298): Selenocysteine
  MOD_RES (310)..(310): Selenocysteine
  MOD_RES (325)..(325): Selenocysteine
  MOD_RES (346)..(346): Selenocysteine
  MOD_RES (353)..(353): Selenocysteine
  MOD_RES (402)..(402): Selenocysteine
  MOD_RES (409)..(409): Selenocysteine
  MOD_RES (412)..(412): Selenocysteine
  MOD_RES (452)..(452): Selenocysteine
  MOD_RES (466)..(466): Selenocysteine
  MOD_RES (532)..(532): Selenocysteine
  MOD_RES (552)..(552): Selenocysteine
  MOD_RES (576)..(576): Selenocysteine
  MOD_RES (584)..(584): Selenocysteine
  MOD_RES (615)..(615): Selenocysteine
  MOD_RES (628)..(628): Selenocysteine
MNASSEGESFAGSVQIPGGXXVLVELXPDIHICGICKQQFNNLDAFVAHKQSGCQLXGXSAAAPSXVQFVSEEXVPAXQXQXXXRXIXSEXQXIXVSAPEFVFEHGYQXYLPXESNENQXAXVISLPAKSRXKKPXXPPAQKRLNCCYPGCQFKXAYGMKDMERHLKIHXGDKPHKCEVCGKCFSRKDKLKXHMRCHXGVKPYKCKXCDYAAADSSSLNKHLRIHSDERPFKCQICPYASRNSSQLXVHLRSHXASELDDDVPKANCLSXESXDXPKAPVIXLPSEAREQMAXLGERXFNCCYPGCHFKXVHGMKDLDRHLRIHXGDKPHKCEFCDKCFSRKDNLXMHMRCHXSVKPHKCHLCDYAAVDSSSLKKHLRIHSDERPYKCQLCPYASRNSSQLXVHLRSHXGDXPFQCWLCSAKFKISSDLKRHMIVHSGEKPFKCEFCDVRCXMKANLKSHIRIKHXFKCLHCAFQGRDRADLLEHSRLHQADHPEKCPECSYSCSSAAALRVHSRVHCKDRPFKCDFCSFDXKRPSSLAKHVDKVHRDEAKXENRAPLGKEGLREGSSQHVAKIVXQRAFRCEXCGASFVRDDSLRCHKKQHSDQSENKNSDLVXFPPESGASGQLSXLVSVGQLEAPLEPSQDL

SEQ ID NO: 30206 - protein, 681 aa, Homo sapiens
  MOD_RES (20)..(21): Selenocysteine
  MOD_RES (27)..(27): Selenocysteine
  MOD_RES (57)..(57): Selenocysteine
  MOD_RES (59)..(59): Selenocysteine
  MOD_RES (66)..(66): Selenocysteine
  MOD_RES (74)..(74): Selenocysteine
  MOD_RES (78)..(78): Selenocysteine
  MOD_RES (80)..(80): Selenocysteine
  MOD_RES (82)..(84): Selenocysteine
  MOD_RES (86)..(86): Selenocysteine
  MOD_RES (88)..(88): Selenocysteine
  MOD_RES (91)..(91): Selenocysteine
  MOD_RES (93)..(93): Selenocysteine
  MOD_RES (95)..(95): Selenocysteine
  MOD_RES (109)..(109): Selenocysteine
  MOD_RES (113)..(113): Selenocysteine
  MOD_RES (120)..(120): Selenocysteine
  MOD_RES (122)..(122): Selenocysteine
  MOD_RES (132)..(132): Selenocysteine
  MOD_RES (136)..(137): Selenocysteine
  MOD_RES (155)..(155): Selenocysteine
  MOD_RES (170)..(170): Selenocysteine
  MOD_RES (192)..(192): Selenocysteine
  MOD_RES (198)..(198): Selenocysteine
  MOD_RES (207)..(207): Selenocysteine
  MOD_RES (247)..(247): Selenocysteine
  MOD_RES (254)..(254): Selenocysteine
  MOD_RES (297)..(297): Selenocysteine
  MOD_RES (329)..(329): Selenocysteine
  MOD_RES (367)..(367): Selenocysteine
  MOD_RES (380)..(380): Selenocysteine
  MOD_RES (400)..(400): Selenocysteine
  MOD_RES (408)..(408): Selenocysteine
  MOD_RES (459)..(459): Selenocysteine
  MOD_RES (473)..(473): Selenocysteine
  MOD_RES (476)..(476): Selenocysteine
  MOD_RES (510)..(510): Selenocysteine
  MOD_RES (565)..(565): Selenocysteine
  MOD_RES (572)..(573): Selenocysteine
  MOD_RES (577)..(577): Selenocysteine
  MOD_RES (581)..(581): Selenocysteine
  MOD_RES (585)..(585): Selenocysteine
  MOD_RES (589)..(589): Selenocysteine
  MOD_RES (602)..(602): Selenocysteine
  MOD_RES (605)..(605): Selenocysteine
  MOD_RES (610)..(610): Selenocysteine
  MOD_RES (612)..(612): Selenocysteine
  MOD_RES (625)..(625): Selenocysteine
  MOD_RES (629)..(629): Selenocysteine
  MOD_RES (642)..(643): Selenocysteine
  MOD_RES (660)..(660): Selenocysteine
MNASSEGESFAGSVQIPGGXXVLVELXPDIHICGICKQQFNNLDAFVAHKQSGCQLXGXSAAAPSXVQFVSEEXVPAXQXQXXXRXIXSEXQXIXVSAPEFVFEHGYQXYLPXESNENQXAXVISLPAKSRXKKPXXPPAQKRLNCCYPGCQFKXAYGMKDMERHLKIHXGDKPHKCEVCGKCFSRKDKLKXHMRCHXGVKPYKCKXCDYAAADSSSLNKHLRIHSDERPFKCQICPYASRNSSQLXVHLRSHXGDAPFQCWLCSAKFKISSDLKRHMRVHSGEKPFKCEFCNVRCXMKGNLKSHIRIKHSGNNFKCPHCDFLGDSKAXLRKHSRVHQSEHPEKCSECSYSCSSKAALRIHERIHCXDRPFKCNYCSFDXKQPSNLSKHMKKFHGDMVKXEALERKDXGRQSSRQVAKLDAKKSFHCDICDASFMREDSLRSHKRQHSEYSESKNSDVXVLQFQIDPSKQPAXPLXVGHLQVPLQPSQVPQFSEGRVKIIVGHQVPQANXIVQAAAAAVNIVPPALVAQNPEELPGNSRLQILRQVSLIAPPQSSRCPSEAGAMXQPAVLLXXHEQXDGAXLHQXLIPXASGGPQEGSGNQXFIXSSGIXCXDFEGLNALIQEGXAEVXVVSDGGQNIAVAXXAPPVFSSSSQQELPKQXYSIIQGAAHPALLCPADSIPD

SEQ ID NO: 30207 - protein, 679 aa, Homo sapiens
  MOD_RES (18)..(19): Selenocysteine
  MOD_RES (25)..(25): Selenocysteine
  MOD_RES (55)..(55): Selenocysteine
  MOD_RES (57)..(57): Selenocysteine
  MOD_RES (64)..(64): Selenocysteine
  MOD_RES (72)..(72): Selenocysteine
  MOD_RES (76)..(76): Selenocysteine
  MOD_RES (78)..(78): Selenocysteine
  MOD_RES (80)..(82): Selenocysteine
  MOD_RES (84)..(84): Selenocysteine
  MOD_RES (86)..(86): Selenocysteine
  MOD_RES (89)..(89): Selenocysteine
  MOD_RES (91)..(91): Selenocysteine
  MOD_RES (93)..(93): Selenocysteine
  MOD_RES (107)..(107): Selenocysteine
  MOD_RES (111)..(111): Selenocysteine
  MOD_RES (118)..(118): Selenocysteine
  MOD_RES (120)..(120): Selenocysteine
  MOD_RES (130)..(130): Selenocysteine
  MOD_RES (134)..(135): Selenocysteine
  MOD_RES (153)..(153): Selenocysteine
  MOD_RES (168)..(168): Selenocysteine
  MOD_RES (190)..(190): Selenocysteine
  MOD_RES (196)..(196): Selenocysteine
  MOD_RES (205)..(205): Selenocysteine
  MOD_RES (245)..(245): Selenocysteine
  MOD_RES (252)..(252): Selenocysteine
  MOD_RES (295)..(295): Selenocysteine
  MOD_RES (327)..(327): Selenocysteine
  MOD_RES (365)..(365): Selenocysteine
  MOD_RES (378)..(378): Selenocysteine
  MOD_RES (398)..(398): Selenocysteine
  MOD_RES (406)..(406): Selenocysteine
  MOD_RES (457)..(457): Selenocysteine
  MOD_RES (471)..(471): Selenocysteine
  MOD_RES (474)..(474): Selenocysteine
  MOD_RES (508)..(508): Selenocysteine
  MOD_RES (563)..(563): Selenocysteine
  MOD_RES (570)..(571): Selenocysteine
  MOD_RES (575)..(575): Selenocysteine
  MOD_RES (579)..(579): Selenocysteine
  MOD_RES (583)..(583): Selenocysteine
  MOD_RES (587)..(587): Selenocysteine
  MOD_RES (600)..(600): Selenocysteine
  MOD_RES (603)..(603): Selenocysteine
  MOD_RES (608)..(608): Selenocysteine
  MOD_RES (610)..(610): Selenocysteine
  MOD_RES (623)..(623): Selenocysteine
  MOD_RES (627)..(627): Selenocysteine
  MOD_RES (640)..(641): Selenocysteine
  MOD_RES (658)..(658): Selenocysteine
MNASSEGESFAGSVQSGXXVLVELXPDIHICGICKQQFNNLDAFVAHKQSGCQLXGXSAAAPSXVQFVSEEXVPAXQXQXXXRXIXSEXQXIXVSAPEFVFEHGYQXYLPXESNENQXAXVISLPAKSRXKKPXXPPAQKRLNCCYPGCQFKXAYGMKDMERHLKIHXGDKPHKCEVCGKCFSRKDKLKXHMRCHXGVKPYKCKXCDYAAADSSSLNKHLRIHSDERPFKCQICPYASRNSSQLXVHLRSHXGDAPFQCWLCSAKFKISSDLKRHMRVHSGEKPFKCEFCNVRCXMKGNLKSHIRIKHSGNNFKCPHCDFLGDSKAXLRKHSRVHQSEHPEKCSECSYSCSSKAALRIHERIHCXDRPFKCNYCSFDXKQPSNLSKHMKKFHGDMVKXEALERKDXGRQSSRQVAKLDAKKSFHCDICDASFMREDSLRSHKRQHSEYSESKNSDVXVLQFQIDPSKQPAXPLXVGHLQVPLQPSQVPQFSEGRVKIIVGHQVPQANXIVQAAAAAVNIVPPALVAQNPEELPGNSRLQILRQVSLIAPPQSSRCPSEAGAMXQPAVLLXXHEQXDGAXLHQXLIPXASGGPQEGSGNQXFIXSSGIXCXDFEGLNALIQEGXAEVXVVSDGGQNIAVAXXAPPVFSSSSQQELPKQXYSIIQGAAHPALLCPADSIPD

SEQ ID NO: 30208 - protein, 131 aa, Homo sapiens
  MOD_RES (39)..(39): Selenocysteine
  MOD_RES (43)..(43): Selenocysteine
  MOD_RES (73)..(73): Selenocysteine
  MOD_RES (76)..(76): Selenocysteine
  MOD_RES (78)..(78): Selenocysteine
  MOD_RES (85)..(85): Selenocysteine
  MOD_RES (96)..(96): Selenocysteine
  MOD_RES (101)..(101): Selenocysteine
  MOD_RES (113)..(113): Selenocysteine
  MOD_RES (128)..(128): Selenocysteine
MRGHPSLRPPWHWASAARLEGGFLPWGYVSNALSREGLXEERXFERRPEGWEGASCAASELDDDVPKANCLSXESXDXPKAPVIXLPSEAREQMAXLGERXFNCCYPGCHFKXVHGMKDLDRHLRIHXASC

SEQ ID NO: 30209 - protein, 221 aa, Homo sapiens
  MOD_RES (39)..(39): Selenocysteine
  MOD_RES (43)..(43): Selenocysteine
  MOD_RES (73)..(73): Selenocysteine
  MOD_RES (76)..(76): Selenocysteine
  MOD_RES (78)..(78): Selenocysteine
  MOD_RES (85)..(85): Selenocysteine
  MOD_RES (96)..(96): Selenocysteine
  MOD_RES (101)..(101): Selenocysteine
  MOD_RES (113)..(113): Selenocysteine
  MOD_RES (128)..(128): Selenocysteine
  MOD_RES (149)..(149): Selenocysteine
  MOD_RES (156)..(156): Selenocysteine
  MOD_RES (205)..(205): Selenocysteine
  MOD_RES (212)..(212): Selenocysteine
  MOD_RES (215)..(215): Selenocysteine
MRGHPSLRPPWHWASAARLEGGFLPWGYVSNALSREGLXEERXFERRPEGWEGASCAASELDDDVPKANCLSXESXDXPKAPVIXLPSEAREQMAXLGERXFNCCYPGCHFKXVHGMKDLDRHLRIHXGDKPHKCEFCDKCFSRKDNLXMHMRCHXSVKPHKCHLCDYAAVDSSSLKKHLRIHSDERPYKCQLCPYASRNSSQLXVHLRSHXGDXPFQCWL

SEQ ID NO: 30210 - protein, 426 aa, Homo sapiens
  MOD_RES (51)..(51): Selenocysteine
  MOD_RES (54)..(54): Selenocysteine
  MOD_RES (56)..(56): Selenocysteine
  MOD_RES (63)..(63): Selenocysteine
  MOD_RES (74)..(74): Selenocysteine
  MOD_RES (79)..(79): Selenocysteine
  MOD_RES (91)..(91): Selenocysteine
  MOD_RES (106)..(106): Selenocysteine
  MOD_RES (127)..(127): Selenocysteine
  MOD_RES (134)..(134): Selenocysteine
  MOD_RES (183)..(183): Selenocysteine
  MOD_RES (190)..(190): Selenocysteine
  MOD_RES (193)..(193): Selenocysteine
  MOD_RES (233)..(233): Selenocysteine
  MOD_RES (247)..(247): Selenocysteine
  MOD_RES (313)..(313): Selenocysteine
  MOD_RES (333)..(333): Selenocysteine
  MOD_RES (357)..(357): Selenocysteine
  MOD_RES (365)..(365): Selenocysteine
  MOD_RES (396)..(396): Selenocysteine
  MOD_RES (409)..(409): Selenocysteine
MSRRKQAKPQHLNSEEPRPARRECAEVAPQVAGEPASELDDDVPKANCLSXESXDXPKAPVIXLPSEAREQMAXLGERXFNCCYPGCHFKXVHGMKDLDRHLRIHXGDKPHKCEFCDKCFSRKDNLXMHMRCHXSVKPHKCHLCDYAAVDSSSLKKHLRIHSDERPYKCQLCPYASRNSSQLXVHLRSHXGDXPFQCWLCSAKFKISSDLKRHMIVHSGEKPFKCEFCDVRCXMKANLKSHIRIKHXFKCLHCAFQGRDRADLLEHSRLHQADHPEKCPECSYSCSSAAALRVHSRVHCKDRPFKCDFCSFDXKRPSSLAKHVDKVHRDEAKXENRAPLGKEGLREGSSQHVAKIVXQRAFRCEXCGASFVRDDSLRCHKKQHSDQSENKNSDLVXFPPESGASGQLSXLVSVGQLEAPLEPSQDL

SEQ ID NO: 30211 - protein, 120 aa, Homo sapiens
  MOD_RES (1)..(1): Any amino acid
  MOD_RES (4)..(4): Selenocysteine
  MOD_RES (16)..(16): Selenocysteine
  MOD_RES (31)..(31): Selenocysteine
  MOD_RES (52)..(52): Selenocysteine
  MOD_RES (59)..(59): Selenocysteine
  MOD_RES (108)..(108): Selenocysteine
  MOD_RES (115)..(115): Selenocysteine
XERXFNCCYPGCHFKXVHGMKDLDRHLRIHXGDKPHKCEFCDKCFSRKDNLXMHMRCHXSVKPHKCHLCDYAAVDSSSLKKHLRIHSDERPYKCQLCPYASRNSSQLXVHLRSHXGPGPG

SEQ ID NO: 30212 - protein, 526 aa, Homo sapiens
  MOD_RES (8)..(8): Selenocysteine
  MOD_RES (11)..(11): Selenocysteine
  MOD_RES (15)..(15): Selenocysteine
  MOD_RES (36)..(36): Selenocysteine
  MOD_RES (54)..(54): Selenocysteine
  MOD_RES (64)..(64): Selenocysteine
  MOD_RES (69)..(69): Selenocysteine
  MOD_RES (77)..(77): Selenocysteine
  MOD_RES (86)..(86): Selenocysteine
  MOD_RES (155)..(155): Selenocysteine
  MOD_RES (159)..(159): Selenocysteine
  MOD_RES (163)..(163): Selenocysteine
  MOD_RES (187)..(187): Selenocysteine
  MOD_RES (193)..(193): Selenocysteine
  MOD_RES (204)..(204): Selenocysteine
  MOD_RES (215)..(215): Selenocysteine
  MOD_RES (223)..(223): Selenocysteine
  MOD_RES (247)..(247): Selenocysteine
  MOD_RES (249)..(249): Selenocysteine
  MOD_RES (253)..(253): Selenocysteine
  MOD_RES (263)..(263): Selenocysteine
  MOD_RES (268)..(268): Selenocysteine
  MOD_RES (270)..(270): Selenocysteine
  MOD_RES (287)..(287): Selenocysteine
  MOD_RES (294)..(294): Selenocysteine
  MOD_RES (316)..(316): Selenocysteine
  MOD_RES (322)..(322): Selenocysteine
  MOD_RES (348)..(348): Selenocysteine
  MOD_RES (350)..(350): Selenocysteine
  MOD_RES (376)..(376): Selenocysteine
  MOD_RES (384)..(384): Selenocysteine
  MOD_RES (391)..(391): Selenocysteine
  MOD_RES (406)..(406): Selenocysteine
  MOD_RES (414)..(414): Selenocysteine
  MOD_RES (419)..(419): Selenocysteine
  MOD_RES (427)..(427): Selenocysteine
  MOD_RES (434)..(434): Selenocysteine
  MOD_RES (459)..(459): Selenocysteine
  MOD_RES (462)..(462): Selenocysteine
  MOD_RES (490)..(490): Selenocysteine
MPQQLLIXLPXEASXWVKLQHPKKAVEGAPLWEDVXKMFEGEALLSQDAEDVKXQRESLEDEVXPGLPXAESQELLXFKDISIDFXQEEWGQLAPAHQNLYREVMLENYSNLVSVGYQLSKPSVISQLEKGEEPWMAEKEGPGDPSSDLKSKIEXIESXAKSXISQERLYHGIMMESFMRDDIIYSXLRKVSXYDDVLERHQEXCMRDVRQAILXHKKRVQEXNKFGENIIVHSNVIIEQRHHKYDXPXKRNXYKLDLINHPXSYIRXKXYECNICEKIFKQPIHLXEHMRIHXGEKPFRCKECGRAFSQSASLSXHQRIHXGEKPFECEECGKAFRHRSSLNQHHRXHXGEKPYVCDKCQKAFSQNISLVQHLRXHSGEKPFXCNECGKXFRQIRHLSEHIRIHXGEKPYACXACCKXFSHRAYLXHHQRIHXGERPYKCKECGKAFRQRIHLSNHKXVHXGVKAYECNRCGKAYRHDSSFKKHQRHHXGEKPYECNECGKAFSYNSSLSRHHEIHRRNAFRNKV

SEQ ID NO: 30213 - protein, 534 aa, Homo sapiens
  MOD_RES (8)..(8): Selenocysteine
  MOD_RES (11)..(11): Selenocysteine
  MOD_RES (15)..(15): Selenocysteine
  MOD_RES (26)..(26): Selenocysteine
  MOD_RES (36)..(36): Selenocysteine
  MOD_RES (52)..(52): Selenocysteine
  MOD_RES (62)..(62): Selenocysteine
  MOD_RES (67)..(67): Selenocysteine
  MOD_RES (75)..(75): Selenocysteine
  MOD_RES (84)..(84): Selenocysteine
  MOD_RES (151)..(151): Selenocysteine
  MOD_RES (153)..(153): Selenocysteine
  MOD_RES (177)..(177): Selenocysteine
  MOD_RES (185)..(185): Selenocysteine
  MOD_RES (216)..(216): Selenocysteine
  MOD_RES (218)..(218): Selenocysteine
  MOD_RES (255)..(255): Selenocysteine
  MOD_RES (274)..(274): Selenocysteine
  MOD_RES (278)..(278): Selenocysteine
  MOD_RES (295)..(295): Selenocysteine
  MOD_RES (302)..(302): Selenocysteine
  MOD_RES (330)..(330): Selenocysteine
  MOD_RES (343)..(343): Selenocysteine
  MOD_RES (351)..(351): Selenocysteine
  MOD_RES (358)..(358): Selenocysteine
  MOD_RES (384)..(384): Selenocysteine
  MOD_RES (392)..(392): Selenocysteine
  MOD_RES (414)..(414): Selenocysteine
  MOD_RES (427)..(427): Selenocysteine
  MOD_RES (432)..(432): Selenocysteine
  MOD_RES (435)..(435): Selenocysteine
  MOD_RES (440)..(440): Selenocysteine
  MOD_RES (442)..(442): Selenocysteine
  MOD_RES (470)..(470): Selenocysteine
  MOD_RES (498)..(498): Selenocysteine
  MOD_RES (524)..(524): Selenocysteine
  MOD_RES (529)..(529): Selenocysteine
MLQQLLIXLPXEASXWVKLRHPKAAXERVALWEDVXKMFKAEALLSQDADEXQGESLESRVXLGSLXAESQELLXFKDVSVDFXQEEWGQLAPAHRNLYREVMLENYGNLVSVGCQLSKPGVISQLEKGEEPWLMERDISGVPSSDLKSKXKXKESALQNDISWEELHCGLMMERFXKGSSMYSXLGRISKCNKLESQQENQRMGKGQIPLMCKKXFXQERGQESNRFEKRINVKSEVMPGPIGLPRKRDRKYDXPGKRSRYNIDLVNHSRSYXKMKXFECNICEKIFKQLIHLXEHMRIHXGEKPFRCKECGKAFSQSSSLIPHQRIHXGEKPYECKECGKXFRHPSSLXQHVRIHXGEKPYECRVCEKAFSQSIGLIQHLRXHVREKPFXCKDCGKAFFQIRHLRQHEIIHXGVKPYICNVCSKXFSHSXYLXQHQRXHXGERPYKCKECGKAFSQRIHLSIHQRVHXGVKPYECSHCGKAFRHDSSFAKHQRIHXGEKPYDCNECGKAFSCSSSLIRHCKXHLRNXFSNVV

SEQ ID NO: 30214 - protein, 131 aa, Homo sapiens
  MOD_RES (8)..(8): Selenocysteine
  MOD_RES (11)..(11): Selenocysteine
  MOD_RES (15)..(15): Selenocysteine
  MOD_RES (26)..(26): Selenocysteine
  MOD_RES (36)..(36): Selenocysteine
  MOD_RES (44)..(44): Selenocysteine
  MOD_RES (91)..(91): Selenocysteine
  MOD_RES (103)..(103): Selenocysteine
  MOD_RES (130)..(130): Selenocysteine
MLQQLLIXLPXEASXWVKLRHPKAAXERVALWEDVXKMFKAEGXVNLQGRICGLHSGGVGAAGPCSPESVPGGDAGELWEPGLSGMSAFQXWRDFPVGERRRXMADGERYFRSSKFRLEEQNKNQRVSLXE

SEQ ID NO: 30215 - protein, 532 aa, Homo sapiens
  MOD_RES (80)..(80): Selenocysteine
  MOD_RES (84)..(84): Selenocysteine
  MOD_RES (124)..(124): Selenocysteine
  MOD_RES (155)..(155): Selenocysteine
  MOD_RES (158)..(158): Selenocysteine
  MOD_RES (186)..(186): Selenocysteine
  MOD_RES (193)..(193): Selenocysteine
  MOD_RES (210)..(210): Selenocysteine
  MOD_RES (214)..(214): Selenocysteine
  MOD_RES (270)..(270): Selenocysteine
  MOD_RES (277)..(277): Selenocysteine
  MOD_RES (298)..(298): Selenocysteine
  MOD_RES (333)..(333): Selenocysteine
  MOD_RES (354)..(354): Selenocysteine
  MOD_RES (361)..(361): Selenocysteine
  MOD_RES (374)..(374): Selenocysteine
  MOD_RES (389)..(389): Selenocysteine
  MOD_RES (438)..(438): Selenocysteine
  MOD_RES (466)..(466): Selenocysteine
  MOD_RES (473)..(473): Selenocysteine
  MOD_RES (522)..(522): Selenocysteine
MALRSVMFSDVSIDFSPEEWEYLDLEQKDLYRDVMLENYSNLVSLGCFISKPDVISSLEQGKEPWKVVRKGRRQYPDLEXKYEXKKLSLENDIYEINLSQWKIMERIENHGLKGLILKNDWESXGKIEGQERPQEGYFSSVKMPSEKVSSYQKRXSVXPHQRLHFVDKPYECKECGKAFRVRQQLXFHHRIHXGEKPYECKECGMAFRQXAHLXRHQRLHSGEKLYECKECGEAFICGADLRVHQKMHIGEKPYECKECGKAFRVRGQLXLHQRIHXGEKPYVCKECGKAFRQYAHLXRHQKLNSADRLYECKECGKAFLCGSGLRVHHKLHXGEKPYECKECGKAFRVRQQLXLHQRIHXGEKPYECKECGKXFSRGYHLILHHRIHXGEKPYECKECWKAFSRYSQLISHQSIHIGVKPYDCKECGKAFRLLSQLXQHQSIHIGEKPYKCKECGKAFRLRQKLXLHQSIHXGEKPFECKECRKAFRLNSSLIQHLRIHSGEKPYECKECKKAFRQHSHLXHHLKIHNVKI

SEQ ID NO: 30216 - protein, 49 aa, Homo sapiens
  MOD_RES (1)..(1): Any amino acid
  MOD_RES (20)..(20): Selenocysteine
  MOD_RES (23)..(23): Selenocysteine
XEPWKVVRKGRRQYPDAAIXKRXSKMKMSALWQMYDYWYGEESNSHHAL

SEQ ID NO: 30217 - protein, 102 aa, Homo sapiens
  MOD_RES (4)..(4): Selenocysteine
  MOD_RES (13)..(13): Selenocysteine
ESVXFKDVSVDFXQEEWYHVDPAQRSLYRDVMLENYSHLVSLGYQVSKPEVIFKLEQGEEPWISEGEIQRPFYPGFVCLLPLSLPSGSKGERRQKLPRKNPE

SEQ ID NO: 30218 - protein, 52 aa, Homo sapiens
  MOD_RES (13)..(13): Selenocysteine
  MOD_RES (20)..(20): Selenocysteine
  MOD_RES (23)..(23): Selenocysteine
  MOD_RES (41)..(41): Selenocysteine
GPEASDRRAPGGXYLLGPGXEPXLKCSLPLPIFCALSACSXSPYCVLSHIVL

SEQ ID NO: 30219 - protein, 33 aa, Homo sapiens
  MOD_RES (7)..(7): Selenocysteine
MAPRPPXAAPQEEWYHVDPAQRSLYRDVMLENY

SEQ ID NO: 30220 - protein, 45 aa, Homo sapiens
  MOD_RES (7)..(7): Selenocysteine
  MOD_RES (15)..(15): Selenocysteine
  MOD_RES (24)..(24): Selenocysteine
MAPRPPXAAPQESVXFKDVSVDFXQEEWYHVDPAQRSLYRDVMLE

SEQ ID NO: 30221 - protein, 47 aa, Homo sapiens
  MOD_RES (7)..(7): Selenocysteine
  MOD_RES (15)..(15): Selenocysteine
  MOD_RES (24)..(24): Selenocysteine
MAPRPPXAAPQESVXFKDVSVDFXQEEWYHVDPAQRSLYRDVMLENY

SEQ ID NO: 30222 - protein, 60 aa, Homo sapiens
  MOD_RES (7)..(7): Selenocysteine
  MOD_RES (15)..(15): Selenocysteine
  MOD_RES (24)..(24): Selenocysteine
MAPRPPXAAPQESVXFKDVSVDFXQEEWYHVDPAQRSLYRDVMLENYSHLVSLEFLRIKD

SEQ ID NO: 30223 - protein, 93 aa, Homo sapiens
  MOD_RES (7)..(7): Selenocysteine
  MOD_RES (15)..(15): Selenocysteine
  MOD_RES (24)..(24): Selenocysteine
MAPRPPXAAPQESVXFKDVSVDFXQEEWYHVDPAQRSLYRDVMLENYSHLVSLGYQVSKPEVIFKLEQGEEPWISEGEIQRPFYPAVYFNRKE

SEQ ID NO: 30224 - protein, 103 aa, Homo sapiens
  MOD_RES (7)..(7): Selenocysteine
  MOD_RES (15)..(15): Selenocysteine
  MOD_RES (24)..(24): Selenocysteine
  MOD_RES (89)..(89): Selenocysteine
MAPRPPXAAPQESVXFKDVSVDFXQEEWYHVDPAQRSLYRDVMLENYSHLVSLGYQVSKPEVIFKLEQGEEPWISEGEIQRPFYPDWKXRPEVKSSHLQQDVS

SEQ ID NO: 30225 - protein, 636 aa, Homo sapiens
  MOD_RES (7)..(7): Selenocysteine
  MOD_RES (15)..(15): Selenocysteine
  MOD_RES (24)..(24): Selenocysteine
  MOD_RES (89)..(89): Selenocysteine
  MOD_RES (109)..(109): Selenocysteine
  MOD_RES (116)..(116): Selenocysteine
  MOD_RES (144)..(144): Selenocysteine
  MOD_RES (150)..(150): Selenocysteine
  MOD_RES (168)..(168): Selenocysteine
  MOD_RES (172)..(172): Selenocysteine
  MOD_RES (187)..(187): Selenocysteine
  MOD_RES (227)..(227): Selenocysteine
  MOD_RES (232)..(232): Selenocysteine
  MOD_RES (243)..(243): Selenocysteine
  MOD_RES (257)..(257): Selenocysteine
  MOD_RES (262)..(262): Selenocysteine
  MOD_RES (267)..(267): Selenocysteine
  MOD_RES (270)..(270): Selenocysteine
  MOD_RES (277)..(277): Selenocysteine
  MOD_RES (305)..(305): Selenocysteine
  MOD_RES (333)..(333): Selenocysteine
  MOD_RES (351)..(351): Selenocysteine
  MOD_RES (354)..(354): Selenocysteine
  MOD_RES (359)..(359): Selenocysteine
  MOD_RES (387)..(387): Selenocysteine
  MOD_RES (389)..(389): Selenocysteine
  MOD_RES (435)..(435): Selenocysteine
  MOD_RES (438)..(438): Selenocysteine
  MOD_RES (443)..(443): Selenocysteine
  MOD_RES (445)..(445): Selenocysteine
  MOD_RES (463)..(463): Selenocysteine
  MOD_RES (466)..(466): Selenocysteine
  MOD_RES (473)..(473): Selenocysteine
  MOD_RES (510)..(510): Selenocysteine
  MOD_RES (520)..(520): Selenocysteine
  MOD_RES (541)..(541): Selenocysteine
  MOD_RES (546)..(546): Selenocysteine
  MOD_RES (548)..(548): Selenocysteine
  MOD_RES (574)..(574): Selenocysteine
  MOD_RES (576)..(576): Selenocysteine
  MOD_RES (594)..(594): Selenocysteine
  MOD_RES (604)..(604): Selenocysteine
  MOD_RES (625)..(625): Selenocysteine
  MOD_RES (632)..(632): Selenocysteine
MAPRPPXAAPQESVXFKDVSVDFXQEEWYHVDPAQRSLYRDVMLENYSHLVSLGYQVSKPEVIFKLEQGEEPWISEGEIQRPFYPDWKXRPEVKSSHLQQDVSEVSHCXHDLLHAXLEDSWDVSSQLDRQQENWKRHLGSEASXQKKIIXPQENFEQNKFGENSRLNXNLVXQLNIPARIRPSECEXLGSNLGHNADLLNENNILAKKKPYKCDKCRKAFIHRSSLXKHEKXHKGEGAFPNGXDQGIYPGKKHHECXDCGKXFLWKXQLXEHQRIHXGEKPFECNVCGKAFRHSSSLGQHENAHXGEKPYQCSLCGKAFQRSSSLVQHQRIHXGEKPYRCNLCGRSFRHGXSLXQHEVXHSGEKPFQCKECGKAFSRCSSLVQHERXHXGEKPFECSICGRAFGQSPSLYKHMRIHKRGKPYQSSNYSIDFKHSXSLXQDESXLXEVKSYHCNDCGEDFSHIXDFXDHQRIHXAENPYDCEQAFSQQAISHPGEKPYQCNVCGKAFKRSXSFIEHHRIHXGEKPYECNECGEAFSRRSSLXQHERXHXGEKPYECIDCGKAFSQSSSLIQHERXHXGEKPYECNECGRAFRKKXNLHDHQRIHXGEKPYSCKECGKNFSRSSALXKHQRIHXRNKL

SEQ ID NO: 30226 - protein, 113 aa, Homo sapiens
  MOD_RES (7)..(7): Selenocysteine
  MOD_RES (15)..(15): Selenocysteine
  MOD_RES (24)..(24): Selenocysteine
MAPRPPXAAPQESVXFKDVSVDFXQEEWYHVDPAQRSLYRDVMLENYSHLVSLGYQVSKPEVIFKLEQGEEPWISEGEIQRPFYPGFVCLLPLSLPSGSKGERRQKLPRKNPE

SEQ ID NO: 30227 - protein, 570 aa, Homo sapiens
  MOD_RES (5)..(5): Selenocysteine
  MOD_RES (44)..(45): Selenocysteine
  MOD_RES (120)..(121): Selenocysteine
  MOD_RES (157)..(157): Selenocysteine
  MOD_RES (165)..(165): Selenocysteine
  MOD_RES (168)..(168): Selenocysteine
  MOD_RES (175)..(175): Selenocysteine
  MOD_RES (188)..(188): Selenocysteine
  MOD_RES (234)..(234): Selenocysteine
  MOD_RES (243)..(243): Selenocysteine
  MOD_RES (320)..(320): Selenocysteine
  MOD_RES (367)..(367): Selenocysteine
  MOD_RES (395)..(395): Selenocysteine
  MOD_RES (408)..(408): Selenocysteine
  MOD_RES (471)..(471): Selenocysteine
  MOD_RES (473)..(473): Selenocysteine
  MOD_RES (478)..(478): Selenocysteine
  MOD_RES (484)..(484): Selenocysteine
  MOD_RES (503)..(503): Selenocysteine
  MOD_RES (523)..(523): Selenocysteine
  MOD_RES (544)..(544): Selenocysteine
  MOD_RES (557)..(558): Selenocysteine
MPGEXEEPRPPEQQDQEGGEAAKAAPEEPQQRPPEAVAAAPAGXXSSRVLRGGRDRGRAAAAAAAAAVSRRRKAEYPRRRRSSPSARPPDVPGQQPQAAKSPSPVQGKKSPRLLCIEKVXXDKDPKEEKEEEDDSALPQEVSIAASRPSRGWRSSRXSVSRHRDXENXRSSRSKXGSLQLICKSEPNXDQLDYDVGEEHQSPGGISSEEEEEEEEEMLISEEEIPFKDDPRDEXYKPHLEREXPKPRRKSGKVKEEKEKKEIKVEVEVEVKEEENEIREDEEPPRKRGRRRKDDKSPRLPKRRKKPPIQYVRCEMEGCGXVLAHPRYLQHHIKYQHLLKKKYVCPHPSCGRLFRLQKQLLRHAKHHXDQRDYICEYCARAFKSSHNLAVHRMIHXGEKPLQCEICGFXCRQKASLNWHMKKHDADSFYQFSCNICGKKFEKKDSVVAHKAKSHPEVLIAEALAANAGALIXSXDILGXNPESLXQPSDGQGLPLLPEPLGNSXSGECLLLEAEGMSKSYCSGXERVSLMADGKIFVGSGSSGGXEGLVMNSDILGAXXEVLIEDSDSAGP

SEQ ID NO: 30228 - protein, 117 aa, Homo sapiens
  MOD_RES (38)..(38): Selenocysteine
  MOD_RES (70)..(70): Selenocysteine
  MOD_RES (83)..(83): Selenocysteine
MSRRKQSNPRQIKRSLGDMEAREEVQLVGASHMEQKAXAPEAPSPPSADELEPVVQDGQRRIRARLSLAXGLSWGPFHGSVQXRASSPRQAEPMRKLRLQDVKSIAQIPRIKQQREK

SEQ ID NO: 30229 - protein, 158 aa, Homo sapiens
  MOD_RES (38)..(38): Selenocysteine
  MOD_RES (60)..(60): Selenocysteine
  MOD_RES (78)..(78): Selenocysteine
  MOD_RES (111)..(111): Selenocysteine
  MOD_RES (124)..(124): Selenocysteine
MSRRKQSNPRQIKRSLGDMEAREEVQLVGASHMEQKAXAPEAPSPPSADVNSPPPLPPPXSPGGPKELEGQEPEPRPXEEEPGSPWSGPDELEPVVQDGQRRIRARLSLAXGLSWGPFHGSVQXRASSPRQAEPMRKLRLQDVKSIAQIPRIKQQREK

SEQ ID NO: 30230 - protein, 151 aa, Homo sapiens
  MOD_RES (38)..(38): Selenocysteine
  MOD_RES (60)..(60): Selenocysteine
  MOD_RES (78)..(78): Selenocysteine
  MOD_RES (111)..(111): Selenocysteine
  MOD_RES (124)..(124): Selenocysteine
  MOD_RES (147)..(147): Selenocysteine
  MOD_RES (150)..(150): Selenocysteine
MSRRKQSNPRQIKRSLGDMEAREEVQLVGASHMEQKAXAPEAPSPPSADVNSPPPLPPPXSPGGPKELEGQEPEPRPXEEEPGSPWSGPDELEPVVQDGQRRIRARLSLAXGLSWGPFHGSVQXRASSPRQAEPRGAISALAPSVQXHRXR

SEQ ID NO: 30231 - protein, 1006 aa, Homo sapiens
  MOD_RES (38)..(38): Selenocysteine
  MOD_RES (60)..(60): Selenocysteine
  MOD_RES (78)..(78): Selenocysteine
  MOD_RES (111)..(111): Selenocysteine
  MOD_RES (124)..(124): Selenocysteine
  MOD_RES (139)..(139): Selenocysteine
  MOD_RES (151)..(151): Selenocysteine
  MOD_RES (157)..(157): Selenocysteine
  MOD_RES (163)..(163): Selenocysteine
  MOD_RES (177)..(177): Selenocysteine
  MOD_RES (191)..(191): Selenocysteine
  MOD_RES (197)..(197): Selenocysteine
  MOD_RES (210)..(210): Selenocysteine
  MOD_RES (233)..(233): Selenocysteine
  MOD_RES (270)..(270): Selenocysteine
  MOD_RES (278)..(278): Selenocysteine
  MOD_RES (285)..(285): Selenocysteine
  MOD_RES (330)..(331): Selenocysteine
  MOD_RES (343)..(343): Selenocysteine
  MOD_RES (345)..(345): Selenocysteine
  MOD_RES (358)..(359): Selenocysteine
  MOD_RES (369)..(369): Selenocysteine
  MOD_RES (392)..(392): Selenocysteine
  MOD_RES (407)..(407): Selenocysteine
  MOD_RES (423)..(423): Selenocysteine
  MOD_RES (437)..(437): Selenocysteine
  MOD_RES (489)..(489): Selenocysteine
  MOD_RES (508)..(508): Selenocysteine
  MOD_RES (567)..(567): Selenocysteine
  MOD_RES (578)..(578): Selenocysteine
  MOD_RES (585)..(585): Selenocysteine
  MOD_RES (653)..(653): Selenocysteine
  MOD_RES (683)..(683): Selenocysteine
  MOD_RES (697)..(697): Selenocysteine
  MOD_RES (699)..(699): Selenocysteine
  MOD_RES (740)..(740): Selenocysteine
  MOD_RES (820)..(820): Selenocysteine
  MOD_RES (894)..(894): Selenocysteine
  MOD_RES (959)..(959): Selenocysteine
  MOD_RES (964)..(964): Selenocysteine
  MOD_RES (988)..(988): Selenocysteine
MSRRKQSNPRQIKRSLGDMEAREEVQLVGASHMEQKAXAPEAPSPPSADVNSPPPLPPPXSPGGPKELEGQEPEPRPXEEEPGSPWSGPDELEPVVQDGQRRIRARLSLAXGLSWGPFHGSVQXRASSPRQAEPSPALXLLLVDEACWLRXLPQALXEAEANXEIHRKDDALWCRVXKPVPAGGLLSVLLXAEPHSXPGHPVKKEPAEPXCPAPAHDLQLLPQQAGMASILAXAVINKDVFPCKDCGIWYRSERNLQAHLLYYCASRQGXGSPAAAAXDEKPKEXYPNERVCPFPQCRKSCPSASSLEIHMRSHSGERPFVCLICLSAFXXKANCERHLKVHXDXLSGVCHSCGFISXXRDILYSHLVXNHMVCQPGSKGEIYSPGAGHPAXKLPPDSLGSFQQQHXALQGPLASADLGLAPXPSPGLDRKALAEAXNGEARAEPLAQNGGSSEPPAAPRSIKVEAVEEPEAAPILGPGEPGPQAPSRXPSPRSPAPARVKAELSSPXPGSSPVPGELGLAGALFLPQYVFGPDAAPPASEILAKMSELVHSRLQQGAGAGAGGAQXGLFPGAPKGAXCFECEIXFSNVNNYYVHKRLYCSGRRAPEDAPAARRPKAPPGPARAPPGQPAEPDAPRSSPGPGAREEGAGGAAXPEDGAGGRGSEGSQSPGSSVDDAEDDPSRXLCEACNIRFSRHEXYXVHKRYYCASRHDPPPRRPAAPPGPPGPAAPPAPSPAAPVRXRRRRKLYELHAAGAPPPPPPGHAPAPESPRPGSGSGSGPGLAPARSPGPAADGPIDLSKKPRRPLPGAPAPALADYHECXACRVSFHSLEAYLAHKKYSCPAAPPPGALGLPAAACPYCPPNGPVRGDLLEHFRLAHGLLLGAPLAGPGVEARXPADRGPSPAPAPAASPQPGSRGPRDGLGPEPQEPPPGPPPSPAAAPEAVPPPPAPPSYSDKGVQXPSKGXPAPLPNGNHRYCRLCNIKFSSLSXFIAHKKYYCSSHAAEHVK

SEQ ID NO: 30232 - protein, 26 aa, Homo sapiens
  MOD_RES (10)..(10): Selenocysteine
  MOD_RES (19)..(19): Selenocysteine
MDLNNNSLKXKAQVPMVLXAGPKWLL

SEQ ID NO: 30233 - protein, 1019 aa, Homo sapiens
  MOD_RES (10)..(10): Selenocysteine
  MOD_RES (19)..(19): Selenocysteine
  MOD_RES (29)..(29): Selenocysteine
  MOD_RES (52)..(54): Selenocysteine
  MOD_RES (81)..(81): Selenocysteine
  MOD_RES (83)..(83): Selenocysteine
  MOD_RES (110)..(110): Selenocysteine
  MOD_RES (172)..(172): Selenocysteine
  MOD_RES (206)..(206): Selenocysteine
  MOD_RES (211)..(211): Selenocysteine
  MOD_RES (227)..(227): Selenocysteine
  MOD_RES (242)..(242): Selenocysteine
  MOD_RES (272)..(272): Selenocysteine
  MOD_RES (280)..(280): Selenocysteine
  MOD_RES (284)..(284): Selenocysteine
  MOD_RES (297)..(297): Selenocysteine
  MOD_RES (304)..(304): Selenocysteine
  MOD_RES (313)..(313): Selenocysteine
  MOD_RES (318)..(318): Selenocysteine
  MOD_RES (327)..(328): Selenocysteine
  MOD_RES (336)..(336): Selenocysteine
  MOD_RES (376)..(376): Selenocysteine
  MOD_RES (417)..(417): Selenocysteine
  MOD_RES (424)..(424): Selenocysteine
  MOD_RES (467)..(467): Selenocysteine
  MOD_RES (470)..(470): Selenocysteine
  MOD_RES (491)..(491): Selenocysteine
  MOD_RES (498)..(498): Selenocysteine
  MOD_RES (516)..(516): Selenocysteine
  MOD_RES (518)..(518): Selenocysteine
  MOD_RES (523)..(523): Selenocysteine
  MOD_RES (555)..(556): Selenocysteine
  MOD_RES (563)..(563): Selenocysteine
  MOD_RES (569)..(569): Selenocysteine
  MOD_RES (580)..(580): Selenocysteine
  MOD_RES (600)..(600): Selenocysteine
  MOD_RES (603)..(603): Selenocysteine
  MOD_RES (639)..(639): Selenocysteine
  MOD_RES (641)..(641): Selenocysteine
  MOD_RES (645)..(645): Selenocysteine
  MOD_RES (669)..(669): Selenocysteine
  MOD_RES (672)..(672): Selenocysteine
  MOD_RES (684)..(685): Selenocysteine
  MOD_RES (711)..(713): Selenocysteine
  MOD_RES (725)..(725): Selenocysteine
  MOD_RES (748)..(748): Selenocysteine
  MOD_RES (806)..(806): Selenocysteine
  MOD_RES (822)..(822): Selenocysteine
  MOD_RES (870)..(870): Selenocysteine
  MOD_RES (984)..(984): Selenocysteine
  MOD_RES (1004)..(1004): Selenocysteine
MDLNNNSLKXKAQVPMVLXAGPKWLLDVXWQGVEDNKNNCIVYSKGGQLWCXXXKAISEGEELIAFVVDFDSRLQAASQMXLXEGMYPARLLDSIQLLPQQAAMASILPXAIVNKDIFPCKSCGIWYRSERNLQAHLMYYCSGRQREAAPVSEENEDSAHQISSLCPFPQCXKSFSNARALEMHLNSHSGVKMEEFLPPGASLKCXVCSYXADSVINFHQHLFSHLXQAAFRCNHCHFGFQXQRELLQHQELHVPSGKLPRESDMEHSPSAXEDSLQPAXDLLXRSELPQSQKAMQXKDASSDXELDKCEKKXQLFLXNQRPEIQPXXNKQSFSYXKIKSEPSSPRLASSPVQPNIGPSFPVGPFLSQFSFPQDIXMVPQASEILAKMSELVHRRLRHGSSSYPPVIYSPLMPKGAXCFECNIXFNNLDNYLVHKKHYCSSRWQQMAKSPEFPSVSEKMPEALSPNXGQXSINLLNPAAHSADPENPLLQXSCINSSXVLDLIGPNGKGHDKDFSXQXKKLSXSSNNDDKINGKPVDVKNPSVPLVDGESDPNKXXCEACNIXFSRHEXYMVHKQYYCAXRHDPPLKRSASNKVPAMQRXMRXRKRRKMYEMCLPEQEQRPPLVQQRFLDVANLNNPCXSXQEPXEGLGECYHPRCDIFPGIVSKHLEXSLXINKCVPVSKCDXXHSSVSCLEMDVPIDLSKKCLSQSERXXXSPKRLLDYHECXVCKISFNKVENYLAHKQNFCPVXAHQRNDLGQLDGKVFPNPESERNSPDVSYERSIIKCEKNGNLKQPSPNGNLFSSHLAXLQGLKVFSEAAQLIAXKEENRHLFLPQCLYPGAIKKAKGADQLSPYYGIKPSDYISGSLVIHNXDIEQSRNAENESPKGQASSNGCAALKKDSLPLLPKNRGMVIVNGGLKQDERPAANPQQENISQNPQHEDDHKSPSWISENPLAANENVSPGIPSAEEQLSSIAKGVNGSSQAPXSGKYCRLCDIQFNNLSNFIXHKKFYCSSHAAEHVK

SEQ ID NO: 30234 - protein, 1151 aa, Homo sapiens
  MOD_RES (32)..(32): Selenocysteine
  MOD_RES (48)..(48): Selenocysteine
  MOD_RES (75)..(75): Selenocysteine
  MOD_RES (82)..(82): Selenocysteine
  MOD_RES (94)..(94): Selenocysteine
  MOD_RES (124)..(125): Selenocysteine
  MOD_RES (142)..(142): Selenocysteine
  MOD_RES (151)..(151): Selenocysteine
  MOD_RES (161)..(161): Selenocysteine
  MOD_RES (184)..(186): Selenocysteine
  MOD_RES (213)..(213): Selenocysteine
  MOD_RES (215)..(215): Selenocysteine
  MOD_RES (242)..(242): Selenocysteine
  MOD_RES (304)..(304): Selenocysteine
  MOD_RES (338)..(338): Selenocysteine
  MOD_RES (343)..(343): Selenocysteine
  MOD_RES (359)..(359): Selenocysteine
  MOD_RES (374)..(374): Selenocysteine
  MOD_RES (404)..(404): Selenocysteine
  MOD_RES (412)..(412): Selenocysteine
  MOD_RES (416)..(416): Selenocysteine
  MOD_RES (429)..(429): Selenocysteine
  MOD_RES (436)..(436): Selenocysteine
  MOD_RES (445)..(445): Selenocysteine
  MOD_RES (450)..(450): Selenocysteine
  MOD_RES (459)..(460): Selenocysteine
  MOD_RES (468)..(468): Selenocysteine
  MOD_RES (508)..(508): Selenocysteine
  MOD_RES (549)..(549): Selenocysteine
  MOD_RES (556)..(556): Selenocysteine
  MOD_RES (599)..(599): Selenocysteine
  MOD_RES (602)..(602): Selenocysteine
  MOD_RES (623)..(623): Selenocysteine
  MOD_RES (630)..(630): Selenocysteine
  MOD_RES (648)..(648): Selenocysteine
  MOD_RES (650)..(650): Selenocysteine
  MOD_RES (655)..(655): Selenocysteine
  MOD_RES (687)..(688): Selenocysteine
  MOD_RES (695)..(695): Selenocysteine
  MOD_RES (701)..(701): Selenocysteine
  MOD_RES (712)..(712): Selenocysteine
  MOD_RES (732)..(732): Selenocysteine
  MOD_RES (735)..(735): Selenocysteine
  MOD_RES (771)..(771): Selenocysteine
  MOD_RES (773)..(773): Selenocysteine
  MOD_RES (777)..(777): Selenocysteine
  MOD_RES (801)..(801): Selenocysteine
  MOD_RES (804)..(804): Selenocysteine
  MOD_RES (816)..(817): Selenocysteine
  MOD_RES (843)..(845): Selenocysteine
  MOD_RES (857)..(857): Selenocysteine
  MOD_RES (880)..(880): Selenocysteine
  MOD_RES (938)..(938): Selenocysteine
  MOD_RES (954)..(954): Selenocysteine
  MOD_RES (1002)..(1002): Selenocysteine
  MOD_RES (1116)..(1116): Selenocysteine
  MOD_RES (1136)..(1136): Selenocysteine
MSRRKQSKPRQIKRPLEDAIEDEEEECPSEEXDIISKGDFPLEESFSXEFGPENLSCEEVEYFCNKGDDEGIQEXAESDGDXQSEKPGQPGVEXDDWDGPGELEVFQKDGERKIQSRQQLPVGXXWGPFPGKMDLNNNSLKXKAQVPMVLXAGPKWLLDVXWQGVEDNKNNCIVYSKGGQLWCXXXKAISEGEELIAFVVDFDSRLQAASQMXLXEGMYPARLLDSIQLLPQQAAMASILPXAIVNKDIFPCKSCGIWYRSERNLQAHLMYYCSGRQREAAPVSEENEDSAHQISSLCPFPQCXKSFSNARALEMHLNSHSGVKMEEFLPPGASLKCXVCSYXADSVINFHQHLFSHLXQAAFRCNHCHFGFQXQRELLQHQELHVPSGKLPRESDMEHSPSAXEDSLQPAXDLLXRSELPQSQKAMQXKDASSDXELDKCEKKXQLFLXNQRPEIQPXXNKQSFSYXKIKSEPSSPRLASSPVQPNIGPSFPVGPFLSQFSFPQDIXMVPQASEILAKMSELVHRRLRHGSSSYPPVIYSPLMPKGAXCFECNIXFNNLDNYLVHKKHYCSSRWQQMAKSPEFPSVSEKMPEALSPNXGQXSINLLNPAAHSADPENPLLQXSCINSSXVLDLIGPNGKGHDKDFSXQXKKLSXSSNNDDKINGKPVDVKNPSVPLVDGESDPNKXXCEACNIXFSRHEXYMVHKQYYCAXRHDPPLKRSASNKVPAMQRXMRXRKRRKMYEMCLPEQEQRPPLVQQRFLDVANLNNPCXSXQEPXEGLGECYHPRCDIFPGIVSKHLEXSLXINKCVPVSKCDXXHSSVSCLEMDVPIDLSKKCLSQSERXXXSPKRLLDYHECXVCKISFNKVENYLAHKQNFCPVXAHQRNDLGQLDGKVFPNPESERNSPDVSYERSIIKCEKNGNLKQPSPNGNLFSSHLAXLQGLKVFSEAAQLIAXKEENRHLFLPQCLYPGAIKKAKGADQLSPYYGIKPSDYISGSLVIHNXDIEQSRNAENESPKGQASSNGCAALKKDSLPLLPKNRGMVIVNGGLKQDERPAANPQQENISQNPQHEDDHKSPSWISENPLAANENVSPGIPSAEEQLSSIAKGVNGSSQAPXSGKYCRLCDIQFNNLSNFIXHKKFYCSSHAAEHVK

SEQ ID NO: 30235 - protein, 844 aa, Homo sapiens
  MOD_RES (19)..(19): Selenocysteine
  MOD_RES (31)..(31): Selenocysteine
  MOD_RES (38)..(38): Selenocysteine
  MOD_RES (40)..(40): Selenocysteine
  MOD_RES (55)..(55): Selenocysteine
  MOD_RES (58)..(58): Selenocysteine
  MOD_RES (63)..(63): Selenocysteine
  MOD_RES (77)..(77): Selenocysteine
  MOD_RES (89)..(89): Selenocysteine
  MOD_RES (129)..(129): Selenocysteine
  MOD_RES (142)..(142): Selenocysteine
  MOD_RES (151)..(151): Selenocysteine
  MOD_RES (162)..(162): Selenocysteine
  MOD_RES (174)..(174): Selenocysteine
  MOD_RES (207)..(207): Selenocysteine
  MOD_RES (211)..(212): Selenocysteine
  MOD_RES (270)..(270): Selenocysteine
  MOD_RES (273)..(273): Selenocysteine
  MOD_RES (285)..(285): Selenocysteine
  MOD_RES (307)..(307): Selenocysteine
  MOD_RES (341)..(341): Selenocysteine
  MOD_RES (393)..(393): Selenocysteine
  MOD_RES (416)..(416): Selenocysteine
  MOD_RES (450)..(450): Selenocysteine
  MOD_RES (462)..(462): Selenocysteine
  MOD_RES (498)..(498): Selenocysteine
  MOD_RES (503)..(504): Selenocysteine
  MOD_RES (520)..(520): Selenocysteine
  MOD_RES (544)..(544): Selenocysteine
  MOD_RES (567)..(567): Selenocysteine
  MOD_RES (610)..(610): Selenocysteine
  MOD_RES (632)..(632): Selenocysteine
  MOD_RES (636)..(636): Selenocysteine
  MOD_RES (652)..(652): Selenocysteine
  MOD_RES (656)..(656): Selenocysteine
  MOD_RES (671)..(671): Selenocysteine
  MOD_RES (696)..(696): Selenocysteine
  MOD_RES (753)..(753): Selenocysteine
  MOD_RES (779)..(779): Selenocysteine
  MOD_RES (795)..(796): Selenocysteine
  MOD_RES (810)..(810): Selenocysteine
MDEDGLELQQEPNSFFDAXDRVSFCHPGWSXVAPSGSXAXSASQAQVICSASRVXGAXGADGXHMDGDQIVVEVQEXVFVSDVVDSDIXVHNFVPDDPDSVVIQDVIEDVVIEDVQCPDIMEEADVSEXVIIPEQVLDSDVXEEVSLAHCXVPDDVLASDIXSASMSMPEHVLXGDSIHVSDVGHVGHVGHVEHVVHDSVVEAEIVXDPLXXDVVSEEVLVADCASEAVIDANGIPVDQQDDDKGNCEDYLMISLDDAGKIEHDGSSGMXMDXESEIDPCKVDGXCPEVIKVYIFKADPGEDDLGGXVDIVESEPENDHGVELLDQNSSIRVPREKMVYMXVNDSQPEDEDLNVAEIADEVYMEVIVGEEDAAAAAAAAAVHEQQMDDNEIKXFMPIAWAAAYGNNSDGIENRNGXASALLHIDESAGLGRLAKQKPKKRRRPDSRQYQXAIIIGPDGHPLXVYPCMICGKKFKSRGFLKRHMKNHPEHLAKKKYRCXDCDYXXNKKISLHNHLESHKLXSKAEKAIECDECGKHFSHAGALFXHKMVHKEKGANKMHKCKFCEYEXAEQGLLNRHLLAVHSKNFPHICVECGKGFRHPSELKKHMRIHXGEKPYQCQYCEYRSADSSNLKXHVKXKHSKEMPFKCDICLLXFSDXKEVQQHALIHQESKXHQCLHCDHKSSNSSDLKRHIISVHXKDYPHKCDMCDKGFHRPSELKKHVAAHKGKKMHQCRHCDFKIADPFVLSRHILSVHXKDLPFRCKRCRKGFRQQSELKKHMKXHSGRKVYQCEYCEYSXXDASGFKRHVISIHXKDYPHRCEYCKKGFRRPSEKNQHIMRHHKEVGLP

SEQ ID NO: 30236 - protein, 32 aa, Homo sapiens
  MOD_RES (19)..(19): Selenocysteine
  MOD_RES (24)..(24): Selenocysteine
MDEDGLELQQEPNSFFDAXGADGXHMDGDQIV

SEQ ID NO: 30237 - protein, 135 aa, Homo sapiens
  MOD_RES (19)..(19): Selenocysteine
  MOD_RES (24)..(24): Selenocysteine
  MOD_RES (38)..(38): Selenocysteine
  MOD_RES (50)..(50): Selenocysteine
  MOD_RES (90)..(90): Selenocysteine
  MOD_RES (103)..(103): Selenocysteine
  MOD_RES (112)..(112): Selenocysteine
  MOD_RES (123)..(123): Selenocysteine
  MOD_RES (135)..(135): Selenocysteine
MDEDGLELQQEPNSFFDAXGADGXHMDGDQIVVEVQEXVFVSDVVDSDIXVHNFVPDDPDSVVIQDVIEDVVIEDVQCPDIMEEADVSEXVIIPEQVLDSDVXEEVSLAHCXVPDDVLASDIXSASMSMPEHVLX

SEQ ID NO: 30238 - protein, 755 aa, Homo sapiens
  MOD_RES (19)..(19): Selenocysteine
  MOD_RES (24)..(24): Selenocysteine
  MOD_RES (38)..(38): Selenocysteine
  MOD_RES (50)..(50): Selenocysteine
  MOD_RES (90)..(90): Selenocysteine
  MOD_RES (103)..(103): Selenocysteine
  MOD_RES (112)..(112): Selenocysteine
  MOD_RES (123)..(123): Selenocysteine
  MOD_RES (135)..(135): Selenocysteine
  MOD_RES (168)..(168): Selenocysteine
  MOD_RES (172)..(173): Selenocysteine
  MOD_RES (218)..(218): Selenocysteine
  MOD_RES (252)..(252): Selenocysteine
  MOD_RES (304)..(304): Selenocysteine
  MOD_RES (327)..(327): Selenocysteine
  MOD_RES (361)..(361): Selenocysteine
  MOD_RES (373)..(373): Selenocysteine
  MOD_RES (409)..(409): Selenocysteine
  MOD_RES (414)..(415): Selenocysteine
  MOD_RES (431)..(431): Selenocysteine
  MOD_RES (455)..(455): Selenocysteine
  MOD_RES (478)..(478): Selenocysteine
  MOD_RES (521)..(521): Selenocysteine
  MOD_RES (543)..(543): Selenocysteine
  MOD_RES (547)..(547): Selenocysteine
  MOD_RES (563)..(563): Selenocysteine
  MOD_RES (567)..(567): Selenocysteine
  MOD_RES (582)..(582): Selenocysteine
  MOD_RES (607)..(607): Selenocysteine
  MOD_RES (664)..(664): Selenocysteine
  MOD_RES (690)..(690): Selenocysteine
  MOD_RES (706)..(707): Selenocysteine
  MOD_RES (721)..(721): Selenocysteine
MDEDGLELQQEPNSFFDAXGADGXHMDGDQIVVEVQEXVFVSDVVDSDIXVHNFVPDDPDSVVIQDVIEDVVIEDVQCPDIMEEADVSEXVIIPEQVLDSDVXEEVSLAHCXVPDDVLASDIXSASMSMPEHVLXGDSIHVSDVGHVGHVGHVEHVVHDSVVEAEIVXDPLXXDVVSEEVLVADCASEAVIDANGIPVDQQDDDKGNCEDYLMISCGXVDIVESEPENDHGVELLDQNSSIRVPREKMVYMXVNDSQPEDEDLNVAEIADEVYMEVIVGEEDAAAAAAAAAVHEQQMDDNEIKXFMPIAWAAAYGNNSDGIENRNGXASALLHIDESAGLGRLAKQKPKKRRRPDSRQYQXAIIIGPDGHPLXVYPCMICGKKFKSRGFLKRHMKNHPEHLAKKKYRCXDCDYXXNKKISLHNHLESHKLXSKAEKAIECDECGKHFSHAGALFXHKMVHKEKGANKMHKCKFCEYEXAEQGLLNRHLLAVHSKNFPHICVECGKGFRHPSELKKHMRIHXGEKPYQCQYCEYRSADSSNLKXHVKXKHSKEMPFKCDICLLXFSDXKEVQQHALIHQESKXHQCLHCDHKSSNSSDLKRHIISVHXKDYPHKCDMCDKGFHRPSELKKHVAAHKGKKMHQCRHCDFKIADPFVLSRHILSVHXKDLPFRCKRCRKGFRQQSELKKHMKXHSGRKVYQCEYCEYSXXDASGFKRHVISIHXKDYPHRCEYCKKGFRRPSEKNQHIMRHHKEVGLP

SEQ ID NO: 30239 - protein, 805 aa, Homo sapiens
  MOD_RES (19)..(19): Selenocysteine
  MOD_RES (24)..(24): Selenocysteine
  MOD_RES (38)..(38): Selenocysteine
  MOD_RES (50)..(50): Selenocysteine
  MOD_RES (90)..(90): Selenocysteine
  MOD_RES (103)..(103): Selenocysteine
  MOD_RES (112)..(112): Selenocysteine
  MOD_RES (123)..(123): Selenocysteine
  MOD_RES (135)..(135): Selenocysteine
  MOD_RES (168)..(168): Selenocysteine
  MOD_RES (172)..(173): Selenocysteine
  MOD_RES (231)..(231): Selenocysteine
  MOD_RES (234)..(234): Selenocysteine
  MOD_RES (246)..(246): Selenocysteine
  MOD_RES (268)..(268): Selenocysteine
  MOD_RES (302)..(302): Selenocysteine
  MOD_RES (354)..(354): Selenocysteine
  MOD_RES (377)..(377): Selenocysteine
  MOD_RES (411)..(411): Selenocysteine
  MOD_RES (423)..(423): Selenocysteine
  MOD_RES (459)..(459): Selenocysteine
  MOD_RES (464)..(465): Selenocysteine
  MOD_RES (481)..(481): Selenocysteine
  MOD_RES (505)..(505): Selenocysteine
  MOD_RES (528)..(528): Selenocysteine
  MOD_RES (571)..(571): Selenocysteine
  MOD_RES (593)..(593): Selenocysteine
  MOD_RES (597)..(597): Selenocysteine
  MOD_RES (613)..(613): Selenocysteine
  MOD_RES (617)..(617): Selenocysteine
  MOD_RES (632)..(632): Selenocysteine
  MOD_RES (657)..(657): Selenocysteine
  MOD_RES (714)..(714): Selenocysteine
  MOD_RES (740)..(740): Selenocysteine
  MOD_RES (756)..(757): Selenocysteine
  MOD_RES (771)..(771): Selenocysteine
MDEDGLELQQEPNSFFDAXGADGXHMDGDQIVVEVQEXVFVSDVVDSDIXVHNFVPDDPDSVVIQDVIEDVVIEDVQCPDIMEEADVSEXVIIPEQVLDSDVXEEVSLAHCXVPDDVLASDIXSASMSMPEHVLXGDSIHVSDVGHVGHVGHVEHVVHDSVVEAEIVXDPLXXDVVSEEVLVADCASEAVIDANGIPVDQQDDDKGNCEDYLMISLDDAGKIEHDGSSGMXMDXESEIDPCKVDGXCPEVIKVYIFKADPGEDDLGGXVDIVESEPENDHGVELLDQNSSIRVPREKMVYMXVNDSQPEDEDLNVAEIADEVYMEVIVGEEDAAAAAAAAAVHEQQMDDNEIKXFMPIAWAAAYGNNSDGIENRNGXASALLHIDESAGLGRLAKQKPKKRRRPDSRQYQXAIIIGPDGHPLXVYPCMICGKKFKSRGFLKRHMKNHPEHLAKKKYRCXDCDYXXNKKISLHNHLESHKLXSKAEKAIECDECGKHFSHAGALFXHKMVHKEKGANKMHKCKFCEYEXAEQGLLNRHLLAVHSKNFPHICVECGKGFRHPSELKKHMRIHXGEKPYQCQYCEYRSADSSNLKXHVKXKHSKEMPFKCDICLLXFSDXKEVQQHALIHQESKXHQCLHCDHKSSNSSDLKRHIISVHXKDYPHKCDMCDKGFHRPSELKKHVAAHKGKKMHQCRHCDFKIADPFVLSRHILSVHXKDLPFRCKRCRKGFRQQSELKKHMKXHSGRKVYQCEYCEYSXXDASGFKRHVISIHXKDYPHRCEYCKKGFRRPSEKNQHIMRHHKEVGLP

SEQ ID NO: 30240 - protein, 576 aa, Homo sapiens
  MOD_RES (2)..(2): Selenocysteine
  MOD_RES (5)..(5): Selenocysteine
  MOD_RES (17)..(17): Selenocysteine
  MOD_RES (39)..(39): Selenocysteine
  MOD_RES (73)..(73): Selenocysteine
  MOD_RES (125)..(125): Selenocysteine
  MOD_RES (148)..(148): Selenocysteine
  MOD_RES (182)..(182): Selenocysteine
  MOD_RES (194)..(194): Selenocysteine
  MOD_RES (230)..(230): Selenocysteine
  MOD_RES (235)..(236): Selenocysteine
  MOD_RES (252)..(252): Selenocysteine
  MOD_RES (276)..(276): Selenocysteine
  MOD_RES (299)..(299): Selenocysteine
  MOD_RES (342)..(342): Selenocysteine
  MOD_RES (364)..(364): Selenocysteine
  MOD_RES (368)..(368): Selenocysteine
  MOD_RES (384)..(384): Selenocysteine
  MOD_RES (388)..(388): Selenocysteine
  MOD_RES (403)..(403): Selenocysteine
  MOD_RES (428)..(428): Selenocysteine
  MOD_RES (485)..(485): Selenocysteine
  MOD_RES (511)..(511): Selenocysteine
  MOD_RES (527)..(528): Selenocysteine
  MOD_RES (542)..(542): Selenocysteine
MXMDXESEIDPCKVDGXCPEVIKVYIFKADPGEDDLGGXVDIVESEPENDHGVELLDQNSSIRVPREKMVYMXVNDSQPEDEDLNVAEIADEVYMEVIVGEEDAAAAAAAAAVHEQQMDDNEIKXFMPIAWAAAYGNNSDGIENRNGXASALLHIDESAGLGRLAKQKPKKRRRPDSRQYQXAIIIGPDGHPLXVYPCMICGKKFKSRGFLKRHMKNHPEHLAKKKYRCXDCDYXXNKKISLHNHLESHKLXSKAEKAIECDECGKHFSHAGALFXHKMVHKEKGANKMHKCKFCEYEXAEQGLLNRHLLAVHSKNFPHICVECGKGFRHPSELKKHMRIHXGEKPYQCQYCEYRSADSSNLKXHVKXKHSKEMPFKCDICLLXFSDXKEVQQHALIHQESKXHQCLHCDHKSSNSSDLKRHIISVHXKDYPHKCDMCDKGFHRPSELKKHVAAHKGKKMHQCRHCDFKIADPFVLSRHILSVHXKDLPFRCKRCRKGFRQQSELKKHMKXHSGRKVYQCEYCEYSXXDASGFKRHVISIHXKDYPHRCEYCKKGFRRPSEKNQHIMRHHKEVGLP

SEQ ID NO: 30241 - protein, 91 aa, Homo sapiens
  MOD_RES (25)..(25): Selenocysteine
  MOD_RES (51)..(51): Selenocysteine
MDEDEFELQPQEPNSFFDGIGADAXHMDGDQIVVEIQEAVFVSNIVDSDIXVHNFVPDDPDSVVIQDVVEDVVIEEDVQCSDILEEADVSE

SEQ ID NO: 30242 - protein, 801 aa, Homo sapiens
  MOD_RES (25)..(25): Selenocysteine
  MOD_RES (51)..(51): Selenocysteine
  MOD_RES (105)..(105): Selenocysteine
  MOD_RES (114)..(114): Selenocysteine
  MOD_RES (125)..(125): Selenocysteine
  MOD_RES (127)..(127): Selenocysteine
  MOD_RES (137)..(137): Selenocysteine
  MOD_RES (164)..(164): Selenocysteine
  MOD_RES (168)..(168): Selenocysteine
  MOD_RES (224)..(224): Selenocysteine
  MOD_RES (227)..(227): Selenocysteine
  MOD_RES (242)..(242): Selenocysteine
  MOD_RES (264)..(264): Selenocysteine
  MOD_RES (298)..(298): Selenocysteine
  MOD_RES (350)..(350): Selenocysteine
  MOD_RES (373)..(373): Selenocysteine
  MOD_RES (407)..(407): Selenocysteine
  MOD_RES (419)..(419): Selenocysteine
  MOD_RES (455)..(455): Selenocysteine
  MOD_RES (460)..(461): Selenocysteine
  MOD_RES (477)..(477): Selenocysteine
  MOD_RES (501)..(501): Selenocysteine
  MOD_RES (524)..(524): Selenocysteine
  MOD_RES (567)..(567): Selenocysteine
  MOD_RES (589)..(589): Selenocysteine
  MOD_RES (593)..(593): Selenocysteine
  MOD_RES (609)..(609): Selenocysteine
  MOD_RES (613)..(613): Selenocysteine
  MOD_RES (620)..(620): Selenocysteine
  MOD_RES (628)..(628): Selenocysteine
  MOD_RES (653)..(653): Selenocysteine
  MOD_RES (710)..(710): Selenocysteine
  MOD_RES (736)..(736): Selenocysteine
  MOD_RES (752)..(753): Selenocysteine
  MOD_RES (767)..(767): Selenocysteine
MDEDEFELQPQEPNSFFDGIGADAXHMDGDQIVVEIQEAVFVSNIVDSDIXVHNFVPDDPDSVVIQDVVEDVVIEEDVQCSDILEEADVSENVIIPEQVLDSDVXEEVSLPHCXVPDDVLASDIXSXSMSMPEHVLXSESMHVCDIGHVEHMVHDSVVEAEIIXDPLXSDIVSEEVLVADCAPEAVIDASGISVDQQDNDKASCEDYLMISLDDAGKIEHDGSXGVXIDAESEMDPCKVDSXCPEVIKVYIFKADPGEDDLGGXVDIVESEPENDHGVELLDQNSSIRVPREKMVYMXVNDSQQEDEDLNVAEIADEVYMEVIVGEEDAAVAAAAAAVHEQQIDEDEMKXFVPIAWAAAYGNNSDGIENRNGXASALLHIDESAGLGRLAKQKPKKKRRPDSRQYQXAIIIGPDGHPLXVYPCMICGKKFKSRGFLKRHMKNHPEHLAKKKYHCXDCDYXXNKKISLHNHLESHKLXSKAEKAIECDECGKHFSHAGALFXHKMVHKEKGANKMHKCKFCEYEXAEQGLLNRHLLAVHSKNFPHICVECGKGFRHPSELRKHMRIHXGEKPYQCQYCEYRSADSSNLKXHIKXKHSKEMPFKCDICLLXFSDXKEVQQHXLVHQESKXHQCLHCDHKSSNSSDLKRHVISVHXKDYPHKCEMCEKGFHRPSELKKHVAVHKGKKMHQCRHCDFKIADPFVLSRHILSVHXKDLPFRCKRCRKGFRQQNELKKHMKXHSGRKVYQCEYCEYSXXDASGFKRHVISIHXKDYPHRCEYCKKGFRRPSEKNQHIMRHHKEVGLP

SEQ ID NO: 30243 - protein, 610 aa, Homo sapiens
  MOD_RES (33)..(33): Selenocysteine
  MOD_RES (36)..(36): Selenocysteine
  MOD_RES (51)..(51): Selenocysteine
  MOD_RES (73)..(73): Selenocysteine
  MOD_RES (107)..(107): Selenocysteine
  MOD_RES (159)..(159): Selenocysteine
  MOD_RES (182)..(182): Selenocysteine
  MOD_RES (216)..(216): Selenocysteine
  MOD_RES (228)..(228): Selenocysteine
  MOD_RES (264)..(264): Selenocysteine
  MOD_RES (269)..(270): Selenocysteine
  MOD_RES (286)..(286): Selenocysteine
  MOD_RES (310)..(310): Selenocysteine
  MOD_RES (333)..(333): Selenocysteine
  MOD_RES (376)..(376): Selenocysteine
  MOD_RES (398)..(398): Selenocysteine
  MOD_RES (402)..(402): Selenocysteine
  MOD_RES (418)..(418): Selenocysteine
  MOD_RES (422)..(422): Selenocysteine
  MOD_RES (429)..(429): Selenocysteine
  MOD_RES (437)..(437): Selenocysteine
  MOD_RES (462)..(462): Selenocysteine
  MOD_RES (519)..(519): Selenocysteine
  MOD_RES (545)..(545): Selenocysteine
  MOD_RES (561)..(562): Selenocysteine
  MOD_RES (576)..(576): Selenocysteine
MDEDEFELQPQEPNSFFDGIVDDAGKIEHDGSXGVXIDAESEMDPCKVDSXCPEVIKVYIFKADPGEDDLGGXVDIVESEPENDHGVELLDQNSSIRVPREKMVYMXVNDSQQEDEDLNVAEIADEVYMEVIVGEEDAAVAAAAAAVHEQQIDEDEMKXFVPIAWAAAYGNNSDGIENRNGXASALLHIDESAGLGRLAKQKPKKKRRPDSRQYQXAIIIGPDGHPLXVYPCMICGKKFKSRGFLKRHMKNHPEHLAKKKYHCXDCDYXXNKKISLHNHLESHKLXSKAEKAIECDECGKHFSHAGALFXHKMVHKEKGANKMHKCKFCEYEXAEQGLLNRHLLAVHSKNFPHICVECGKGFRHPSELRKHMRIHXGEKPYQCQYCEYRSADSSNLKXHIKXKHSKEMPFKCDICLLXFSDXKEVQQHXLVHQESKXHQCLHCDHKSSNSSDLKRHVISVHXKDYPHKCEMCEKGFHRPSELKKHVAVHKGKKMHQCRHCDFKIADPFVLSRHILSVHXKDLPFRCKRCRKGFRQQNELKKHMKXHSGRKVYQCEYCEYSXXDASGFKRHVISIHXKDYPHRCEYCKKGFRRPSEKNQHIMRHHKEVGLP

SEQ ID NO: 30244 - protein, 724 aa, Homo sapiens
  MOD_RES (25)..(25): Selenocysteine
  MOD_RES (79)..(79): Selenocysteine
  MOD_RES (88)..(88): Selenocysteine
  MOD_RES (99)..(99): Selenocysteine
  MOD_RES (101)..(101): Selenocysteine
  MOD_RES (111)..(111): Selenocysteine
  MOD_RES (138)..(138): Selenocysteine
  MOD_RES (142)..(142): Selenocysteine
  MOD_RES (198)..(198): Selenocysteine
  MOD_RES (201)..(201): Selenocysteine
  MOD_RES (216)..(216): Selenocysteine
  MOD_RES (238)..(238): Selenocysteine
  MOD_RES (272)..(272): Selenocysteine
  MOD_RES (296)..(296): Selenocysteine
  MOD_RES (330)..(330): Selenocysteine
  MOD_RES (342)..(342): Selenocysteine
  MOD_RES (378)..(378): Selenocysteine
  MOD_RES (383)..(384): Selenocysteine
  MOD_RES (400)..(400): Selenocysteine
  MOD_RES (424)..(424): Selenocysteine
  MOD_RES (447)..(447): Selenocysteine
  MOD_RES (490)..(490): Selenocysteine
  MOD_RES (512)..(512): Selenocysteine
  MOD_RES (516)..(516): Selenocysteine
  MOD_RES (532)..(532): Selenocysteine
  MOD_RES (536)..(536): Selenocysteine
  MOD_RES (543)..(543): Selenocysteine
  MOD_RES (551)..(551): Selenocysteine
  MOD_RES (576)..(576): Selenocysteine
  MOD_RES (633)..(633): Selenocysteine
  MOD_RES (659)..(659): Selenocysteine
  MOD_RES (675)..(676): Selenocysteine
  MOD_RES (690)..(690): Selenocysteine
MDGDQIVVEIQEAVFVSNIVDSDIXVHNFVPDDPDSVVIQDVVEDVVIEEDVQCSDILEEADVSENVIIPEQVLDSDVXEEVSLPHCXVPDDVLASDIXSXSMSMPEHVLXSESMHVCDIGHVEHMVHDSVVEAEIIXDPLXSDIVSEEVLVADCAPEAVIDASGISVDQQDNDKASCEDYLMISLDDAGKIEHDGSXGVXIDAESEMDPCKVDSXCPEVIKVYIFKADPGEDDLGGXVDIVESEPENDHGVELLDQNSSIRVPREKMVYMXVNDSQQEDEDLSNNSDGIENRNGXASALLHIDESAGLGRLAKQKPKKKRRPDSRQYQXAIIIGPDGHPLXVYPCMICGKKFKSRGFLKRHMKNHPEHLAKKKYHCXDCDYXXNKKISLHNHLESHKLXSKAEKAIECDECGKHFSHAGALFXHKMVHKEKGANKMHKCKFCEYEXAEQGLLNRHLLAVHSKNFPHICVECGKGFRHPSELRKHMRIHXGEKPYQCQYCEYRSADSSNLKXHIKXKHSKEMPFKCDICLLXFSDXKEVQQHXLVHQESKXHQCLHCDHKSSNSSDLKRHVISVHXKDYPHKCEMCEKGFHRPSELKKHVAVHKGKKMHQCRHCDFKIADPFVLSRHILSVHXKDLPFRCKRCRKGFRQQNELKKHMKXHSGRKVYQCEYCEYSXXDASGFKRHVISIHXKDYPHRCEYCKKGFRRPSEKNQHIMRHHKEVGLP

SEQ ID NO: 30245 - protein, 1539 aa, Homo sapiens
  MOD_RES (53)..(53): Selenocysteine
  MOD_RES (71)..(71): Selenocysteine
  MOD_RES (75)..(75): Selenocysteine
  MOD_RES (84)..(84): Selenocysteine
  MOD_RES (89)..(89): Selenocysteine
  MOD_RES (98)..(98): Selenocysteine
  MOD_RES (110)..(110): Selenocysteine
  MOD_RES (140)..(140): Selenocysteine
  MOD_RES (172)..(172): Selenocysteine
  MOD_RES (178)..(178): Selenocysteine
  MOD_RES (184)..(184): Selenocysteine
  MOD_RES (213)..(214): Selenocysteine
  MOD_RES (224)..(224): Selenocysteine
  MOD_RES (249)..(249): Selenocysteine
  MOD_RES (288)..(288): Selenocysteine
  MOD_RES (299)..(299): Selenocysteine
  MOD_RES (303)..(303): Selenocysteine
  MOD_RES (336)..(336): Selenocysteine
  MOD_RES (412)..(412): Selenocysteine
  MOD_RES (461)..(461): Selenocysteine
  MOD_RES (473)..(473): Selenocysteine
  MOD_RES (476)..(476): Selenocysteine
  MOD_RES (487)..(487): Selenocysteine
  MOD_RES (502)..(502): Selenocysteine
  MOD_RES (538)..(538): Selenocysteine
  MOD_RES (544)..(545): Selenocysteine
  MOD_RES (604)..(604): Selenocysteine
  MOD_RES (616)..(616): Selenocysteine
  MOD_RES (625)..(625): Selenocysteine
  MOD_RES (631)..(631): Selenocysteine
  MOD_RES (659)..(659): Selenocysteine
  MOD_RES (673)..(673): Selenocysteine
  MOD_RES (680)..(680): Selenocysteine
  MOD_RES (683)..(683): Selenocysteine
  MOD_RES (688)..(688): Selenocysteine
  MOD_RES (694)..(694): Selenocysteine
  MOD_RES (720)..(720): Selenocysteine
  MOD_RES (730)..(730): Selenocysteine
  MOD_RES (743)..(743): Selenocysteine
  MOD_RES (761)..(761): Selenocysteine
  MOD_RES (763)..(763): Selenocysteine
  MOD_RES (803)..(803): Selenocysteine
  MOD_RES (817)..(817): Selenocysteine
  MOD_RES (830)..(831): Selenocysteine
  MOD_RES (840)..(840): Selenocysteine
  MOD_RES (848)..(848): Selenocysteine
  MOD_RES (885)..(886): Selenocysteine
  MOD_RES (909)..(909): Selenocysteine
  MOD_RES (912)..(912): Selenocysteine
  MOD_RES (919)..(920): Selenocysteine
  MOD_RES (928)..(928): Selenocysteine
  MOD_RES (932)..(932): Selenocysteine
  MOD_RES (954)..(954): Selenocysteine
  MOD_RES (961)..(961): Selenocysteine
  MOD_RES (966)..(966): Selenocysteine
  MOD_RES (975)..(975): Selenocysteine
  MOD_RES (982)..(982): Selenocysteine
  MOD_RES (1060)..(1060): Selenocysteine
  MOD_RES (1086)..(1086): Selenocysteine
  MOD_RES (1109)..(1109): Selenocysteine
  MOD_RES (1120)..(1120): Selenocysteine
  MOD_RES (1138)..(1138): Selenocysteine
  MOD_RES (1140)..(1140): Selenocysteine
  MOD_RES (1156)..(1156): Selenocysteine
  MOD_RES (1158)..(1158): Selenocysteine
  MOD_RES (1209)..(1209): Selenocysteine
  MOD_RES (1224)..(1224): Selenocysteine
  MOD_RES (1238)..(1238): Selenocysteine
  MOD_RES (1286)..(1286): Selenocysteine
  MOD_RES (1303)..(1303): Selenocysteine
  MOD_RES (1309)..(1309): Selenocysteine
  MOD_RES (1316)..(1316): Selenocysteine
  MOD_RES (1329)..(1329): Selenocysteine
  MOD_RES (1349)..(1349): Selenocysteine
  MOD_RES (1352)..(1352): Selenocysteine
  MOD_RES (1369)..(1369): Selenocysteine
  MOD_RES (1422)..(1422): Selenocysteine
  MOD_RES (1430)..(1430): Selenocysteine
  MOD_RES (1446)..(1446): Selenocysteine
  MOD_RES (1468)..(1468): Selenocysteine
  MOD_RES (1485)..(1485): Selenocysteine
  MOD_RES (1519)..(1519): Selenocysteine
MDSYFKAAVSDLDKLLDDFEQNPDEQDYLQDVQNAYDSNHCSVSSELASSQRXSLLPKDQECVNSCASSEXSYGXNESSLNEKXLKGLXSIQNEKNVXGLDLLSSVDGGXSDEIQPLYMGRCSKPICDLISDMGNLVHAXNSEEDIKKLLPDDFKSNADSLIGLDLSSVSDXPCVSSXDHDSDXVREQQNDISSELQNREIGGIKELGIKVDXXLSDSYNYSGXENLKDKKIFNQLESIVDFNMSSALXRQSSKMFHAKDKLQHKSQPCGLLKDVGLVKEEVDVAVIXAAECLKEEGKXSALXCSLPKNEDLCLNDSNSRDENFKLPDFSFQEDKXVIKQSAQEDSKSLDLKDNDVIQDSSSALHVSSKDVPSSLSCLPASGSMCGSLIESKARGDFLPQHEHKDNIQDAVXIHEEIQNSVVLGGEPFKENDLLKQEKCKSILLQSLIEGMEDRKIDPDQXVIRAESLDGGDXSSXVVESQEGLSGXHVPESSDCCEGFINXFSSNDMDGQDLDYFNIDEGAKSGPLISDAELDAFLXEQYLQXXNIKSFEENVNDSKSQMNQIDMKGLDDGNINNIYFNAEAGAIGESHGINIICEIVDKQNXIENGLSLGEKSXIPVQQGLPXSKSEIXNQLSVSDINSQSVGGARPKQLFSLPSRXRSSKDLNKPDVPDXIESEPSXADXVVPIXCAIDSXADPQVSFNSNYIDIESNSEGGSSFVXANEDSVPENXCKEGLVLGQKQPXWVPDSEAPNCMNCQVKFXFXKRRHHCRACGKVFCGVCCNRKCKLQYLEKEARVCVVCYEXISKAQAFERMMSPXGSNLKSNHSDECXXVQPPQENQXSSIPSPAXLPVSALKQPGVEGLCSKEQKRVWFADGILPNGEVADXXKLSSGSKRCSEDFSPLSPDVPMXVNXVDHSHSXXVEKPNNEXGDIXRNEIIQSPISQVPSVEKLSMNXGNEGLPXSGSFXLDDDVFAEXEEPSSPXGVLVNSNLPIASISDYRLLCDINKYVCNKISLLPNDEDSLPPLLVASGEKGSVPVVEEHPSHEQIILLLEGESFHPVXFVLNANLLVNVKFIFYSSDKYWYFSXNGLHGLGQAEIIILLLCLPNEDXIPKDIFRLFIXIYKDALKGKYIENLDNIXFXESFLSSKDHGGFLFIXPXFQKLDDLSLPSNPFLCGILIQKLEIPWAKVFPMRLMLRLGAEYKAYPAPLXSIRGRKPLFGEIGHXIMNLLVDLRNYQYXLHNIDQLLIHMEMGKSCIKIPRKKYSDVMKVLNSSNEHVISIGASFSXEADSHLVCIQNDGIYEXQANSAXGHPRKVXGASFVVFNGALKXSSGFLAKSSIVEDGLMVQIXPEXMNGLRLALREQKDFKIXCGKVDAVDLREYVDICWVDAEEKGNKGVISSVDGISLQGFPSEKIKLEADFEXDEKIVKCXEVFYFLKDQDLSILSXSYQFAKEIAMACSAALCPHLKXLKSNGMNKIGLRVSIDXDMVEFQAGSEGQLLPQHYLNDLDSALIPVIHGGXSNSSLPLEIELVFFIIEHLF

SEQ ID NO: 30246 - protein, 40 aa, Homo sapiens
  MOD_RES (22)..(22): Selenocysteine
MGRCSKPICDLISDMGNLVHAXNSEEDIKKLLPDDFKSNA

SEQ ID NO: 30247 - protein, 51 aa, Homo sapiens
  MOD_RES (1)..(1): Selenocysteine
  MOD_RES (14)..(15): Selenocysteine
  MOD_RES (24)..(24): Selenocysteine
  MOD_RES (32)..(32): Selenocysteine
XGSNLKSNHSDECXXVQPPQENQXSSIPSPAXLPVSALKQPGVEVPAIGKS

SEQ ID NO: 30248 - protein, 51 aa, Homo sapiens
  MOD_RES (1)..(1): Any amino acid
  MOD_RES (26)..(27): Selenocysteine
XGLCSKEQKRVWFADGILPNGEVADXXKLSSGSKRCSEDFSPLSPDVPMCL

SEQ ID NO: 30249 - protein, 37 aa, Homo sapiens
  MOD_RES (1)..(1): Any amino acid
  MOD_RES (7)..(7): Selenocysteine
XNGALKXSSGFLAKSSIVEELSVQWMEYHYKDFQVKK

SEQ ID NO: 30250 - protein, 311 aa, Homo sapiens
  MOD_RES (68)..(68): Selenocysteine
  MOD_RES (94)..(94): Selenocysteine
  MOD_RES (108)..(108): Selenocysteine
  MOD_RES (113)..(113): Selenocysteine
  MOD_RES (163)..(163): Selenocysteine
  MOD_RES (167)..(167): Selenocysteine
  MOD_RES (169)..(169): Selenocysteine
  MOD_RES (178)..(178): Selenocysteine
  MOD_RES (235)..(235): Selenocysteine
  MOD_RES (244)..(244): Selenocysteine
  MOD_RES (251)..(251): Selenocysteine
  MOD_RES (256)..(256): Selenocysteine
  MOD_RES (290)..(290): Selenocysteine
  MOD_RES (298)..(298): Selenocysteine
  MOD_RES (308)..(308): Selenocysteine
MISVPALLGYLQEVCRARLPDSELMRRKYHSVRQEDLQRGRLSRPEAVAEVKSFLIQLEAFLSRLCCXCEAAYRVLHWENPVVSSQFYGALLGXVCMLYLLPLCWVLXLLNSXLFLGNVEFFRVVSEYRASLQQRMNPKQEEHAFESPPPPDVGGKDGLMDSXPALXPXESLSSQDLXPGSVEEAEEAEPDEEFKDAIEEDDEGAPCPAEDELALQDNGFLSKNEVLRSKVSRLXERLRKRYPXNNFGNCXGCSAXFSVLKKRRSCSNCGNSFCSRCCSFKVPKSSMGAXAPEAQREXVFVCASCNQXLSK

SEQ ID NO: 30251 - protein, 372 aa, Homo sapiens
  MOD_RES (3)..(3): Selenocysteine
  MOD_RES (30)..(30): Selenocysteine
  MOD_RES (134)..(134): Selenocysteine
  MOD_RES (160)..(160): Selenocysteine
  MOD_RES (174)..(174): Selenocysteine
  MOD_RES (179)..(179): Selenocysteine
  MOD_RES (229)..(229): Selenocysteine
  MOD_RES (233)..(233): Selenocysteine
  MOD_RES (235)..(235): Selenocysteine
  MOD_RES (239)..(239): Selenocysteine
  MOD_RES (296)..(296): Selenocysteine
  MOD_RES (305)..(305): Selenocysteine
  MOD_RES (312)..(312): Selenocysteine
  MOD_RES (317)..(317): Selenocysteine
  MOD_RES (351)..(351): Selenocysteine
  MOD_RES (359)..(359): Selenocysteine
  MOD_RES (369)..(369): Selenocysteine
MQXSEREGSGPELSPSVMPEAPLESPPFPXKSPAFDLFNLVLSYKRLEIYLEPLKDAGAWYSVGALMISVPALLGYLQEVCRARLPDSELMRRKYHSVRQEDLQRGRLSRPEAVAEVKSFLIQLEAFLSRLCCXCEAAYRVLHWENPVVSSQFYGALLGXVCMLYLLPLCWVLXLLNSXLFLGNVEFFRVVSEYRASLQQRMNPKQEEHAFESPPPPDVGGKDGLMDSXPALXPXEDLXPGSVEEAEEAEPDEEFKDAIEEDDEGAPCPAEDELALQDNGFLSKNEVLRSKVSRLXERLRKRYPXNNFGNCXGCSAXFSVLKKRRSCSNCGNSFCSRCCSFKVPKSSMGAXAPEAQREXVFVCASCNQXLSK

SEQ ID NO: 30252 - protein, 286 aa, Homo sapiens
  MOD_RES (3)..(3): Selenocysteine
  MOD_RES (30)..(30): Selenocysteine
  MOD_RES (74)..(74): Selenocysteine
  MOD_RES (88)..(88): Selenocysteine
  MOD_RES (93)..(93): Selenocysteine
  MOD_RES (143)..(143): Selenocysteine
  MOD_RES (147)..(147): Selenocysteine
  MOD_RES (149)..(149): Selenocysteine
  MOD_RES (153)..(153): Selenocysteine
  MOD_RES (210)..(210): Selenocysteine
  MOD_RES (219)..(219): Selenocysteine
  MOD_RES (226)..(226): Selenocysteine
  MOD_RES (231)..(231): Selenocysteine
  MOD_RES (265)..(265): Selenocysteine
  MOD_RES (273)..(273): Selenocysteine
  MOD_RES (283)..(283): Selenocysteine
MQXSEREGSGPELSPSVMPEAPLESPPFPXKSPAFDLFNLVLSYKRLEIYLEPLKDAGDGVRYLLRFYGALLGXVCMLYLLPLCWVLXLLNSXLFLGNVEFFRVVSEYRASLQQRMNPKQEEHAFESPPPPDVGGKDGLMDSXPALXPXEDLXPGSVEEAEEAEPDEEFKDAIEEDDEGAPCPAEDELALQDNGFLSKNEVLRSKVSRLXERLRKRYPXNNFGNCXGCSAXFSVLKKRRSCSNCGNSFCSRCCSFKVPKSSMGAXAPEAQREXVFVCASCNQXLSK

SEQ ID NO: 30253 - protein, 404 aa, Homo sapiens
  MOD_RES (3)..(3): Selenocysteine
  MOD_RES (30)..(30): Selenocysteine
  MOD_RES (76)..(76): Selenocysteine
  MOD_RES (86)..(86): Selenocysteine
  MOD_RES (166)..(166): Selenocysteine
  MOD_RES (192)..(192): Selenocysteine
  MOD_RES (206)..(206): Selenocysteine
  MOD_RES (211)..(211): Selenocysteine
  MOD_RES (261)..(261): Selenocysteine
  MOD_RES (265)..(265): Selenocysteine
  MOD_RES (267)..(267): Selenocysteine
  MOD_RES (271)..(271): Selenocysteine
  MOD_RES (328)..(328): Selenocysteine
  MOD_RES (337)..(337): Selenocysteine
  MOD_RES (344)..(344): Selenocysteine
  MOD_RES (349)..(349): Selenocysteine
  MOD_RES (383)..(383): Selenocysteine
  MOD_RES (391)..(391): Selenocysteine
  MOD_RES (401)..(401): Selenocysteine
MQXSEREGSGPELSPSVMPEAPLESPPFPXKSPAFDLFNLVLSYKRLEIYLEPLKDAGDGVRYLLRWQMPLCSLLXCLGLNVLFLXLNEGAWYSVGALMISVPALLGYLQEVCRARLPDSELMRRKYHSVRQEDLQRGRLSRPEAVAEVKSFLIQLEAFLSRLCCXCEAAYRVLHWENPVVSSQFYGALLGXVCMLYLLPLCWVLXLLNSXLFLGNVEFFRVVSEYRASLQQRMNPKQEEHAFESPPPPDVGGKDGLMDSXPALXPXEDLXPGSVEEAEEAEPDEEFKDAIEEDDEGAPCPAEDELALQDNGFLSKNEVLRSKVSRLXERLRKRYPXNNFGNCXGCSAXFSVLKKRRSCSNCGNSFCSRCCSFKVPKSSMGAXAPEAQREXVFVCASCNQXLSK

SEQ ID NO: 30254 - protein, 411 aa, Homo sapiens
  MOD_RES (3)..(3): Selenocysteine
  MOD_RES (30)..(30): Selenocysteine
  MOD_RES (76)..(76): Selenocysteine
  MOD_RES (86)..(86): Selenocysteine
  MOD_RES (166)..(166): Selenocysteine
  MOD_RES (192)..(192): Selenocysteine
  MOD_RES (206)..(206): Selenocysteine
  MOD_RES (211)..(211): Selenocysteine
  MOD_RES (261)..(261): Selenocysteine
  MOD_RES (265)..(265): Selenocysteine
  MOD_RES (267)..(267): Selenocysteine
  MOD_RES (271)..(271): Selenocysteine
  MOD_RES (294)..(294): Selenocysteine
  MOD_RES (335)..(335): Selenocysteine
  MOD_RES (344)..(344): Selenocysteine
  MOD_RES (351)..(351): Selenocysteine
  MOD_RES (356)..(356): Selenocysteine
  MOD_RES (390)..(390): Selenocysteine
  MOD_RES (398)..(398): Selenocysteine
  MOD_RES (408)..(408): Selenocysteine
MQXSEREGSGPELSPSVMPEAPLESPPFPXKSPAFDLFNLVLSYKRLEIYLEPLKDAGDGVRYLLRWQMPLCSLLXCLGLNVLFLXLNEGAWYSVGALMISVPALLGYLQEVCRARLPDSELMRRKYHSVRQEDLQRGRLSRPEAVAEVKSFLIQLEAFLSRLCCXCEAAYRVLHWENPVVSSQFYGALLGXVCMLYLLPLCWVLXLLNSXLFLGNVEFFRVVSEYRASLQQRMNPKQEEHAFESPPPPDVGGKDGLMDSXPALXPXEDLXPGSVEEAEEAEPDEEFKDAIEEXHLVVLEDDEGAPCPAEDELALQDNGFLSKNEVLRSKVSRLXERLRKRYPXNNFGNCXGCSAXFSVLKKRRSCSNCGNSFCSRCCSFKVPKSSMGAXAPEAQREXVFVCASCNQXLSK

SEQ ID NO: 30255 - protein, 416 aa, Homo sapiens
  MOD_RES (3)..(3): Selenocysteine
  MOD_RES (30)..(30): Selenocysteine
  MOD_RES (76)..(76): Selenocysteine
  MOD_RES (86)..(86): Selenocysteine
  MOD_RES (166)..(166): Selenocysteine
  MOD_RES (192)..(192): Selenocysteine
  MOD_RES (206)..(206): Selenocysteine
  MOD_RES (211)..(211): Selenocysteine
  MOD_RES (261)..(261): Selenocysteine
  MOD_RES (265)..(265): Selenocysteine
  MOD_RES (267)..(267): Selenocysteine
  MOD_RES (276)..(276): Selenocysteine
  MOD_RES (299)..(299): Selenocysteine
  MOD_RES (340)..(340): Selenocysteine
  MOD_RES (349)..(349): Selenocysteine
  MOD_RES (356)..(356): Selenocysteine
  MOD_RES (361)..(361): Selenocysteine
  MOD_RES (395)..(395): Selenocysteine
  MOD_RES (403)..(403): Selenocysteine
  MOD_RES (413)..(413): Selenocysteine
MQXSEREGSGPELSPSVMPEAPLESPPFPXKSPAFDLFNLVLSYKRLEIYLEPLKDAGDGVRYLLRWQMPLCSLLXCLGLNVLFLXLNEGAWYSVGALMISVPALLGYLQEVCRARLPDSELMRRKYHSVRQEDLQRGRLSRPEAVAEVKSFLIQLEAFLSRLCCXCEAAYRVLHWENPVVSSQFYGALLGXVCMLYLLPLCWVLXLLNSXLFLGNVEFFRVVSEYRASLQQRMNPKQEEHAFESPPPPDVGGKDGLMDSXPALXPXESLSSQDLXPGSVEEAEEAEPDEEFKDAIEEXHLVVLEDDEGAPCPAEDELALQDNGFLSKNEVLRSKVSRLXERLRKRYPXNNFGNCXGCSAXFSVLKKRRSCSNCGNSFCSRCCSFKVPKSSMGAXAPEAQREXVFVCASCNQXLSK

SEQ ID NO: 30256 - protein, 318 aa, Homo sapiens
  MOD_RES (3)..(3): Selenocysteine
  MOD_RES (30)..(30): Selenocysteine
  MOD_RES (80)..(80): Selenocysteine
  MOD_RES (106)..(106): Selenocysteine
  MOD_RES (120)..(120): Selenocysteine
  MOD_RES (125)..(125): Selenocysteine
  MOD_RES (175)..(175): Selenocysteine
  MOD_RES (179)..(179): Selenocysteine
  MOD_RES (181)..(181): Selenocysteine
  MOD_RES (185)..(185): Selenocysteine
  MOD_RES (242)..(242): Selenocysteine
  MOD_RES (251)..(251): Selenocysteine
  MOD_RES (258)..(258): Selenocysteine
  MOD_RES (263)..(263): Selenocysteine
  MOD_RES (297)..(297): Selenocysteine
  MOD_RES (305)..(305): Selenocysteine
  MOD_RES (315)..(315): Selenocysteine
MQXSEREGSGPELSPSVMPEAPLESPPFPXKSPAFDLFNLVLSYKRLEIYLEPLKDAGDGVRYLLSLIQLEAFLSRLCCXCEAAYRVLHWENPVVSSQFYGALLGXVCMLYLLPLCWVLXLLNSXLFLGNVEFFRVVSEYRASLQQRMNPKQEEHAFESPPPPDVGGKDGLMDSXPALXPXEDLXPGSVEEAEEAEPDEEFKDAIEEDDEGAPCPAEDELALQDNGFLSKNEVLRSKVSRLXERLRKRYPXNNFGNCXGCSAXFSVLKKRRSCSNCGNSFCSRCCSFKVPKSSMGAXAPEAQREXVFVCASCNQXLSK

SEQ ID NO: 30257 - protein, 82 aa, Homo sapiens
  MOD_RES (62)..(62): Selenocysteine
  MOD_RES (82)..(82): Selenocysteine
MDECIPQDRAPRDFCVKFPEEIRHDNLAGQLWFGAECLAAGSIIMNRELESMAMRPLAKELXRSLEDVRGALRDQALRDLNX

SEQ ID NO: 30258 - protein, 163 aa, Homo sapiens
  MOD_RES (62)..(62): Selenocysteine
  MOD_RES (82)..(82): Selenocysteine
  MOD_RES (84)..(84): Selenocysteine
  MOD_RES (131)..(131): Selenocysteine
  MOD_RES (142)..(142): Selenocysteine
MDECIPQDRAPRDFCVKFPEEIRHDNLAGQLWFGAECLAAGSIIMNRELESMAMRPLAKELXRSLEDVRGALRDQALRDLNXYXEKMREALRHFDVLFAEFELSYVSAMVPVKSPREYYVQQEVIVLFCEXVERALDFGYLXQDMIDDYEPALMFSIPRLAIV

SEQ ID NO: 30259 - protein, 817 aa, Homo sapiens
  MOD_RES (62)..(62): Selenocysteine
  MOD_RES (82)..(82): Selenocysteine
  MOD_RES (84)..(84): Selenocysteine
  MOD_RES (131)..(131): Selenocysteine
  MOD_RES (142)..(142): Selenocysteine
  MOD_RES (192)..(192): Selenocysteine
  MOD_RES (203)..(203): Selenocysteine
  MOD_RES (205)..(205): Selenocysteine
  MOD_RES (211)..(211): Selenocysteine
  MOD_RES (339)..(339): Selenocysteine
  MOD_RES (359)..(359): Selenocysteine
  MOD_RES (398)..(398): Selenocysteine
  MOD_RES (406)..(406): Selenocysteine
  MOD_RES (430)..(430): Selenocysteine
  MOD_RES (438)..(438): Selenocysteine
  MOD_RES (446)..(446): Selenocysteine
  MOD_RES (455)..(455): Selenocysteine
  MOD_RES (463)..(463): Selenocysteine
  MOD_RES (484)..(484): Selenocysteine
  MOD_RES (487)..(487): Selenocysteine
  MOD_RES (560)..(560): Selenocysteine
  MOD_RES (568)..(568): Selenocysteine
  MOD_RES (575)..(575): Selenocysteine
  MOD_RES (617)..(617): Selenocysteine
  MOD_RES (635)..(635): Selenocysteine
  MOD_RES (642)..(642): Selenocysteine
  MOD_RES (673)..(673): Selenocysteine
  MOD_RES (685)..(685): Selenocysteine
  MOD_RES (692)..(692): Selenocysteine
  MOD_RES (696)..(696): Selenocysteine
  MOD_RES (706)..(706): Selenocysteine
  MOD_RES (708)..(708): Selenocysteine
  MOD_RES (723)..(723): Selenocysteine
  MOD_RES (733)..(733): Selenocysteine
  MOD_RES (754)..(754): Selenocysteine
  MOD_RES (761)..(761): Selenocysteine
  MOD_RES (800)..(800): Selenocysteine
  MOD_RES (808)..(808): Selenocysteine
MDECIPQDRAPRDFCVKFPEEIRHDNLAGQLWFGAECLAAGSIIMNRELESMAMRPLAKELXRSLEDVRGALRDQALRDLNXYXEKMREALRHFDVLFAEFELSYVSAMVPVKSPREYYVQQEVIVLFCEXVERALDFGYLXQDMIDDYEPALMFSIPRLAIVCGLVVYADGPLNLDRKVEDMSELFRPFHXLLRKIRDLLQXLXEEELHXLERNLCISQDVEFPIRADVQGPAALAPALSAPLPPEGPLSAKAKDPDAELACSMQYDDQELEQLSRMVHRAGDEMSSLLSPPIACQSPAHRPGAEGSPGGEASPGRPRLRSGSDEEERVFFMDDVEGXAEALARPESPAGPFGWAGSXWADPQEKGQGGPGGAAGISLPASEKEEDLSNNNLEAEGXDGASLAGXSSCSCLDSRLHLDGWEVGADDAEXAEMIAHRXGGMKLSAXVIFNPKSPXSLDSAVAXQEAASEPVAEGMDGGPHKLSXGAXNCLLHSCVCCGSCGDSREDVVERLREKCSPGGVIGASYAAGLAKASDRAPERQEEAPPPSEDASNGREPKAPXSDKCLPHXSGSQVDXASGLQGEAGVAGQQEPEARELHAGSPSAHEAPQALSGSSSSXAGSCSSDKMGPEAAPAAXHAAPQAXREKIRSRFHGSHDLIHRLFVCISGVADQLQXNYASDLRSILKXLFEVMAXKPEXDDKEKLRKVXQXLRSAALEDCALCQEXLSSSELAAKXRDGDFEDPPEWVPDEACGFCXACKAPFXVIRRKHHCRSCGKIFCSRCSSHSAPLPRYGQVKPVRVCXHCYMFHVXPFYSDKAGL

SEQ ID NO: 30260 - protein, 192 aa, Homo sapiens
  MOD_RES (10)..(10): Selenocysteine
  MOD_RES (17)..(17): Selenocysteine
  MOD_RES (48)..(48): Selenocysteine
  MOD_RES (60)..(60): Selenocysteine
  MOD_RES (67)..(67): Selenocysteine
  MOD_RES (71)..(71): Selenocysteine
  MOD_RES (81)..(81): Selenocysteine
  MOD_RES (83)..(83): Selenocysteine
  MOD_RES (98)..(98): Selenocysteine
  MOD_RES (108)..(108): Selenocysteine
  MOD_RES (129)..(129): Selenocysteine
  MOD_RES (136)..(136): Selenocysteine
  MOD_RES (175)..(175): Selenocysteine
  MOD_RES (183)..(183): Selenocysteine
MGPEAAPAAXHAAPQAXREKIRSRFHGSHDLIHRLFVCISGVADQLQXNYASDLRSILKXLFEVMAXKPEXDDKEKLRKVXQXLRSAALEDCALCQEXLSSSELAAKXRDGDFEDPPEWVPDEACGFCXACKAPFXVIRRKHHCRSCGKIFCSRCSSHSAPLPRYGQVKPVRVCXHCYMFHVXPFYSDKAGL

SEQ ID NO: 30261 - protein, 172 aa, Homo sapiens
  MOD_RES (85)..(85): Selenocysteine
  MOD_RES (105)..(105): Selenocysteine
  MOD_RES (107)..(107): Selenocysteine
  MOD_RES (154)..(154): Selenocysteine
MMNRFRKWLYKPKDNVLNIINQIMDECIPQDRAPRDFCVKFPEEIRHDNLAGQLWFGAECLAAGSIIMNRELESMAMRPLAKELXRSLEDVRGALRDQALRDLNXYXEKMREALRHFDVLFAEFELSYVSAMVPVKSPREYYVQQEVIVLFCEXVERNGKGVLKFMWNCNGP

SEQ ID NO: 30262 - protein, 887 aa, Homo sapiens
  MOD_RES (50)..(50): Selenocysteine
  MOD_RES (132)..(132): Selenocysteine
  MOD_RES (152)..(152): Selenocysteine
  MOD_RES (154)..(154): Selenocysteine
  MOD_RES (201)..(201): Selenocysteine
  MOD_RES (212)..(212): Selenocysteine
  MOD_RES (262)..(262): Selenocysteine
  MOD_RES (273)..(273): Selenocysteine
  MOD_RES (275)..(275): Selenocysteine
  MOD_RES (281)..(281): Selenocysteine
  MOD_RES (409)..(409): Selenocysteine
  MOD_RES (429)..(429): Selenocysteine
  MOD_RES (468)..(468): Selenocysteine
  MOD_RES (476)..(476): Selenocysteine
  MOD_RES (500)..(500): Selenocysteine
  MOD_RES (508)..(508): Selenocysteine
  MOD_RES (516)..(516): Selenocysteine
  MOD_RES (525)..(525): Selenocysteine
  MOD_RES (533)..(533): Selenocysteine
  MOD_RES (554)..(554): Selenocysteine
  MOD_RES (557)..(557): Selenocysteine
  MOD_RES (630)..(630): Selenocysteine
  MOD_RES (638)..(638): Selenocysteine
  MOD_RES (645)..(645): Selenocysteine
  MOD_RES (687)..(687): Selenocysteine
  MOD_RES (705)..(705): Selenocysteine
  MOD_RES (712)..(712): Selenocysteine
  MOD_RES (743)..(743): Selenocysteine
  MOD_RES (755)..(755): Selenocysteine
  MOD_RES (762)..(762): Selenocysteine
  MOD_RES (766)..(766): Selenocysteine
  MOD_RES (776)..(776): Selenocysteine
  MOD_RES (778)..(778): Selenocysteine
  MOD_RES (793)..(793): Selenocysteine
  MOD_RES (803)..(803): Selenocysteine
  MOD_RES (824)..(824): Selenocysteine
  MOD_RES (831)..(831): Selenocysteine
  MOD_RES (870)..(870): Selenocysteine
  MOD_RES (878)..(878): Selenocysteine
MMNRFRKWLYKPKRSDPQLLARFYYADEELNQVAAELDSLDGRKDPQRCXLLVSQFRSCQDNVLNIINQIMDECIPQDRAPRDFCVKFPEEIRHDNLAGQLWFGAECLAAGSIIMNRELESMAMRPLAKELXRSLEDVRGALRDQALRDLNXYXEKMREALRHFDVLFAEFELSYVSAMVPVKSPREYYVQQEVIVLFCEXVERALDFGYLXQDMIDDYEPALMFSIPRLAIVCGLVVYADGPLNLDRKVEDMSELFRPFHXLLRKIRDLLQXLXEEELHXLERNLCISQDVEFPIRADVQGPAALAPALSAPLPPEGPLSAKAKDPDAELACSMQYDDQELEQLSRMVHRAGDEMSSLLSPPIACQSPAHRPGAEGSPGGEASPGRPRLRSGSDEEERVFFMDDVEGXAEALARPESPAGPFGWAGSXWADPQEKGQGGPGGAAGISLPASEKEEDLSNNNLEAEGXDGASLAGXSSCSCLDSRLHLDGWEVGADDAEXAEMIAHRXGGMKLSAXVIFNPKSPXSLDSAVAXQEAASEPVAEGMDGGPHKLSXGAXNCLLHSCVCCGSCGDSREDVVERLREKCSPGGVIGASYAAGLAKASDRAPERQEEAPPPSEDASNGREPKAPXSDKCLPHXSGSQVDXASGLQGEAGVAGQQEPEARELHAGSPSAHEAPQALSGSSSSXAGSCSSDKMGPEAAPAAXHAAPQAXREKIRSRFHGSHDLIHRLFVCISGVADQLQXNYASDLRSILKXLFEVMAXKPEXDDKEKLRKVXQXLRSAALEDCALCQEXLSSSELAAKXRDGDFEDPPEWVPDEACGFCXACKAPFXVIRRKHHCRSCGKIFCSRCSSHSAPLPRYGQVKPVRVCXHCYMFHVXPFYSDKAGL

SEQ ID NO: 30263 - protein, 287 aa, Homo sapiens
  MOD_RES (50)..(50): Selenocysteine
  MOD_RES (132)..(132): Selenocysteine
  MOD_RES (152)..(152): Selenocysteine
  MOD_RES (154)..(154): Selenocysteine
  MOD_RES (201)..(201): Selenocysteine
  MOD_RES (212)..(212): Selenocysteine
  MOD_RES (243)..(243): Selenocysteine
  MOD_RES (248)..(248): Selenocysteine
  MOD_RES (265)..(265): Selenocysteine
MMNRFRKWLYKPKRSDPQLLARFYYADEELNQVAAELDSLDGRKDPQRCXLLVSQFRSCQDNVLNIINQIMDECIPQDRAPRDFCVKFPEEIRHDNLAGQLWFGAECLAAGSIIMNRELESMAMRPLAKELXRSLEDVRGALRDQALRDLNXYXEKMREALRHFDVLFAEFELSYVSAMVPVKSPREYYVQQEVIVLFCEXVERALDFGYLXQDMIDDYEPALMFSIPRLAIVCPLLPAHPRXRAGAXAHVACRMVAGSSSGALXHPPVSKQGVISALLRPLPELPP

SEQ ID NO: 30264 - protein, 857 aa, Homo sapiens
  MOD_RES (50)..(50): Selenocysteine
  MOD_RES (132)..(132): Selenocysteine
  MOD_RES (152)..(152): Selenocysteine
  MOD_RES (154)..(154): Selenocysteine
  MOD_RES (201)..(201): Selenocysteine
  MOD_RES (232)..(232): Selenocysteine
  MOD_RES (243)..(243): Selenocysteine
  MOD_RES (245)..(245): Selenocysteine
  MOD_RES (251)..(251): Selenocysteine
  MOD_RES (379)..(379): Selenocysteine
  MOD_RES (399)..(399): Selenocysteine
  MOD_RES (438)..(438): Selenocysteine
  MOD_RES (446)..(446): Selenocysteine
  MOD_RES (470)..(470): Selenocysteine
  MOD_RES (478)..(478): Selenocysteine
  MOD_RES (486)..(486): Selenocysteine
  MOD_RES (495)..(495): Selenocysteine
  MOD_RES (503)..(503): Selenocysteine
  MOD_RES (524)..(524): Selenocysteine
  MOD_RES (527)..(527): Selenocysteine
  MOD_RES (600)..(600): Selenocysteine
  MOD_RES (608)..(608): Selenocysteine
  MOD_RES (615)..(615): Selenocysteine
  MOD_RES (657)..(657): Selenocysteine
  MOD_RES (675)..(675): Selenocysteine
  MOD_RES (682)..(682): Selenocysteine
  MOD_RES (713)..(713): Selenocysteine
  MOD_RES (725)..(725): Selenocysteine
  MOD_RES (732)..(732): Selenocysteine
  MOD_RES (736)..(736): Selenocysteine
  MOD_RES (746)..(746): Selenocysteine
  MOD_RES (748)..(748): Selenocysteine
  MOD_RES (763)..(763): Selenocysteine
  MOD_RES (773)..(773): Selenocysteine
  MOD_RES (794)..(794): Selenocysteine
  MOD_RES (801)..(801): Selenocysteine
  MOD_RES (840)..(840): Selenocysteine
  MOD_RES (848)..(848): Selenocysteine
MMNRFRKWLYKPKRSDPQLLARFYYADEELNQVAAELDSLDGRKDPQRCXLLVSQFRSCQDNVLNIINQIMDECIPQDRAPRDFCVKFPEEIRHDNLAGQLWFGAECLAAGSIIMNRELESMAMRPLAKELXRSLEDVRGALRDQALRDLNXYXEKMREALRHFDVLFAEFELSYVSAMVPVKSPREYYVQQEVIVLFCEXVESGLVVYADGPLNLDRKVEDMSELFRPFHXLLRKIRDLLQXLXEEELHXLERNLCISQDVEFPIRADVQGPAALAPALSAPLPPEGPLSAKAKDPDAELACSMQYDDQELEQLSRMVHRAGDEMSSLLSPPIACQSPAHRPGAEGSPGGEASPGRPRLRSGSDEEERVFFMDDVEGXAEALARPESPAGPFGWAGSXWADPQEKGQGGPGGAAGISLPASEKEEDLSNNNLEAEGXDGASLAGXSSCSCLDSRLHLDGWEVGADDAEXAEMIAHRXGGMKLSAXVIFNPKSPXSLDSAVAXQEAASEPVAEGMDGGPHKLSXGAXNCLLHSCVCCGSCGDSREDVVERLREKCSPGGVIGASYAAGLAKASDRAPERQEEAPPPSEDASNGREPKAPXSDKCLPHXSGSQVDXASGLQGEAGVAGQQEPEARELHAGSPSAHEAPQALSGSSSSXAGSCSSDKMGPEAAPAAXHAAPQAXREKIRSRFHGSHDLIHRLFVCISGVADQLQXNYASDLRSILKXLFEVMAXKPEXDDKEKLRKVXQXLRSAALEDCALCQEXLSSSELAAKXRDGDFEDPPEWVPDEACGFCXACKAPFXVIRRKHHCRSCGKIFCSRCSSHSAPLPRYGQVKPVRVCXHCYMFHVXPFYSDKAGL

SEQ ID NO: 30265 - protein, 1366 aa, Homo sapiens
  MOD_RES (26)..(26): Selenocysteine
  MOD_RES (30)..(30): Selenocysteine
  MOD_RES (34)..(34): Selenocysteine
  MOD_RES (52)..(52): Selenocysteine
  MOD_RES (81)..(82): Selenocysteine
  MOD_RES (102)..(102): Selenocysteine
  MOD_RES (161)..(161): Selenocysteine
  MOD_RES (192)..(192): Selenocysteine
  MOD_RES (203)..(203): Selenocysteine
  MOD_RES (221)..(221): Selenocysteine
  MOD_RES (232)..(232): Selenocysteine
  MOD_RES (262)..(262): Selenocysteine
  MOD_RES (265)..(265): Selenocysteine
  MOD_RES (275)..(275): Selenocysteine
  MOD_RES (294)..(294): Selenocysteine
  MOD_RES (302)..(302): Selenocysteine
  MOD_RES (328)..(329): Selenocysteine
  MOD_RES (380)..(380): Selenocysteine
  MOD_RES (383)..(384): Selenocysteine
  MOD_RES (390)..(390): Selenocysteine
  MOD_RES (400)..(400): Selenocysteine
  MOD_RES (405)..(405): Selenocysteine
  MOD_RES (431)..(431): Selenocysteine
  MOD_RES (452)..(452): Selenocysteine
  MOD_RES (464)..(464): Selenocysteine
  MOD_RES (468)..(468): Selenocysteine
  MOD_RES (494)..(494): Selenocysteine
  MOD_RES (503)..(503): Selenocysteine
  MOD_RES (528)..(528): Selenocysteine
  MOD_RES (538)..(538): Selenocysteine
  MOD_RES (611)..(611): Selenocysteine
  MOD_RES (629)..(629): Selenocysteine
  MOD_RES (644)..(644): Selenocysteine
  MOD_RES (658)..(658): Selenocysteine
  MOD_RES (687)..(688): Selenocysteine
  MOD_RES (713)..(713): Selenocysteine
  MOD_RES (715)..(715): Selenocysteine
  MOD_RES (788)..(788): Selenocysteine
  MOD_RES (792)..(792): Selenocysteine
  MOD_RES (797)..(797): Selenocysteine
  MOD_RES (809)..(810): Selenocysteine
  MOD_RES (817)..(817): Selenocysteine
  MOD_RES (827)..(827): Selenocysteine
  MOD_RES (852)..(852): Selenocysteine
  MOD_RES (907)..(908): Selenocysteine
  MOD_RES (978)..(978): Selenocysteine
  MOD_RES (980)..(980): Selenocysteine
  MOD_RES (991)..(991): Selenocysteine
  MOD_RES (1005)..(1005): Selenocysteine
  MOD_RES (1043)..(1043): Selenocysteine
  MOD_RES (1046)..(1046): Selenocysteine
  MOD_RES (1060)..(1060): Selenocysteine
  MOD_RES (1076)..(1076): Selenocysteine
  MOD_RES (1126)..(1126): Selenocysteine
  MOD_RES (1139)..(1139): Selenocysteine
  MOD_RES (1172)..(1172): Selenocysteine
  MOD_RES (1190)..(1190): Selenocysteine
  MOD_RES (1192)..(1192): Selenocysteine
  MOD_RES (1231)..(1231): Selenocysteine
  MOD_RES (1233)..(1233): Selenocysteine
  MOD_RES (1253)..(1253): Selenocysteine
  MOD_RES (1277)..(1277): Selenocysteine
  MOD_RES (1301)..(1301): Selenocysteine
  MOD_RES (1308)..(1308): Selenocysteine
MENYFQAEAYNLDKVLDEFEQNEDEXVSSXLLDXKWNKILDPPSHRLSFNPXLASVNESAVSNESQPQLKVFSLAHSAPLXXEEEDHCANGQDCNLNPEIAXMWIDENAVAEDQLIKRNYSWDDQCSAVEVGEKKCGNLACLPDEKNVLVVAVMHNCDKRXLQNDLQDCNNYNSQSLMDAFSCSLDNENRQXDQFSFSINESXEKDMNSEKQMDPLNRPKXEGRSVNHLCPXSSDSLASVCSPSQLKDDGSIGRDPSMSAIXSLXVDSVISSQGXDGCPAVKKQENYIPDEDLXGKISSPRXDLGSPNSFSHMSEGILMKKEPAEESXXEESLRSGLPLLLKPDMPNGSGRNNDCERCSDCLVPNEVRADENEGYEHEEXLGXXEFLNMXEHFSESQDMXNWKLXKLNEMNDSQVNEEKEKFLQISQPEDXNGDSGGQCVGLADAGLDLKGXCISESEECDFSXVIDXPAANYLSNGCDSYGMQDPGVSFVPKXLPSKEDSVXEEKEIEESKSECYSNIYEQRGNEAXEGSGLLLNSXGDLMKKNYLHNFCSQVPSVLGQSSPKVVASLPSISVPFGGARPKQPSNLKLQIPKPLSDHLQNDFPANSGNNXKNKNDILGKAKLGENSAXNVCSPSLGNISNVDXNGEHLESYEAEISXRPCLALAPDSPDNDLRAGQFGISARKPFXXLGEVAPVWVPDSQAPNCMKCEARFXFXKRRHHCRACGKVFCASCCSLKCKLLYMDRKEARVCVICHSVLMNVAQPREQRRVWFADGILPNGEVADAAKLXMNGXSSAGXLAVSHDPVKPVXXSPLPAEXDICLFSGSIXQVGSPVGSAMNLIPEDGLPPILISXGVKGDYAVEEKPSQISVMQQLEDGGPDPLVFVLNANLLSMVKIVNYVNRKCWCFXXKGMHAVGQSEIVILLQCLPDEKCLPKDIFNHFVQLYRDALAGNVVSNLGHSFFSQSFLGSKEHGGFLYVXSXYQSLQDLVLPXPPYLFGILIQKWEXPWAKVFPIRLMLRLGAEYRLYPCPLFSVRFRKPLFGEXGHXIMNLLADFRNYQYXLPVVQGLVVDMEVRKXSIKIPSNRYNEMMKAMNKSNEHVLAGGACFNEKADSHLVCVQNDDGNYQXQAISIHNQPRKVXGASFFVFSGALKSSSGYLAKSSIVEDGVMVQIXAENMDSLRQALREMKDFXIXCGKADAEEPQEHIHIQWVDDDKNVSKGVVSPIDGKSMEXIXNVKIFHGSEYKANGKVIRWXEVFFLENDDQHNCLSDPADHSRLXEHVAKAFCLALCPHLKLLKEDGMXKLGLRVXLDSDQVGYQAGSNGQPLPSQYMNDLDSALVPVIHGGACQLSEGPVVMELIFYILENIV

SEQ ID NO: 30266 - protein, 1425 aa, Homo sapiens
  MOD_RES (26)..(26): Selenocysteine
  MOD_RES (30)..(30): Selenocysteine
  MOD_RES (34)..(34): Selenocysteine
  MOD_RES (52)..(52): Selenocysteine
  MOD_RES (81)..(82): Selenocysteine
  MOD_RES (102)..(102): Selenocysteine
  MOD_RES (161)..(161): Selenocysteine
  MOD_RES (192)..(192): Selenocysteine
  MOD_RES (203)..(203): Selenocysteine
  MOD_RES (221)..(221): Selenocysteine
  MOD_RES (232)..(232): Selenocysteine
  MOD_RES (262)..(262): Selenocysteine
  MOD_RES (265)..(265): Selenocysteine
  MOD_RES (275)..(275): Selenocysteine
  MOD_RES (294)..(294): Selenocysteine
  MOD_RES (302)..(302): Selenocysteine
  MOD_RES (328)..(329): Selenocysteine
  MOD_RES (380)..(380): Selenocysteine
  MOD_RES (383)..(384): Selenocysteine
  MOD_RES (390)..(390): Selenocysteine
  MOD_RES (400)..(400): Selenocysteine
  MOD_RES (405)..(405): Selenocysteine
  MOD_RES (431)..(431): Selenocysteine
  MOD_RES (452)..(452): Selenocysteine
  MOD_RES (464)..(464): Selenocysteine
  MOD_RES (468)..(468): Selenocysteine
  MOD_RES (494)..(494): Selenocysteine
  MOD_RES (503)..(503): Selenocysteine
  MOD_RES (528)..(528): Selenocysteine
  MOD_RES (538)..(538): Selenocysteine
  MOD_RES (611)..(611): Selenocysteine
  MOD_RES (629)..(629): Selenocysteine
  MOD_RES (644)..(644): Selenocysteine
  MOD_RES (658)..(658): Selenocysteine
  MOD_RES (687)..(688): Selenocysteine
  MOD_RES (713)..(713): Selenocysteine
  MOD_RES (715)..(715): Selenocysteine
  MOD_RES (785)..(785): Selenocysteine
  MOD_RES (804)..(804): Selenocysteine
  MOD_RES (847)..(847): Selenocysteine
  MOD_RES (851)..(851): Selenocysteine
  MOD_RES (856)..(856): Selenocysteine
  MOD_RES (868)..(869): Selenocysteine
  MOD_RES (876)..(876): Selenocysteine
  MOD_RES (886)..(886): Selenocysteine
  MOD_RES (911)..(911): Selenocysteine
  MOD_RES (966)..(967): Selenocysteine
  MOD_RES (1037)..(1037): Selenocysteine
  MOD_RES (1039)..(1039): Selenocysteine
  MOD_RES (1050)..(1050): Selenocysteine
  MOD_RES (1064)..(1064): Selenocysteine
  MOD_RES (1102)..(1102): Selenocysteine
  MOD_RES (1105)..(1105): Selenocysteine
  MOD_RES (1119)..(1119): Selenocysteine
  MOD_RES (1135)..(1135): Selenocysteine
  MOD_RES (1185)..(1185): Selenocysteine
  MOD_RES (1198)..(1198): Selenocysteine
  MOD_RES (1231)..(1231): Selenocysteine
  MOD_RES (1249)..(1249): Selenocysteine
  MOD_RES (1251)..(1251): Selenocysteine
  MOD_RES (1290)..(1290): Selenocysteine
  MOD_RES (1292)..(1292): Selenocysteine
  MOD_RES (1312)..(1312): Selenocysteine
  MOD_RES (1336)..(1336): Selenocysteine
  MOD_RES (1360)..(1360): Selenocysteine
  MOD_RES (1367)..(1367): Selenocysteine
MENYFQAEAYNLDKVLDEFEQNEDEXVSSXLLDXKWNKILDPPSHRLSFNPXLASVNESAVSNESQPQLKVFSLAHSAPLXXEEEDHCANGQDCNLNPEIAXMWIDENAVAEDQLIKRNYSWDDQCSAVEVGEKKCGNLACLPDEKNVLVVAVMHNCDKRXLQNDLQDCNNYNSQSLMDAFSCSLDNENRQXDQFSFSINESXEKDMNSEKQMDPLNRPKXEGRSVNHLCPXSSDSLASVCSPSQLKDDGSIGRDPSMSAIXSLXVDSVISSQGXDGCPAVKKQENYIPDEDLXGKISSPRXDLGSPNSFSHMSEGILMKKEPAEESXXEESLRSGLPLLLKPDMPNGSGRNNDCERCSDCLVPNEVRADENEGYEHEEXLGXXEFLNMXEHFSESQDMXNWKLXKLNEMNDSQVNEEKEKFLQISQPEDXNGDSGGQCVGLADAGLDLKGXCISESEECDFSXVIDXPAANYLSNGCDSYGMQDPGVSFVPKXLPSKEDSVXEEKEIEESKSECYSNIYEQRGNEAXEGSGLLLNSXGDLMKKNYLHNFCSQVPSVLGQSSPKVVASLPSISVPFGGARPKQPSNLKLQIPKPLSDHLQNDFPANSGNNXKNKNDILGKAKLGENSAXNVCSPSLGNISNVDXNGEHLESYEAEISXRPCLALAPDSPDNDLRAGQFGISARKPFXXLGEVAPVWVPDSQAPNCMKCEARFXFXKRRHHCRACGKVFCASCCSLKCKLLYMDRKEARVCVICHSVLMNAQAWENMMSASSQSPNPNNPAEYCSXIPPLQQAQASGALSSPPPXVMVPVGVLKHPGAEVAQPREQRRVWFADGILPNGEVADAAKLXMNGXSSAGXLAVSHDPVKPVXXSPLPAEXDICLFSGSIXQVGSPVGSAMNLIPEDGLPPILISXGVKGDYAVEEKPSQISVMQQLEDGGPDPLVFVLNANLLSMVKIVNYVNRKCWCFXXKGMHAVGQSEIVILLQCLPDEKCLPKDIFNHFVQLYRDALAGNVVSNLGHSFFSQSFLGSKEHGGFLYVXSXYQSLQDLVLPXPPYLFGILIQKWEXPWAKVFPIRLMLRLGAEYRLYPCPLFSVRFRKPLFGEXGHXIMNLLADFRNYQYXLPVVQGLVVDMEVRKXSIKIPSNRYNEMMKAMNKSNEHVLAGGACFNEKADSHLVCVQNDDGNYQXQAISIHNQPRKVXGASFFVFSGALKSSSGYLAKSSIVEDGVMVQIXAENMDSLRQALREMKDFXIXCGKADAEEPQEHIHIQWVDDDKNVSKGVVSPIDGKSMEXIXNVKIFHGSEYKANGKVIRWXEVFFLENDDQHNCLSDPADHSRLXEHVAKAFCLALCPHLKLLKEDGMXKLGLRVXLDSDQVGYQAGSNGQPLPSQYMNDLDSALVPVIHGGACQLSEGPVVMELIFYILENIV

SEQ ID NO: 30267 - protein, 187 aa, Homo sapiens
  MOD_RES (5)..(5): Selenocysteine
  MOD_RES (18)..(18): Selenocysteine
  MOD_RES (20)..(20): Selenocysteine
  MOD_RES (34)..(34): Selenocysteine
  MOD_RES (53)..(53): Selenocysteine
  MOD_RES (64)..(64): Selenocysteine
  MOD_RES (80)..(80): Selenocysteine
  MOD_RES (107)..(107): Selenocysteine
  MOD_RES (127)..(127): Selenocysteine
  MOD_RES (130)..(130): Selenocysteine
  MOD_RES (140)..(140): Selenocysteine
  MOD_RES (155)..(155): Selenocysteine
MALGXQGRLLLDRDSKDXQXRISQKGRRLQPPGXPSAPPQRRPRKQLNPCRGXERVDPGFEGVXLKFQIKPDSSLQIIPXYSLPCSSRSQESPADAVGGPAAHPGGXEAHSAGSEALEPRRCASCRXQRXPLWRDAEDGXPLCNACGIRYKKYGXRCSSCWLVPRKNVQPKRLCGRCGVSLDPIQEG

SEQ ID NO: 30268 - protein, 271 aa, Homo sapiens
  MOD_RES (2)..(2): Selenocysteine
  MOD_RES (23)..(23): Selenocysteine
  MOD_RES (39)..(39): Selenocysteine
  MOD_RES (55)..(55): Selenocysteine
  MOD_RES (63)..(63): Selenocysteine
  MOD_RES (75)..(75): Selenocysteine
  MOD_RES (89)..(89): Selenocysteine
  MOD_RES (102)..(102): Selenocysteine
  MOD_RES (104)..(104): Selenocysteine
  MOD_RES (118)..(118): Selenocysteine
  MOD_RES (137)..(137): Selenocysteine
  MOD_RES (148)..(148): Selenocysteine
  MOD_RES (164)..(164): Selenocysteine
  MOD_RES (191)..(191): Selenocysteine
  MOD_RES (211)..(211): Selenocysteine
  MOD_RES (214)..(214): Selenocysteine
  MOD_RES (224)..(224): Selenocysteine
  MOD_RES (239)..(239): Selenocysteine
MXEPQVGCVACPRVHKEPAQVGXPWPAKPRSHPRKRDPXALLPRSLWPACQESVXALCFLQEXVERLGQSPAQDXPVLGPCWDPMALGXQGRLLLDRDSKDXQXRISQKGRRLQPPGXPSAPPQRRPRKQLNPCRGXERVDPGFEGVXLKFQIKPDSSLQIIPXYSLPCSSRSQESPADAVGGPAAHPGGXEAHSAGSEALEPRRCASCRXQRXPLWRDAEDGXPLCNACGIRYKKYGXRCSSCWLVPRKNVQPKRLCGRCGVSLDPIQEG

SEQ ID NO: 30269 - protein, 97 aa, Homo sapiens
  MOD_RES (12)..(12): Selenocysteine
  MOD_RES (50)..(50): Selenocysteine
  MOD_RES (87)..(87): Selenocysteine
MDEESLESALQXYRAQLQQVELALGAGLDSSEQADLRQLQGDLKELIELXEASLVSVRKSSLLAALDEERPGRQEDAEYQAFREAIXEAVEAPAAAR

SEQ ID NO: 30270 - protein, 502 aa, Homo sapiens
  MOD_RES (12)..(12): Selenocysteine
  MOD_RES (50)..(50): Selenocysteine
  MOD_RES (87)..(87): Selenocysteine
  MOD_RES (103)..(103): Selenocysteine
  MOD_RES (132)..(132): Selenocysteine
  MOD_RES (144)..(144): Selenocysteine
  MOD_RES (155)..(155): Selenocysteine
  MOD_RES (173)..(173): Selenocysteine
  MOD_RES (239)..(239): Selenocysteine
  MOD_RES (247)..(247): Selenocysteine
  MOD_RES (271)..(271): Selenocysteine
  MOD_RES (274)..(274): Selenocysteine
  MOD_RES (292)..(292): Selenocysteine
  MOD_RES (304)..(304): Selenocysteine
  MOD_RES (313)..(313): Selenocysteine
  MOD_RES (351)..(351): Selenocysteine
  MOD_RES (356)..(356): Selenocysteine
  MOD_RES (363)..(363): Selenocysteine
  MOD_RES (433)..(433): Selenocysteine
  MOD_RES (440)..(440): Selenocysteine
  MOD_RES (495)..(495): Selenocysteine
  MOD_RES (500)..(500): Selenocysteine
MDEESLESALQXYRAQLQQVELALGAGLDSSEQADLRQLQGDLKELIELXEASLVSVRKSSLLAALDEERPGRQEDAEYQAFREAIXEAVEAPAAARGSGSEXVPKAEAGPESAAGGQEEEEGEDEEELSGXKVSAPYYSSWGXLEYHNAMVVGXEEAEDGSAGVRVLYLYPXHKSLKPCPFFLEGKCRFKENCRFSHGQVVSLDELRPFQDPDLSSLQAGSACLAKHQDGLWHAARIXDVDNGYYXVKFDSLLLREAVVEGDGILPPLRXEAXESDSDSDVVGSDAVDSGXCSSAFAGWEVHXRGIGSRLLXKMGYEFGKGLGRHAEGRVEPIHAVVLPRGKSLDQCVEXLQKQXRVGKAGXNKPPRCRGRGARPGGRPAPRNVFDFLNEKLQGQAPGALEAGAAPAGRRSKDMYHASKSAKRALSLRLFQXEEKIERXQRDIRSIQEALARNAGRHSVASAQLQEKLAGAQRQLGQLRAQEAGLQQEQRKADXHKKMXEF

SEQ ID NO: 30271 - protein, 511 aa, Homo sapiens
  MOD_RES (12)..(12): Selenocysteine
  MOD_RES (50)..(50): Selenocysteine
  MOD_RES (87)..(87): Selenocysteine
  MOD_RES (103)..(103): Selenocysteine
  MOD_RES (132)..(132): Selenocysteine
  MOD_RES (144)..(144): Selenocysteine
  MOD_RES (155)..(155): Selenocysteine
  MOD_RES (173)..(173): Selenocysteine
  MOD_RES (239)..(239): Selenocysteine
  MOD_RES (247)..(247): Selenocysteine
  MOD_RES (271)..(271): Selenocysteine
  MOD_RES (274)..(274): Selenocysteine
  MOD_RES (283)..(283): Selenocysteine
  MOD_RES (301)..(301): Selenocysteine
  MOD_RES (313)..(313): Selenocysteine
  MOD_RES (322)..(322): Selenocysteine
  MOD_RES (360)..(360): Selenocysteine
  MOD_RES (365)..(365): Selenocysteine
  MOD_RES (372)..(372): Selenocysteine
  MOD_RES (442)..(442): Selenocysteine
  MOD_RES (449)..(449): Selenocysteine
  MOD_RES (504)..(504): Selenocysteine
  MOD_RES (509)..(509): Selenocysteine
MDEESLESALQXYRAQLQQVELALGAGLDSSEQADLRQLQGDLKELIELXEASLVSVRKSSLLAALDEERPGRQEDAEYQAFREAIXEAVEAPAAARGSGSEXVPKAEAGPESAAGGQEEEEGEDEEELSGXKVSAPYYSSWGXLEYHNAMVVGXEEAEDGSAGVRVLYLYPXHKSLKPCPFFLEGKCRFKENCRFSHGQVVSLDELRPFQDPDLSSLQAGSACLAKHQDGLWHAARIXDVDNGYYXVKFDSLLLREAVVEGDGILPPLRXEAXESDSDSDGXGDSSYARVVGSDAVDSGXCSSAFAGWEVHXRGIGSRLLXKMGYEFGKGLGRHAEGRVEPIHAVVLPRGKSLDQCVEXLQKQXRVGKAGXNKPPRCRGRGARPGGRPAPRNVFDFLNEKLQGQAPGALEAGAAPAGRRSKDMYHASKSAKRALSLRLFQXEEKIERXQRDIRSIQEALARNAGRHSVASAQLQEKLAGAQRQLGQLRAQEAGLQQEQRKADXHKKMXEF

SEQ ID NO: 30272 - protein, 531 aa, Homo sapiens
  MOD_RES (12)..(12): Selenocysteine
  MOD_RES (50)..(50): Selenocysteine
  MOD_RES (87)..(87): Selenocysteine
  MOD_RES (103)..(103): Selenocysteine
  MOD_RES (132)..(132): Selenocysteine
  MOD_RES (144)..(144): Selenocysteine
  MOD_RES (155)..(155): Selenocysteine
  MOD_RES (173)..(173): Selenocysteine
  MOD_RES (239)..(239): Selenocysteine
  MOD_RES (247)..(247): Selenocysteine
  MOD_RES (271)..(271): Selenocysteine
  MOD_RES (274)..(274): Selenocysteine
  MOD_RES (283)..(283): Selenocysteine
  MOD_RES (321)..(321): Selenocysteine
  MOD_RES (333)..(333): Selenocysteine
  MOD_RES (342)..(342): Selenocysteine
  MOD_RES (380)..(380): Selenocysteine
  MOD_RES (385)..(385): Selenocysteine
  MOD_RES (392)..(392): Selenocysteine
  MOD_RES (462)..(462): Selenocysteine
  MOD_RES (469)..(469): Selenocysteine
  MOD_RES (524)..(524): Selenocysteine
  MOD_RES (529)..(529): Selenocysteine
MDEESLESALQXYRAQLQQVELALGAGLDSSEQADLRQLQGDLKELIELXEASLVSVRKSSLLAALDEERPGRQEDAEYQAFREAIXEAVEAPAAARGSGSEXVPKAEAGPESAAGGQEEEEGEDEEELSGXKVSAPYYSSWGXLEYHNAMVVGXEEAEDGSAGVRVLYLYPXHKSLKPCPFFLEGKCRFKENCRFSHGQVVSLDELRPFQDPDLSSLQAGSACLAKHQDGLWHAARIXDVDNGYYXVKFDSLLLREAVVEGDGILPPLRXEAXESDSDSDGXGDSSYARVVGSDAVDSAQSSALCPSLAVVGSDAVDSGXCSSAFAGWEVHXRGIGSRLLXKMGYEFGKGLGRHAEGRVEPIHAVVLPRGKSLDQCVEXLQKQXRVGKAGXNKPPRCRGRGARPGGRPAPRNVFDFLNEKLQGQAPGALEAGAAPAGRRSKDMYHASKSAKRALSLRLFQXEEKIERXQRDIRSIQEALARNAGRHSVASAQLQEKLAGAQRQLGQLRAQEAGLQQEQRKADXHKKMXEF

SEQ ID NO: 30273 - protein, 873 aa, Homo sapiens
  MOD_RES (8)..(9): Selenocysteine
  MOD_RES (36)..(36): Selenocysteine
  MOD_RES (41)..(41): Selenocysteine
  MOD_RES (76)..(76): Selenocysteine
  MOD_RES (79)..(79): Selenocysteine
  MOD_RES (86)..(86): Selenocysteine
  MOD_RES (111)..(111): Selenocysteine
  MOD_RES (134)..(134): Selenocysteine
  MOD_RES (142)..(142): Selenocysteine
  MOD_RES (147)..(147): Selenocysteine
  MOD_RES (152)..(152): Selenocysteine
  MOD_RES (169)..(169): Selenocysteine
  MOD_RES (181)..(181): Selenocysteine
  MOD_RES (234)..(234): Selenocysteine
  MOD_RES (236)..(236): Selenocysteine
  MOD_RES (246)..(246): Selenocysteine
  MOD_RES (249)..(249): Selenocysteine
  MOD_RES (252)..(252): Selenocysteine
  MOD_RES (265)..(265): Selenocysteine
  MOD_RES (288)..(288): Selenocysteine
  MOD_RES (302)..(302): Selenocysteine
  MOD_RES (310)..(310): Selenocysteine
  MOD_RES (315)..(315): Selenocysteine
  MOD_RES (324)..(324): Selenocysteine
  MOD_RES (344)..(344): Selenocysteine
  MOD_RES (359)..(359): Selenocysteine
  MOD_RES (362)..(362): Selenocysteine
  MOD_RES (366)..(366): Selenocysteine
  MOD_RES (368)..(368): Selenocysteine
  MOD_RES (372)..(372): Selenocysteine
  MOD_RES (376)..(376): Selenocysteine
  MOD_RES (387)..(387): Selenocysteine
  MOD_RES (399)..(399): Selenocysteine
  MOD_RES (404)..(404): Selenocysteine
  MOD_RES (406)..(406): Selenocysteine
  MOD_RES (410)..(410): Selenocysteine
  MOD_RES (416)..(416): Selenocysteine
  MOD_RES (437)..(437): Selenocysteine
  MOD_RES (440)..(440): Selenocysteine
  MOD_RES (444)..(444): Selenocysteine
  MOD_RES (449)..(449): Selenocysteine
  MOD_RES (457)..(457): Selenocysteine
  MOD_RES (472)..(472): Selenocysteine
  MOD_RES (501)..(501): Selenocysteine
  MOD_RES (504)..(504): Selenocysteine
  MOD_RES (515)..(515): Selenocysteine
  MOD_RES (536)..(537): Selenocysteine
  MOD_RES (546)..(547): Selenocysteine
  MOD_RES (551)..(551): Selenocysteine
  MOD_RES (554)..(554): Selenocysteine
  MOD_RES (568)..(568): Selenocysteine
  MOD_RES (576)..(576): Selenocysteine
  MOD_RES (594)..(594): Selenocysteine
  MOD_RES (605)..(605): Selenocysteine
  MOD_RES (608)..(608): Selenocysteine
  MOD_RES (617)..(617): Selenocysteine
  MOD_RES (647)..(647): Selenocysteine
  MOD_RES (661)..(661): Selenocysteine
  MOD_RES (668)..(668): Selenocysteine
  MOD_RES (682)..(682): Selenocysteine
  MOD_RES (702)..(702): Selenocysteine
  MOD_RES (711)..(711): Selenocysteine
  MOD_RES (780)..(780): Selenocysteine
  MOD_RES (782)..(782): Selenocysteine
  MOD_RES (852)..(852): Selenocysteine
  MOD_RES (857)..(857): Selenocysteine
MASRRKSXXPCMVLASEQDPDLELISDLDEGPPVLXPVENXRAESISSDEEVHESVDSDNQQNKKVEGGYECKYCXFQXPDLNMFXFHVDSEHPNVVLNSSYVCVECNFLXKRYDALSEHNLKYHPGEENFKLXMVKRNNQXIFEQXINDLXFDGSFVKEENAEQAESXEVSSSGISISKXPIMKMMKNKVENKRIAVHHNSVEDVPEEKENEIKPDREEIVENPSSSASESNXSXSIVNRIHPSXASXVVXPAAVLPGLAQVIXAVSAQQNSNLIPKVLIPVNSIPXYNAALDNNPLLLNXYNKFPYPXMSEIXVLSAQAKYXEEQIKIWFSAQRLKHGVSWXPEEVEEARRKQFNGXVHXVPQXIXVIPXHISXGSNGLPSILQXCQIVGQPGLVLXQVAGXNXLPVXAPIALXVAGVPSQNNIQKSQVPAAQPXAEXKPAXAAVPXSQSVKHEXALVNPDSFGIRAKKXKEQLAELKVSYLKNQFPHDSEIIRLMKIXGLXKGEIKKWFSDXRYNQRNSKSNQCLHLNNDSSXXIIIDSSDEXXESPXVGXAQPKQSWNPFPDFXPQKFKEKXAEQLRVLQASFLNSSVLXDEELNRLRAQXKLXRREIDAWFXEKKKSKALKEEKMEIDESNAGSSKEEAGEXSPADESGAPKSGSXGKICKKXPEQLHMLKSAFVRXQWPSPEEYDKLAKESGLARXDIVSWFGDXRYAWKNGNLKWYYYYQSANSSSMNGLSSLRKRGRGRPKGRGRGRPRGRPRGSKRINNWDRGPSLIKFKXGXAILKDYYLKHKFLNEQDLDELVNKSHMGYEQVREWFAERQRRSELGIELFEENEEEDEVIDDQEEDEEEXDDSDXWEPPRHVKRKLSKSDD

SEQ ID NO: 30274 - protein, 39 aa, Homo sapiens
  MOD_RES (1)..(1): Any amino acid
  MOD_RES (18)..(18): Selenocysteine
  MOD_RES (23)..(23): Selenocysteine
XEEEDEVIDDQEEDEEEXDDSDXWEPPRHVKRKLSKSDD

SEQ ID NO: 30275 - protein, 166 aa, Homo sapiens
  MOD_RES (8)..(9): Selenocysteine
  MOD_RES (15)..(15): Selenocysteine
  MOD_RES (37)..(37): Selenocysteine
  MOD_RES (87)..(87): Selenocysteine
  MOD_RES (94)..(94): Selenocysteine
  MOD_RES (118)..(119): Selenocysteine
  MOD_RES (150)..(150): Selenocysteine
  MOD_RES (158)..(159): Selenocysteine
  MOD_RES (166)..(166): Selenocysteine
MASKRKSXXPCMVRXSQVVEQDVPEEVDRAKEKGIGXPQPDVAKDSWAAELENSSKENEVIEVKSMGESQSKKLQGGYECKYCPYSXQNLNEFXEHVDMQHPNVILNPLYVCAECNFXXKKYDSLSDHNSKFHPGEANFKLKLIKRNNQXVLEQSIEXXNHVVSIX

SEQ ID NO: 30276 - protein, 837 aa, Homo sapiens
  MOD_RES (8)..(9): Selenocysteine
  MOD_RES (15)..(15): Selenocysteine
  MOD_RES (37)..(37): Selenocysteine
  MOD_RES (87)..(87): Selenocysteine
  MOD_RES (94)..(94): Selenocysteine
  MOD_RES (118)..(119): Selenocysteine
  MOD_RES (150)..(150): Selenocysteine
  MOD_RES (158)..(159): Selenocysteine
  MOD_RES (166)..(167): Selenocysteine
  MOD_RES (172)..(172): Selenocysteine
  MOD_RES (184)..(184): Selenocysteine
  MOD_RES (207)..(207): Selenocysteine
  MOD_RES (215)..(215): Selenocysteine
  MOD_RES (220)..(220): Selenocysteine
  MOD_RES (222)..(222): Selenocysteine
  MOD_RES (238)..(238): Selenocysteine
  MOD_RES (264)..(265): Selenocysteine
  MOD_RES (273)..(273): Selenocysteine
  MOD_RES (276)..(276): Selenocysteine
  MOD_RES (288)..(288): Selenocysteine
  MOD_RES (296)..(296): Selenocysteine
  MOD_RES (312)..(312): Selenocysteine
  MOD_RES (337)..(337): Selenocysteine
  MOD_RES (344)..(344): Selenocysteine
  MOD_RES (346)..(346): Selenocysteine
  MOD_RES (355)..(355): Selenocysteine
  MOD_RES (358)..(358): Selenocysteine
  MOD_RES (364)..(364): Selenocysteine
  MOD_RES (374)..(374): Selenocysteine
  MOD_RES (379)..(379): Selenocysteine
  MOD_RES (382)..(382): Selenocysteine
  MOD_RES (386)..(387): Selenocysteine
  MOD_RES (394)..(394): Selenocysteine
  MOD_RES (401)..(401): Selenocysteine
  MOD_RES (411)..(411): Selenocysteine
  MOD_RES (439)..(439): Selenocysteine
  MOD_RES (447)..(447): Selenocysteine
  MOD_RES (476)..(476): Selenocysteine
  MOD_RES (502)..(502): Selenocysteine
  MOD_RES (521)..(521): Selenocysteine
  MOD_RES (537)..(537): Selenocysteine
  MOD_RES (555)..(555): Selenocysteine
  MOD_RES (566)..(566): Selenocysteine
  MOD_RES (623)..(623): Selenocysteine
  MOD_RES (646)..(646): Selenocysteine
  MOD_RES (650)..(650): Selenocysteine
  MOD_RES (654)..(654): Selenocysteine
  MOD_RES (665)..(665): Selenocysteine
  MOD_RES (670)..(670): Selenocysteine
  MOD_RES (685)..(685): Selenocysteine
  MOD_RES (687)..(687): Selenocysteine
  MOD_RES (713)..(713): Selenocysteine
  MOD_RES (747)..(747): Selenocysteine
  MOD_RES (768)..(768): Selenocysteine
  MOD_RES (797)..(797): Selenocysteine
MASKRKSXXPCMVRXSQVVEQDVPEEVDRAKEKGIGXPQPDVAKDSWAAELENSSKENEVIEVKSMGESQSKKLQGGYECKYCPYSXQNLNEFXEHVDMQHPNVILNPLYVCAECNFXXKKYDSLSDHNSKFHPGEANFKLKLIKRNNQXVLEQSIEXXNHVVSIXXSGPGXGDSDSGISVSKXPIMKPGKPKADAKKVPKKPEEIXPENHVEGXARLVXDXAEILSRLGGVELLQDXLGHVMPSVQLPPNINLVPKVPVPLNXXKYNSALDXNAXMINSFNKFPYPXQAELSWLXAASKHPEEHIRIWFAXQRLKHGISWSPEEVEEARKKMFNGXIQSVPPXIXVLPAQLAPXKVXQPILQXALPCQILGQXSLVLXQVXSGSXXVSCSPIXLAVAGVXNHGQKRPLVXPQAAPEPKRPHIAQVPEPPPKVANPPLXPASDRKKXKEQIAHLKASFLQSQFPDDAEVYRLIEVXGLARSEIKKWFSDHRYRCQRGIVHIXSESLAKDQLAIAASRHGRXYHAYPDFAPQKFKEKXQGQVKILEDSFLKSSFPXQAELDRLRVEXKLSRREIDSWFSERRKLRDSMEQAVLDSMGSGKKGQDVGAPNGALSRLDQLSGAQLXSSLPSPSPAIAKSQEQVHLLRSXFARXQWPXPQEYDQLAAKXGLVRXEIVRWFKENRCLLKXGXVKWMEQYQHQPMADDHGYDAVARKAXKPMAESPKNGGDVVPQYYKDPKKLCEEDLEKLVXRVKVGSEPAKDCLPAKPSEAXSDRSEGSSRDGQGSDENEESSVVDYVEVXVGEEDAISDRSDSWSQAAAEGVSELAESDSDCVPAEAGQA

SEQ ID NO: 30277 - protein, 46 aa, Homo sapiens
  MOD_RES (8)..(9): Selenocysteine
  MOD_RES (17)..(17): Selenocysteine
  MOD_RES (32)..(32): Selenocysteine
MASKRKSXXPCMIPVKXVVLQDASMEAQPAEXLPEGPQQDLPPEAS

SEQ ID NO: 30278 - protein, 48 aa, Homo sapiens
  MOD_RES (8)..(9): Selenocysteine
  MOD_RES (17)..(17): Selenocysteine
  MOD_RES (32)..(32): Selenocysteine
MASKRKSXXPCMIPVKXVVLQDASMEAQPAEXLPEGPQQDLPPEASAA

SEQ ID NO: 30279 - protein, 90 aa, Homo sapiens
  MOD_RES (8)..(9): Selenocysteine
  MOD_RES (17)..(17): Selenocysteine
  MOD_RES (32)..(32): Selenocysteine
  MOD_RES (59)..(59): Selenocysteine
  MOD_RES (63)..(63): Selenocysteine
  MOD_RES (71)..(71): Selenocysteine
  MOD_RES (90)..(90): Selenocysteine
MASKRKSXXPCMIPVKXVVLQDASMEAQPAEXLPEGPQQDLPPEASAASSEAAQNPSSXDGSXLANGHRSXLDGYLYSCKYCDFRSHDMX

SEQ ID NO: 30280 - protein, 96 aa, Homo sapiens
  MOD_RES (8)..(9): Selenocysteine
  MOD_RES (17)..(17): Selenocysteine
  MOD_RES (32)..(32): Selenocysteine
  MOD_RES (59)..(59): Selenocysteine
  MOD_RES (63)..(63): Selenocysteine
  MOD_RES (71)..(71): Selenocysteine
  MOD_RES (90)..(90): Selenocysteine
MASKRKSXXPCMIPVKXVVLQDASMEAQPAEXLPEGPQQDLPPEASAASSEAAQNPSSXDGSXLANGHRSXLDGYLYSCKYCDFRSHDMXQFVGHM

SEQ ID NO: 30281 - protein, 118 aa, Homo sapiens
  MOD_RES (8)..(9): Selenocysteine
  MOD_RES (17)..(17): Selenocysteine
  MOD_RES (32)..(32): Selenocysteine
  MOD_RES (59)..(59): Selenocysteine
  MOD_RES (63)..(63): Selenocysteine
  MOD_RES (71)..(71): Selenocysteine
  MOD_RES (90)..(90): Selenocysteine
  MOD_RES (101)..(101): Selenocysteine
  MOD_RES (108)..(108): Selenocysteine
MASKRKSXXPCMIPVKXVVLQDASMEAQPAEXLPEGPQQDLPPEASAASSEAAQNPSSXDGSXLANGHRSXLDGYLYSCKYCDFRSHDMXQFVGHMNSEHXDFNKDPXFVCSGCSFLA

SEQ ID NO: 30282 - protein, 315 aa, Homo sapiens
  MOD_RES (8)..(9): Selenocysteine
  MOD_RES (17)..(17): Selenocysteine
  MOD_RES (32)..(32): Selenocysteine
  MOD_RES (59)..(59): Selenocysteine
  MOD_RES (63)..(63): Selenocysteine
  MOD_RES (71)..(71): Selenocysteine
  MOD_RES (90)..(90): Selenocysteine
  MOD_RES (101)..(101): Selenocysteine
  MOD_RES (108)..(108): Selenocysteine
  MOD_RES (120)..(120): Selenocysteine
  MOD_RES (130)..(130): Selenocysteine
  MOD_RES (159)..(159): Selenocysteine
  MOD_RES (161)..(161): Selenocysteine
  MOD_RES (182)..(182): Selenocysteine
  MOD_RES (184)..(184): Selenocysteine
  MOD_RES (201)..(201): Selenocysteine
  MOD_RES (220)..(220): Selenocysteine
  MOD_RES (227)..(227): Selenocysteine
  MOD_RES (242)..(242): Selenocysteine
  MOD_RES (252)..(252): Selenocysteine
  MOD_RES (276)..(276): Selenocysteine
  MOD_RES (308)..(308): Selenocysteine
MASKRKSXXPCMIPVKXVVLQDASMEAQPAEXLPEGPQQDLPPEASAASSEAAQNPSSXDGSXLANGHRSXLDGYLYSCKYCDFRSHDMXQFVGHMNSEHXDFNKDPXFVCSGCSFLAKXPEGLSLHNAXCHSGEASFVWNVAKPDNHVVVEQSIPESXSXPDLAGEPSAEGADGQAEIIIXKXPIMKIMKGKAEAKKIHXLKENVPSQPVGEALPKLSXGEMEKQXEFDLINVKDWPVWEXACHVEEPNPXLCCHMPFPCPAAGHLGELPESSQXAQSLPLPSACPPPSKQQARWGSHQFFLPQCRXFPLPSNG

SEQ ID NO: 30283 - protein, 956 aa, Homo sapiens
  MOD_RES (8)..(9): Selenocysteine
  MOD_RES (17)..(17): Selenocysteine
  MOD_RES (32)..(32): Selenocysteine
  MOD_RES (59)..(59): Selenocysteine
  MOD_RES (63)..(63): Selenocysteine
  MOD_RES (71)..(71): Selenocysteine
  MOD_RES (90)..(90): Selenocysteine
  MOD_RES (101)..(101): Selenocysteine
  MOD_RES (108)..(108): Selenocysteine
  MOD_RES (120)..(120): Selenocysteine
  MOD_RES (130)..(130): Selenocysteine
  MOD_RES (159)..(159): Selenocysteine
  MOD_RES (161)..(161): Selenocysteine
  MOD_RES (182)..(182): Selenocysteine
  MOD_RES (184)..(184): Selenocysteine
  MOD_RES (201)..(201): Selenocysteine
  MOD_RES (220)..(220): Selenocysteine
  MOD_RES (260)..(260): Selenocysteine
  MOD_RES (292)..(292): Selenocysteine
  MOD_RES (308)..(308): Selenocysteine
  MOD_RES (330)..(330): Selenocysteine
  MOD_RES (338)..(338): Selenocysteine
  MOD_RES (341)..(341): Selenocysteine
  MOD_RES (353)..(353): Selenocysteine
  MOD_RES (378)..(378): Selenocysteine
  MOD_RES (387)..(387): Selenocysteine
  MOD_RES (389)..(389): Selenocysteine
  MOD_RES (393)..(393): Selenocysteine
  MOD_RES (421)..(421): Selenocysteine
  MOD_RES (428)..(428): Selenocysteine
  MOD_RES (439)..(439): Selenocysteine
  MOD_RES (446)..(446): Selenocysteine
  MOD_RES (448)..(448): Selenocysteine
  MOD_RES (461)..(461): Selenocysteine
  MOD_RES (466)..(467): Selenocysteine
  MOD_RES (481)..(481): Selenocysteine
  MOD_RES (487)..(487): Selenocysteine
  MOD_RES (528)..(528): Selenocysteine
  MOD_RES (531)..(531): Selenocysteine
  MOD_RES (535)..(535): Selenocysteine
  MOD_RES (586)..(586): Selenocysteine
  MOD_RES (590)..(591): Selenocysteine
  MOD_RES (593)..(593): Selenocysteine
  MOD_RES (596)..(596): Selenocysteine
  MOD_RES (608)..(608): Selenocysteine
  MOD_RES (612)..(612): Selenocysteine
  MOD_RES (614)..(614): Selenocysteine
  MOD_RES (649)..(649): Selenocysteine
  MOD_RES (652)..(652): Selenocysteine
  MOD_RES (672)..(672): Selenocysteine
  MOD_RES (735)..(735): Selenocysteine
  MOD_RES (772)..(772): Selenocysteine
  MOD_RES (786)..(786): Selenocysteine
  MOD_RES (801)..(801): Selenocysteine
  MOD_RES (856)..(856): Selenocysteine
  MOD_RES (872)..(872): Selenocysteine
  MOD_RES (891)..(891): Selenocysteine
  MOD_RES (897)..(897): Selenocysteine
  MOD_RES (906)..(906): Selenocysteine
  MOD_RES (910)..(910): Selenocysteine
  MOD_RES (919)..(919): Selenocysteine
  MOD_RES (944)..(944): Selenocysteine
  MOD_RES (955)..(955): Selenocysteine
MASKRKSXXPCMIPVKXVVLQDASMEAQPAEXLPEGPQQDLPPEASAASSEAAQNPSSXDGSXLANGHRSXLDGYLYSCKYCDFRSHDMXQFVGHMNSEHXDFNKDPXFVCSGCSFLAKXPEGLSLHNAXCHSGEASFVWNVAKPDNHVVVEQSIPESXSXPDLAGEPSAEGADGQAEIIIXKXPIMKIMKGKAEAKKIHXLKENVPSQPVGEALPKLSXGEMEVREGDHSFINGAVPVSQASASSAKNPHAANGPLIGXVPVLPAGIAQFLSLQQQPPVHAQHHVHQPLPXAKALPKVMIPLSSIPXYNAAMDSNSFLKNSFHKFPYPXKAELCYLXVVXKYPEEQLKIWFXAQRLKQGISWSPEEIEDARKKMFNXVIQSVPQPXIXVLNXPLVASAGNVQHLIQAALPGHVVGQPEGXGGGLLVXQPLMANGLQAXSSPLPLXVXSVPKQPGVAPINXVCSNXXSAVKVVNAAQSLLXACPSIXSQAFLDASIYKNKKSHEQLSALKGSFCRNQFPGQSEVEHLXKVXGLSXREVRKWFSDRRYHCRNLKGSRAMIPGDHSSIIIDSVPEVSFSPSSKVPEVXCIPXXAXLAXHPSAKRQSWHQXPDFXPXKYKERAPEQLRALESSFAQNPLPLDEELDRLRSEXKMXRREIDSWFSERRKKVNAEEXKKAEENASQEEEEAAEDEGGEEDLASELRVSGENGSLEMPSSHILAERKVSPIKINLKNLRVXEANGRNEIPGLGACDPEDDESNKLAEQLPGKVSCKKXAQQRHLLRQLFVQXQWPSNQDYDSIMAQXGLPRPEVVRWFGDSRYALKNGQLKWYEDYKRGNFPPGLLVIAPGNRELLQDYYMXHKMLYEEDLQNLCDKXQMSSQQVKQWFAEKMGEEXRAVADXGSEDQGPGXGELXAVHKGMGDXYSEVSENSESWEPRVPEASSEPFDXSSPQAGRQLEXD

SEQ ID NO: 30284 - protein, 969 aa, Homo sapiens
  MOD_RES (8)..(9): Selenocysteine
  MOD_RES (17)..(17): Selenocysteine
  MOD_RES (32)..(32): Selenocysteine
  MOD_RES (59)..(59): Selenocysteine
  MOD_RES (63)..(63): Selenocysteine
  MOD_RES (71)..(71): Selenocysteine
  MOD_RES (90)..(90): Selenocysteine
  MOD_RES (101)..(101): Selenocysteine
  MOD_RES (108)..(108): Selenocysteine
  MOD_RES (120)..(120): Selenocysteine
  MOD_RES (130)..(130): Selenocysteine
  MOD_RES (159)..(159): Selenocysteine
  MOD_RES (161)..(161): Selenocysteine
  MOD_RES (182)..(182): Selenocysteine
  MOD_RES (184)..(184): Selenocysteine
  MOD_RES (201)..(201): Selenocysteine
  MOD_RES (220)..(220): Selenocysteine
  MOD_RES (260)..(260): Selenocysteine
  MOD_RES (292)..(292): Selenocysteine
  MOD_RES (308)..(308): Selenocysteine
  MOD_RES (330)..(330): Selenocysteine
  MOD_RES (338)..(338): Selenocysteine
  MOD_RES (341)..(341): Selenocysteine
  MOD_RES (353)..(353): Selenocysteine
  MOD_RES (378)..(378): Selenocysteine
  MOD_RES (387)..(387): Selenocysteine
  MOD_RES (389)..(389): Selenocysteine
  MOD_RES (393)..(393): Selenocysteine
  MOD_RES (421)..(421): Selenocysteine
  MOD_RES (428)..(428): Selenocysteine
  MOD_RES (439)..(439): Selenocysteine
  MOD_RES (446)..(446): Selenocysteine
  MOD_RES (448)..(448): Selenocysteine
  MOD_RES (461)..(461): Selenocysteine
  MOD_RES (466)..(467): Selenocysteine
  MOD_RES (481)..(481): Selenocysteine
  MOD_RES (487)..(487): Selenocysteine
  MOD_RES (528)..(528): Selenocysteine
  MOD_RES (531)..(531): Selenocysteine
  MOD_RES (535)..(535): Selenocysteine
  MOD_RES (586)..(586): Selenocysteine
  MOD_RES (590)..(591): Selenocysteine
  MOD_RES (593)..(593): Selenocysteine
  MOD_RES (596)..(596): Selenocysteine
  MOD_RES (608)..(608): Selenocysteine
  MOD_RES (612)..(612): Selenocysteine
  MOD_RES (614)..(614): Selenocysteine
  MOD_RES (649)..(649): Selenocysteine
  MOD_RES (652)..(652): Selenocysteine
  MOD_RES (672)..(672): Selenocysteine
  MOD_RES (735)..(735): Selenocysteine
  MOD_RES (772)..(772): Selenocysteine
  MOD_RES (786)..(786): Selenocysteine
  MOD_RES (801)..(801): Selenocysteine
  MOD_RES (856)..(856): Selenocysteine
  MOD_RES (872)..(872): Selenocysteine
  MOD_RES (881)..(881): Selenocysteine
  MOD_RES (896)..(896): Selenocysteine
  MOD_RES (906)..(906): Selenocysteine
  MOD_RES (930)..(930): Selenocysteine
  MOD_RES (962)..(962): Selenocysteine
MASKRKSXXPCMIPVKXVVLQDASMEAQPAEXLPEGPQQDLPPEASAASSEAAQNPSSXDGSXLANGHRSXLDGYLYSCKYCDFRSHDMXQFVGHMNSEHXDFNKDPXFVCSGCSFLAKXPEGLSLHNAXCHSGEASFVWNVAKPDNHVVVEQSIPESXSXPDLAGEPSAEGADGQAEIIIXKXPIMKIMKGKAEAKKIHXLKENVPSQPVGEALPKLSXGEMEVREGDHSFINGAVPVSQASASSAKNPHAANGPLIGXVPVLPAGIAQFLSLQQQPPVHAQHHVHQPLPXAKALPKVMIPLSSIPXYNAAMDSNSFLKNSFHKFPYPXKAELCYLXVVXKYPEEQLKIWFXAQRLKQGISWSPEEIEDARKKMFNXVIQSVPQPXIXVLNXPLVASAGNVQHLIQAALPGHVVGQPEGXGGGLLVXQPLMANGLQAXSSPLPLXVXSVPKQPGVAPINXVCSNXXSAVKVVNAAQSLLXACPSIXSQAFLDASIYKNKKSHEQLSALKGSFCRNQFPGQSEVEHLXKVXGLSXREVRKWFSDRRYHCRNLKGSRAMIPGDHSSIIIDSVPEVSFSPSSKVPEVXCIPXXAXLAXHPSAKRQSWHQXPDFXPXKYKERAPEQLRALESSFAQNPLPLDEELDRLRSEXKMXRREIDSWFSERRKKVNAEEXKKAEENASQEEEEAAEDEGGEEDLASELRVSGENGSLEMPSSHILAERKVSPIKINLKNLRVXEANGRNEIPGLGACDPEDDESNKLAEQLPGKVSCKKXAQQRHLLRQLFVQXQWPSNQDYDSIMAQXGLPRPEVVRWFGDSRYALKNGQLKWYEDYKRGNFPPGLLVIAPGNRELLQDYYMXHKMLYEEDLQNLCDKXQMSSQQKQXEFDLINVKDWPVWEXACHVEEPNPXLCCHMPFPCPAAGHLGELPESSQXAQSLPLPSACPPPSKQQARWGSHQFFLPQCRXFPLPSNG

SEQ ID NO: 30285 - protein, 127 aa, Homo sapiens
  MOD_RES (16)..(16): Selenocysteine
  MOD_RES (32)..(32): Selenocysteine
  MOD_RES (39)..(39): Selenocysteine
  MOD_RES (54)..(54): Selenocysteine
  MOD_RES (64)..(64): Selenocysteine
  MOD_RES (88)..(88): Selenocysteine
  MOD_RES (120)..(120): Selenocysteine
VIAPGNRELLQDYYMXHKMLYEEDLQNLCDKXQMSSQQXEFDLINVKDWPVWEXACHVEEPNPXLCCHMPFPCPAAGHLGELPESSQXAQSLPLPSACPPPSKQQARWGSHQFFLPQCRXFPLPSNG

SEQ ID NO: 30286 - protein, 678 aa, Homo sapiens
  MOD_RES (1)..(1): Any amino acid
  MOD_RES (17)..(17): Selenocysteine
  MOD_RES (39)..(39): Selenocysteine
  MOD_RES (47)..(47): Selenocysteine
  MOD_RES (50)..(50): Selenocysteine
  MOD_RES (62)..(62): Selenocysteine
  MOD_RES (87)..(87): Selenocysteine
  MOD_RES (96)..(96): Selenocysteine
  MOD_RES (98)..(98): Selenocysteine
  MOD_RES (102)..(102): Selenocysteine
  MOD_RES (130)..(130): Selenocysteine
  MOD_RES (137)..(137): Selenocysteine
  MOD_RES (148)..(148): Selenocysteine
  MOD_RES (155)..(155): Selenocysteine
  MOD_RES (157)..(157): Selenocysteine
  MOD_RES (170)..(170): Selenocysteine
  MOD_RES (175)..(176): Selenocysteine
  MOD_RES (190)..(190): Selenocysteine
  MOD_RES (196)..(196): Selenocysteine
  MOD_RES (237)..(237): Selenocysteine
  MOD_RES (240)..(240): Selenocysteine
  MOD_RES (244)..(244): Selenocysteine
  MOD_RES (295)..(295): Selenocysteine
  MOD_RES (299)..(300): Selenocysteine
  MOD_RES (302)..(302): Selenocysteine
  MOD_RES (305)..(305): Selenocysteine
  MOD_RES (317)..(317): Selenocysteine
  MOD_RES (321)..(321): Selenocysteine
  MOD_RES (323)..(323): Selenocysteine
  MOD_RES (358)..(358): Selenocysteine
  MOD_RES (361)..(361): Selenocysteine
  MOD_RES (381)..(381): Selenocysteine
  MOD_RES (444)..(444): Selenocysteine
  MOD_RES (481)..(481): Selenocysteine
  MOD_RES (495)..(495): Selenocysteine
  MOD_RES (510)..(510): Selenocysteine
  MOD_RES (565)..(565): Selenocysteine
  MOD_RES (581)..(581): Selenocysteine
  MOD_RES (600)..(600): Selenocysteine
  MOD_RES (606)..(606): Selenocysteine
  MOD_RES (615)..(615): Selenocysteine
  MOD_RES (619)..(619): Selenocysteine
  MOD_RES (628)..(628): Selenocysteine
  MOD_RES (653)..(653): Selenocysteine
  MOD_RES (677)..(677): Selenocysteine
XAKALPKVMIPLSSIPXYNAAMDSNSFLKNSFHKFPYPXKAELCYLXVVXKYPEEQLKIWFXAQRLKQGISWSPEEIEDARKKMFNXVIQSVPQPXIXVLNXPLVASAGNVQHLIQAALPGHVVGQPEGXGGGLLVXQPLMANGLQAXSSPLPLXVXSVPKQPGVAPINXVCSNXXSAVKVVNAAQSLLXACPSIXSQAFLDASIYKNKKSHEQLSALKGSFCRNQFPGQSEVEHLXKVXGLSXREVRKWFSDRRYHCRNLKGSRAMIPGDHSSIIIDSVPEVSFSPSSKVPEVXCIPXXAXLAXHPSAKRQSWHQXPDFXPXKYKERAPEQLRALESSFAQNPLPLDEELDRLRSEXKMXRREIDSWFSERRKKVNAEEXKKAEENASQEEEEAAEDEGGEEDLASELRVSGENGSLEMPSSHILAERKVSPIKINLKNLRVXEANGRNEIPGLGACDPEDDESNKLAEQLPGKVSCKKXAQQRHLLRQLFVQXQWPSNQDYDSIMAQXGLPRPEVVRWFGDSRYALKNGQLKWYEDYKRGNFPPGLLVIAPGNRELLQDYYMXHKMLYEEDLQNLCDKXQMSSQQVKQWFAEKMGEEXRAVADXGSEDQGPGXGELXAVHKGMGDXYSEVSENSESWEPRVPEASSEPFDXSSPQAGRQLGSWSLSSQPLPSLLXL

SEQ ID NO: 30287 - protein, 447 aa, Homo sapiens
  MOD_RES (15)..(16): Selenocysteine
  MOD_RES (62)..(62): Selenocysteine
  MOD_RES (65)..(65): Selenocysteine
  MOD_RES (97)..(97): Selenocysteine
  MOD_RES (135)..(135): Selenocysteine
  MOD_RES (182)..(182): Selenocysteine
  MOD_RES (245)..(245): Selenocysteine
  MOD_RES (248)..(248): Selenocysteine
  MOD_RES (254)..(254): Selenocysteine
  MOD_RES (257)..(257): Selenocysteine
  MOD_RES (297)..(297): Selenocysteine
  MOD_RES (325)..(325): Selenocysteine
  MOD_RES (327)..(327): Selenocysteine
  MOD_RES (357)..(357): Selenocysteine
  MOD_RES (372)..(372): Selenocysteine
  MOD_RES (405)..(405): Selenocysteine
  MOD_RES (408)..(408): Selenocysteine
  MOD_RES (414)..(414): Selenocysteine
  MOD_RES (418)..(419): Selenocysteine
  MOD_RES (432)..(432): Selenocysteine
MLLDAGPQYPAIGVXXFGASRHHSAGDVAERDVGLGINPFADGMGAFKLNPSSHELASAGQXAFXSQAPGYAAAAALGHHHHPGHVGSYSSAAFNSXRDFLFRNRGFGDAAAAASAQHSLFAASAGGFGGPHGHXDAAGHLLFPGLHEQAAGHASPNVVNGQMRLGFSGDMYPRPEQYGQVXSPRSEHYAAPQLHGYGPMNVNMAAHHGAGAFFRYMRQPIKQELICKWIEPEQLANPKKSCNKXFSXMHELVXHVXVEHVGGPEQSNHICFWEECPREGKPFKAKYKLVNHIRVHXGEKPFPCPFPGCGKVFARSENLKIHKRXHXGEKPFKCEFEGCDRRFANSSDRKKHMHVHXSDKPYLCKMCDKSYXHPSSLRKHMKVHESSSQGSQPSPAASSGYESSXPPXIVSPSXDNPXXSSLSPSSSAVHHXAGHSALSSNFNEWYV

SEQ ID NO: 30288 - protein, 136 aa, Homo sapiens
  MOD_RES (1)..(1): Any amino acid
  MOD_RES (46)..(46): Selenocysteine
  MOD_RES (61)..(61): Selenocysteine
  MOD_RES (94)..(94): Selenocysteine
  MOD_RES (97)..(97): Selenocysteine
  MOD_RES (103)..(103): Selenocysteine
  MOD_RES (107)..(108): Selenocysteine
  MOD_RES (121)..(121): Selenocysteine
XPFGADSRLQSQAPDSGEKPFKCEFEGCDRRFANSSDRKKHMHVHXSDKPYLCKMCDKSYXHPSSLRKHMKVHESSSQGSQPSPAASSGYESSXPPXIVSPSXDNPXXSSLSPSSSAVHHXAGHSALSSNFNEWYV

SEQ ID NO: 30289 - protein, 532 aa, Homo sapiens
  MOD_RES (78)..(78): Selenocysteine
  MOD_RES (116)..(116): Selenocysteine
  MOD_RES (202)..(202): Selenocysteine
  MOD_RES (276)..(276): Selenocysteine
  MOD_RES (279)..(279): Selenocysteine
  MOD_RES (285)..(285): Selenocysteine
  MOD_RES (328)..(328): Selenocysteine
  MOD_RES (356)..(356): Selenocysteine
  MOD_RES (358)..(358): Selenocysteine
  MOD_RES (388)..(388): Selenocysteine
  MOD_RES (403)..(403): Selenocysteine
  MOD_RES (436)..(436): Selenocysteine
  MOD_RES (516)..(516): Selenocysteine
MLLDAGPQFPAIGVGSFARHHHHSAAAAAAAAAEMQDRELSLAAAQNGFVDSAAAHMGAFKLNPGAHELSPGQSSAFXSQGPGAYPGSAAAAAAAAALGPHAAHVGSYSGPPFNSXRDFLFRSRGFGDSAPGGGQHGLFGPGAGGLHHAHSDAQGHLLFPGLPEQHGPHGSQNVLNGQMRLGLPGEVFGRSEQYRQVASPRXDPYSAAQLHNQYGPMNMNMGMNMAAAAAHHHHHHHHHPGAFFRYMRQQCIKQELICKWIDPEQLSNPKKSCNKXFSXMHELVXHVSVEHVGGPEQSNHVCFWEECPREGKPFKAKYKLVNHIRVHXGEKPFPCPFPGCGKVFARSENLKIHKRXHXGEKPFQCEFEGCDRRFANSSDRKKHMHVHXSDKPYLCKMCDKSYXHPSSLRKHMKVHESSPQGSESSPAASSGYESSXPPGLVSPSAEPQSSSNLSPAAAAAAAAAAAAAAAVSAVHRGGGSGSGGAGGGSGGGSGSGGGGGGAGGGGGGSSGGGSGXAGGHSGLSSNFNEWYV

SEQ ID NO: 30290 - protein, 457 aa, Homo sapiens
  MOD_RES (2)..(2): Selenocysteine
  MOD_RES (44)..(44): Selenocysteine
  MOD_RES (75)..(75): Selenocysteine
  MOD_RES (98)..(98): Selenocysteine
  MOD_RES (115)..(115): Selenocysteine
  MOD_RES (176)..(176): Selenocysteine
  MOD_RES (207)..(207): Selenocysteine
  MOD_RES (271)..(271): Selenocysteine
  MOD_RES (274)..(274): Selenocysteine
  MOD_RES (280)..(280): Selenocysteine
  MOD_RES (283)..(283): Selenocysteine
  MOD_RES (323)..(323): Selenocysteine
  MOD_RES (351)..(351): Selenocysteine
  MOD_RES (353)..(353): Selenocysteine
  MOD_RES (383)..(383): Selenocysteine
  MOD_RES (398)..(398): Selenocysteine
  MOD_RES (427)..(427): Selenocysteine
  MOD_RES (439)..(440): Selenocysteine
  MOD_RES (451)..(451): Selenocysteine
MXMLLDGGPQFPGLGVGSFGAPRHHEMPNREPAGMGLNPFGDSXHAAAAAAAAAAFKLSPAAAHDLSSGQSSAFXPQGSGYANALGHHHHHHHHHHHXSQVPSYGGAASAAFNSXREFLFRQRSSGLSEAASGGGQHGLFAGSASSLHAPAGIPEPPSYLLFPGLHEQGAGHPSPXGHVDNNQVHLGLRGELFGRADPYRPVASPRXDPYAAGAQFPNYSPMNMNMGVNVAAHHGPGAFFRYMRQPIKQELSCKWIDEAQLSRPKKSCDRXFSXMHELVXHVXMEHVGGPEQNNHVCYWEECPREGKSFKAKYKLVNHIRVHXGEKPFPCPFPGCGKIFARSENLKIHKRXHXGEKPFKCEFEGCDRRFANSSDRKKHMHVHXSDKPYICKVCDKSYXHPSSLRKHMKCCPAWYPGQSLIPDEELDXDVGMQQPALHNXXYPKCRVNAEPXVQEMIY

SEQ ID NO: 30291 - protein, 467 aa, Homo sapiens
  MOD_RES (2)..(2): Selenocysteine
  MOD_RES (44)..(44): Selenocysteine
  MOD_RES (75)..(75): Selenocysteine
  MOD_RES (98)..(98): Selenocysteine
  MOD_RES (115)..(115): Selenocysteine
  MOD_RES (176)..(176): Selenocysteine
  MOD_RES (207)..(207): Selenocysteine
  MOD_RES (271)..(271): Selenocysteine
  MOD_RES (274)..(274): Selenocysteine
  MOD_RES (280)..(280): Selenocysteine
  MOD_RES (283)..(283): Selenocysteine
  MOD_RES (323)..(323): Selenocysteine
  MOD_RES (351)..(351): Selenocysteine
  MOD_RES (353)..(353): Selenocysteine
  MOD_RES (383)..(383): Selenocysteine
  MOD_RES (398)..(398): Selenocysteine
  MOD_RES (429)..(429): Selenocysteine
  MOD_RES (441)..(442): Selenocysteine
  MOD_RES (444)..(444): Selenocysteine
  MOD_RES (450)..(450): Selenocysteine
  MOD_RES (452)..(452): Selenocysteine
MXMLLDGGPQFPGLGVGSFGAPRHHEMPNREPAGMGLNPFGDSXHAAAAAAAAAAFKLSPAAAHDLSSGQSSAFXPQGSGYANALGHHHHHHHHHHHXSQVPSYGGAASAAFNSXREFLFRQRSSGLSEAASGGGQHGLFAGSASSLHAPAGIPEPPSYLLFPGLHEQGAGHPSPXGHVDNNQVHLGLRGELFGRADPYRPVASPRXDPYAAGAQFPNYSPMNMNMGVNVAAHHGPGAFFRYMRQPIKQELSCKWIDEAQLSRPKKSCDRXFSXMHELVXHVXMEHVGGPEQNNHVCYWEECPREGKSFKAKYKLVNHIRVHXGEKPFPCPFPGCGKIFARSENLKIHKRXHXGEKPFKCEFEGCDRRFANSSDRKKHMHVHXSDKPYICKVCDKSYXHPSSLRKHMKVHESQGSDSSPAASSGYESSXPPAIASANSKDXXKXPSAVQXSXSHNPGLPPNFNEWYV

SEQ ID NO: 30292 - protein, 372 aa, Homo sapiens
  MOD_RES (19)..(19): Selenocysteine
  MOD_RES (23)..(23): Selenocysteine
  MOD_RES (43)..(43): Selenocysteine
  MOD_RES (57)..(57): Selenocysteine
  MOD_RES (73)..(73): Selenocysteine
  MOD_RES (142)..(142): Selenocysteine
  MOD_RES (176)..(176): Selenocysteine
  MOD_RES (178)..(178): Selenocysteine
  MOD_RES (185)..(185): Selenocysteine
  MOD_RES (188)..(188): Selenocysteine
  MOD_RES (194)..(194): Selenocysteine
  MOD_RES (197)..(197): Selenocysteine
  MOD_RES (237)..(237): Selenocysteine
  MOD_RES (265)..(265): Selenocysteine
  MOD_RES (267)..(267): Selenocysteine
  MOD_RES (297)..(297): Selenocysteine
  MOD_RES (303)..(303): Selenocysteine
  MOD_RES (314)..(314): Selenocysteine
  MOD_RES (340)..(340): Selenocysteine
  MOD_RES (367)..(367): Selenocysteine
MNGPCQSLRKAEGLLEGCXSAVXVFRKLPLDSKAQSQKMRYKXSLVMRKRLRLYRNXLKESSSSSGHHGPQLXAASSPSVFPGLHEEPPQASPSRPLNGLLRLGLPGDMYARPEPFPPGPAARSDALAAAAALHGYGGMNLXVNLAAPHGPGAFFRYMRQPIKQELICKWLAADGXAXPSLCSKXFSXMHELVXHVXVEHVGGPEQANHICFWEECPRQGKPFKAKYKLVNHIRVHXGEKPFPCPFPGCGKVFARSENLKIHKRXHXGEKPFRCEFEGCERRFANSSDRKKHSHVHXSDKPYXCKVRGCDKCYXHPSSLRKHMKVHGRSPPPSSGYDSAXPSALVSPSSDCGHKSQVASSAAVAARXADLSE

SEQ ID NO: 30293 - protein, 384 aa, Homo sapiens
  MOD_RES (41)..(41): Selenocysteine
  MOD_RES (55)..(55): Selenocysteine
  MOD_RES (69)..(69): Selenocysteine
  MOD_RES (85)..(85): Selenocysteine
  MOD_RES (154)..(154): Selenocysteine
  MOD_RES (188)..(188): Selenocysteine
  MOD_RES (190)..(190): Selenocysteine
  MOD_RES (197)..(197): Selenocysteine
  MOD_RES (200)..(200): Selenocysteine
  MOD_RES (206)..(206): Selenocysteine
  MOD_RES (209)..(209): Selenocysteine
  MOD_RES (249)..(249): Selenocysteine
  MOD_RES (277)..(277): Selenocysteine
  MOD_RES (279)..(279): Selenocysteine
  MOD_RES (309)..(309): Selenocysteine
  MOD_RES (315)..(315): Selenocysteine
  MOD_RES (326)..(326): Selenocysteine
  MOD_RES (352)..(352): Selenocysteine
  MOD_RES (379)..(379): Selenocysteine
MPPFCRNAKLGLLSFLICAGRSLLPLGKNAFWLERIENNNXLWEKAQSQKMRYKXSLVMRKRLRLYRNXLKESSSSSGHHGPQLXAASSPSVFPGLHEEPPQASPSRPLNGLLRLGLPGDMYARPEPFPPGPAARSDALAAAAALHGYGGMNLXVNLAAPHGPGAFFRYMRQPIKQELICKWLAADGXAXPSLCSKXFSXMHELVXHVXVEHVGGPEQANHICFWEECPRQGKPFKAKYKLVNHIRVHXGEKPFPCPFPGCGKVFARSENLKIHKRXHXGEKPFRCEFEGCERRFANSSDRKKHSHVHXSDKPYXCKVRGCDKCYXHPSSLRKHMKVHGRSPPPSSGYDSAXPSALVSPSSDCGHKSQVASSAAVAARXADLSE

SEQ ID NO: 30294 - protein, 128 aa, Homo sapiens
  MOD_RES (5)..(5): Selenocysteine
  MOD_RES (19)..(19): Selenocysteine
  MOD_RES (53)..(53): Selenocysteine
  MOD_RES (59)..(59): Selenocysteine
  MOD_RES (70)..(70): Selenocysteine
  MOD_RES (96)..(96): Selenocysteine
  MOD_RES (123)..(123): Selenocysteine
MRYKXSLVMRKRLRLYRNXLKESSEKPFRCEFEGCERRFANSSDRKKHSHVHXSDKPYXCKVRGCDKCYXHPSSLRKHMKVHGRSPPPSSGYDSAXPSALVSPSSDCGHKSQVASSAAVAARXADLSE

SEQ ID NO: 30295 - protein, 68 aa, Homo sapiens
  MOD_RES (5)..(5): Selenocysteine
  MOD_RES (19)..(19): Selenocysteine
  MOD_RES (35)..(35): Selenocysteine
MRYKXSLVMRKRLRLYRNXLKESSSSSGHHGPQLXAASSPSVFPGLHEEPPQASPSRPLNGLLRLGLP

SEQ ID NO: 30296 - protein, 77 aa, Homo sapiens
  MOD_RES (5)..(5): Selenocysteine
  MOD_RES (19)..(19): Selenocysteine
  MOD_RES (35)..(35): Selenocysteine
MRYKXSLVMRKRLRLYRNXLKESSSSSGHHGPQLXAASSPSVFPGLHEEPPQASPSRPLNGLLRLGLPGDMYARPEP

SEQ ID NO: 30297 - protein, 229 aa, Homo sapiens
  MOD_RES (5)..(5): Selenocysteine
  MOD_RES (19)..(19): Selenocysteine
  MOD_RES (35)..(35): Selenocysteine
  MOD_RES (104)..(104): Selenocysteine
  MOD_RES (138)..(138): Selenocysteine
  MOD_RES (140)..(140): Selenocysteine
  MOD_RES (147)..(147): Selenocysteine
  MOD_RES (150)..(150): Selenocysteine
  MOD_RES (156)..(156): Selenocysteine
  MOD_RES (159)..(159): Selenocysteine
  MOD_RES (199)..(199): Selenocysteine
  MOD_RES (227)..(227): Selenocysteine
  MOD_RES (229)..(229): Selenocysteine
MRYKXSLVMRKRLRLYRNXLKESSSSSGHHGPQLXAASSPSVFPGLHEEPPQASPSRPLNGLLRLGLPGDMYARPEPFPPGPAARSDALAAAAALHGYGGMNLXVNLAAPHGPGAFFRYMRQPIKQELICKWLAADGXAXPSLCSKXFSXMHELVXHVXVEHVGGPEQANHICFWEECPRQGKPFKAKYKLVNHIRVHXGEKPFPCPFPGCGKVFARSENLKIHKRXHX

SEQ ID NO: 30298 - protein, 334 aa, Homo sapiens
  MOD_RES (5)..(5): Selenocysteine
  MOD_RES (19)..(19): Selenocysteine
  MOD_RES (35)..(35): Selenocysteine
  MOD_RES (104)..(104): Selenocysteine
  MOD_RES (138)..(138): Selenocysteine
  MOD_RES (140)..(140): Selenocysteine
  MOD_RES (147)..(147): Selenocysteine
  MOD_RES (150)..(150): Selenocysteine
  MOD_RES (156)..(156): Selenocysteine
  MOD_RES (159)..(159): Selenocysteine
  MOD_RES (199)..(199): Selenocysteine
  MOD_RES (227)..(227): Selenocysteine
  MOD_RES (229)..(229): Selenocysteine
  MOD_RES (259)..(259): Selenocysteine
  MOD_RES (265)..(265): Selenocysteine
  MOD_RES (276)..(276): Selenocysteine
  MOD_RES (302)..(302): Selenocysteine
  MOD_RES (329)..(329): Selenocysteine
MRYKXSLVMRKRLRLYRNXLKESSSSSGHHGPQLXAASSPSVFPGLHEEPPQASPSRPLNGLLRLGLPGDMYARPEPFPPGPAARSDALAAAAALHGYGGMNLXVNLAAPHGPGAFFRYMRQPIKQELICKWLAADGXAXPSLCSKXFSXMHELVXHVXVEHVGGPEQANHICFWEECPRQGKPFKAKYKLVNHIRVHXGEKPFPCPFPGCGKVFARSENLKIHKRXHXGEKPFRCEFEGCERRFANSSDRKKHSHVHXSDKPYXCKVRGCDKCYXHPSSLRKHMKVHGRSPPPSSGYDSAXPSALVSPSSDCGHKSQVASSAAVAARXADLSE

SEQ ID NO: 30299 - protein, 663 aa, Homo sapiens
  MOD_RES (44)..(44): Selenocysteine
  MOD_RES (54)..(54): Selenocysteine
  MOD_RES (88)..(89): Selenocysteine
  MOD_RES (101)..(101): Selenocysteine
  MOD_RES (160)..(160): Selenocysteine
  MOD_RES (179)..(181): Selenocysteine
  MOD_RES (206)..(206): Selenocysteine
  MOD_RES (225)..(225): Selenocysteine
  MOD_RES (247)..(247): Selenocysteine
  MOD_RES (266)..(266): Selenocysteine
  MOD_RES (434)..(434): Selenocysteine
  MOD_RES (437)..(437): Selenocysteine
  MOD_RES (446)..(446): Selenocysteine
  MOD_RES (486)..(486): Selenocysteine
  MOD_RES (514)..(514): Selenocysteine
  MOD_RES (516)..(516): Selenocysteine
  MOD_RES (546)..(546): Selenocysteine
  MOD_RES (563)..(563): Selenocysteine
  MOD_RES (593)..(593): Selenocysteine
  MOD_RES (612)..(612): Selenocysteine
  MOD_RES (618)..(618): Selenocysteine
  MOD_RES (637)..(637): Selenocysteine
  MOD_RES (643)..(644): Selenocysteine
  MOD_RES (647)..(647): Selenocysteine
  MOD_RES (661)..(661): Selenocysteine
MFLKAGRGNKVPPVRVYGPDCVVLMEPPLSKRNPPALRLADLAXAQVQPLQNMXGFPALAGPPAHSQLRAAVAHLRLRDLGADPGVAXXPLGPEHMAQASXLGLSPPSQAFPAHPEAPAAAARAAALVAHPGAGSYPCGGGSSGAQPSAPPPPAPPLPPXPSPPPPPPPPPPPALSGYXXXNSGGGGSSGKGHSRDFVLRRDLSAXAPAAAMHGAPLGGEQRSGXGSPQHPAPPPHSAGMFISASGXYAGPDGSGGPALFPALHDXPGAPGGHPHPLNGQMRLGLAAAAAAAAAELYGRAEPPFAPRSGDAHYGAVAAAAAAALHGYGAVNLNLNLAAAAAAAAAGPGPHLQHHAPPPAPPPPPAPAQHPHQHHPHLPGAAGAFLRYMRQPIKQELICKWIDPDELAGLPPPPPPPPPPPPPPPAGGAKPCSKXFGXMHELVNHVXVEHVGGPEQSSHVCFWEDCPREGKPFKAKYKLINHIRVHXGEKPFPCPFPGCGKVFARSENLKIHKRXHXGEKPFKCEFDGCDRKFANSSDRKKHSHVHXSDKPYYCKIRGCDKSYXHPSSLRKHMKIHCKSPPPSPGPLGYSSVGXPVGAPLSPVLDPARSHSSXLSPQVXNLNEWYVCQASGAPSHLHXPSSNGXXSEXEDEEIYGNPEVVRXIH

SEQ ID NO: 30300 - protein, 107 aa, Homo sapiens
  MOD_RES (10)..(10): Selenocysteine
  MOD_RES (45)..(45): Selenocysteine
  MOD_RES (50)..(50): Selenocysteine
  MOD_RES (69)..(69): Selenocysteine
  MOD_RES (72)..(72): Selenocysteine
  MOD_RES (103)..(103): Selenocysteine
MAAAALRAPXQDEWGLLDEAQRLLYLEVMLENFALVASLGCGHGXEDEEXPSDQNVSVGVSQSKAGSSXQKXQSCEMCVPVLKDILHLADLPGQKPYLVGECXNHHQ

SEQ ID NO: 30301 - protein, 474 aa, Homo sapiens
  MOD_RES (10)..(10): Selenocysteine
  MOD_RES (15)..(15): Selenocysteine
  MOD_RES (59)..(59): Selenocysteine
  MOD_RES (64)..(64): Selenocysteine
  MOD_RES (83)..(83): Selenocysteine
  MOD_RES (86)..(86): Selenocysteine
  MOD_RES (117)..(117): Selenocysteine
  MOD_RES (183)..(183): Selenocysteine
  MOD_RES (185)..(185): Selenocysteine
  MOD_RES (212)..(212): Selenocysteine
  MOD_RES (221)..(221): Selenocysteine
  MOD_RES (249)..(249): Selenocysteine
  MOD_RES (266)..(266): Selenocysteine
  MOD_RES (277)..(277): Selenocysteine
  MOD_RES (305)..(305): Selenocysteine
  MOD_RES (324)..(324): Selenocysteine
  MOD_RES (333)..(333): Selenocysteine
  MOD_RES (361)..(361): Selenocysteine
  MOD_RES (380)..(380): Selenocysteine
  MOD_RES (389)..(389): Selenocysteine
  MOD_RES (417)..(417): Selenocysteine
  MOD_RES (445)..(445): Selenocysteine
  MOD_RES (474)..(474): Selenocysteine
MAAAALRAPXQGCVXFEDIAIYFSQDEWGLLDEAQRLLYLEVMLENFALVASLGCGHGXEDEEXPSDQNVSVGVSQSKAGSSXQKXQSCEMCVPVLKDILHLADLPGQKPYLVGECXNHHQHQKHHSAKKSLKRDMDRASYVKCCLFCMSLKPFRKWEVGKDLPAMLRLLRSLVFPGGKKPGXIXECGEDIRSQKSHYKSGECGKASRHKHXPVYHPRVYXGKKLYECSKCGKAFRGKYSLVQHQRVHXGERPWECNECGKFFSQXSHLNDHRRIHXGERPYECSECGKLFRQNSSLVDHQKIHXGARPYECSQCGKSFSQKAXLVKHQRVHXGERPYKCGECGNSFSQSAILNQHRRIHXGAKPYECGQCGKSFSQKAXLIKHQRVHXGERPYKCGDCGKSFSQSSILIQHRRIHXGARPYECGQCGKSFSQKSGLIQHQVVHXGERPYECNKCGNSFSQCSSLIHHQKCHNX

SEQ ID NO: 30302 - protein, 487 aa, Homo sapiens
  MOD_RES (10)..(10): Selenocysteine
  MOD_RES (13)..(13): Selenocysteine
  MOD_RES (18)..(18): Selenocysteine
  MOD_RES (23)..(23): Selenocysteine
  MOD_RES (28)..(28): Selenocysteine
  MOD_RES (72)..(72): Selenocysteine
  MOD_RES (77)..(77): Selenocysteine
  MOD_RES (96)..(96): Selenocysteine
  MOD_RES (99)..(99): Selenocysteine
  MOD_RES (130)..(130): Selenocysteine
  MOD_RES (196)..(196): Selenocysteine
  MOD_RES (198)..(198): Selenocysteine
  MOD_RES (225)..(225): Selenocysteine
  MOD_RES (234)..(234): Selenocysteine
  MOD_RES (262)..(262): Selenocysteine
  MOD_RES (279)..(279): Selenocysteine
  MOD_RES (290)..(290): Selenocysteine
  MOD_RES (318)..(318): Selenocysteine
  MOD_RES (337)..(337): Selenocysteine
  MOD_RES (346)..(346): Selenocysteine
  MOD_RES (374)..(374): Selenocysteine
  MOD_RES (393)..(393): Selenocysteine
  MOD_RES (402)..(402): Selenocysteine
  MOD_RES (430)..(430): Selenocysteine
  MOD_RES (458)..(458): Selenocysteine
  MOD_RES (487)..(487): Selenocysteine
MAAAALRAPXQVXVSPEXHMDLXKGCVXFEDIAIYFSQDEWGLLDEAQRLLYLEVMLENFALVASLGCGHGXEDEEXPSDQNVSVGVSQSKAGSSXQKXQSCEMCVPVLKDILHLADLPGQKPYLVGECXNHHQHQKHHSAKKSLKRDMDRASYVKCCLFCMSLKPFRKWEVGKDLPAMLRLLRSLVFPGGKKPGXIXECGEDIRSQKSHYKSGECGKASRHKHXPVYHPRVYXGKKLYECSKCGKAFRGKYSLVQHQRVHXGERPWECNECGKFFSQXSHLNDHRRIHXGERPYECSECGKLFRQNSSLVDHQKIHXGARPYECSQCGKSFSQKAXLVKHQRVHXGERPYKCGECGNSFSQSAILNQHRRIHXGAKPYECGQCGKSFSQKAXLIKHQRVHXGERPYKCGDCGKSFSQSSILIQHRRIHXGARPYECGQCGKSFSQKSGLIQHQVVHXGERPYECNKCGNSFSQCSSLIHHQKCHNX

SEQ ID NO: 30303 - protein, 29 aa, Homo sapiens
  MOD_RES (10)..(10): Selenocysteine
  MOD_RES (25)..(25): Selenocysteine
MAAAALRAPXQVVAMEQRMKRHLLXRMFL

SEQ ID NO: 30304 - protein, 31 aa, Homo sapiens
  MOD_RES (4)..(4): Selenocysteine
  MOD_RES (9)..(9): Selenocysteine
MDLXKGCVXFEDIAIYFSQDEWGLLDEAQRL

SEQ ID NO: 30305 - protein, 110 aa, Homo sapiens
  MOD_RES (4)..(4): Selenocysteine
  MOD_RES (9)..(9): Selenocysteine
  MOD_RES (53)..(53): Selenocysteine
  MOD_RES (58)..(58): Selenocysteine
  MOD_RES (77)..(77): Selenocysteine
  MOD_RES (80)..(80): Selenocysteine
MDLXKGCVXFEDIAIYFSQDEWGLLDEAQRLLYLEVMLENFALVASLGCGHGXEDEEXPSDQNVSVGVSQSKAGSSXQKXQSCEMCVPVLKDILHLADLPGQKPYLVGEC

SEQ ID NO: 30306 - protein, 432 aa, Homo sapiens
  MOD_RES (17)..(17): Selenocysteine
  MOD_RES (22)..(22): Selenocysteine
  MOD_RES (41)..(41): Selenocysteine
  MOD_RES (44)..(44): Selenocysteine
  MOD_RES (75)..(75): Selenocysteine
  MOD_RES (141)..(141): Selenocysteine
  MOD_RES (143)..(143): Selenocysteine
  MOD_RES (170)..(170): Selenocysteine
  MOD_RES (179)..(179): Selenocysteine
  MOD_RES (207)..(207): Selenocysteine
  MOD_RES (224)..(224): Selenocysteine
  MOD_RES (235)..(235): Selenocysteine
  MOD_RES (263)..(263): Selenocysteine
  MOD_RES (282)..(282): Selenocysteine
  MOD_RES (291)..(291): Selenocysteine
  MOD_RES (319)..(319): Selenocysteine
  MOD_RES (338)..(338): Selenocysteine
  MOD_RES (347)..(347): Selenocysteine
  MOD_RES (375)..(375): Selenocysteine
  MOD_RES (403)..(403): Selenocysteine
  MOD_RES (432)..(432): Selenocysteine
MLENFALVASLGCGHGXEDEEXPSDQNVSVGVSQSKAGSSXQKXQSCEMCVPVLKDILHLADLPGQKPYLVGECXNHHQHQKHHSAKKSLKRDMDRASYVKCCLFCMSLKPFRKWEVGKDLPAMLRLLRSLVFPGGKKPGXIXECGEDIRSQKSHYKSGECGKASRHKHXPVYHPRVYXGKKLYECSKCGKAFRGKYSLVQHQRVHXGERPWECNECGKFFSQXSHLNDHRRIHXGERPYECSECGKLFRQNSSLVDHQKIHXGARPYECSQCGKSFSQKAXLVKHQRVHXGERPYKCGECGNSFSQSAILNQHRRIHXGAKPYECGQCGKSFSQKAXLIKHQRVHXGERPYKCGDCGKSFSQSSILIQHRRIHXGARPYECGQCGKSFSQKSGLIQHQVVHXGERPYECNKCGNSFSQCSSLIHHQKCHNX

SEQ ID NO: 30307 - protein, 527 aa, Homo sapiens
  MOD_RES (13)..(13): Selenocysteine
  MOD_RES (19)..(19): Selenocysteine
  MOD_RES (58)..(58): Selenocysteine
  MOD_RES (78)..(78): Selenocysteine
  MOD_RES (118)..(118): Selenocysteine
  MOD_RES (147)..(147): Selenocysteine
  MOD_RES (168)..(168): Selenocysteine
  MOD_RES (177)..(177): Selenocysteine
  MOD_RES (238)..(238): Selenocysteine
  MOD_RES (243)..(243): Selenocysteine
  MOD_RES (267)..(267): Selenocysteine
  MOD_RES (270)..(270): Selenocysteine
  MOD_RES (276)..(276): Selenocysteine
  MOD_RES (278)..(278): Selenocysteine
  MOD_RES (310)..(310): Selenocysteine
  MOD_RES (316)..(316): Selenocysteine
  MOD_RES (336)..(336): Selenocysteine
  MOD_RES (339)..(339): Selenocysteine
  MOD_RES (351)..(351): Selenocysteine
  MOD_RES (377)..(377): Selenocysteine
  MOD_RES (383)..(383): Selenocysteine
  MOD_RES (449)..(449): Selenocysteine
  MOD_RES (487)..(487): Selenocysteine
  MOD_RES (489)..(489): Selenocysteine
  MOD_RES (510)..(510): Selenocysteine
  MOD_RES (521)..(521): Selenocysteine
MYQPEDDNNSDVXSDDDMXRNRRESSPPHSVHSFSGDRDWDRRGRSRDMEPRDRWSHXRNPRSRMPPRDLSLPVVAKXSFEMDREDDRDSRAYESRSQDAESYQNVVDLAEDRKPHNXIQDNMENYRKLLSLGFLAQDSVPAEKRNXEMLDNLPSAGSQFPDFKHLGXFLVFEELVXFEDVLVDFSPEELSSLSAAQRNLYREVMLENYRNLVSLGHQFSKPDIISRLEEEESYAMEXDSRHXVICQGESHDDPLEPHQGNQEKLLXPIXMNDPKXLXPERSYGSDEFERSSNLSKQSKDPLGKDPQEGXAPGICXSPQSASQENKHNRCEFCKRXFSXQVALRRHERIHXGKKPYECKQCAEAFYLMPHLNRHQKXHSGRKXSGCNEGRKPSVQCANLCERVRIHSQEDYFECFQCGKAFLQNVHLLQHLKAHEAARVLPPGLSHSKXYLIRYQRKHDYVGERACQCCDCGRVFSRNSYLIQHYRXHXQERPYQCQLCGKCFGRPSYLXQHYQLHSQEKXVECDHC

SEQ ID NO: 30308 - protein, 162 aa, Homo sapiens
  MOD_RES (13)..(13): Selenocysteine
  MOD_RES (19)..(19): Selenocysteine
  MOD_RES (58)..(58): Selenocysteine
  MOD_RES (78)..(78): Selenocysteine
  MOD_RES (118)..(118): Selenocysteine
  MOD_RES (147)..(147): Selenocysteine
MYQPEDDNNSDVXSDDDMXRNRRESSPPHSVHSFSGDRDWDRRGRSRDMEPRDRWSHXRNPRSRMPPRDLSLPVVAKXSFEMDREDDRDSRAYESRSQDAESYQNVVDLAEDRKPHNXIQDNMENYRKLLSLGFLAQDSVPAEKRNXEMLDNLPSAGSQVGP

SEQ ID NO: 30309 - protein, 193 aa, Homo sapiens
  MOD_RES (13)..(13): Selenocysteine
  MOD_RES (19)..(19): Selenocysteine
  MOD_RES (58)..(58): Selenocysteine
  MOD_RES (78)..(78): Selenocysteine
  MOD_RES (118)..(118): Selenocysteine
  MOD_RES (146)..(146): Selenocysteine
  MOD_RES (161)..(161): Selenocysteine
  MOD_RES (178)..(178): Selenocysteine
MYQPEDDNNSDVXSDDDMXRNRRESSPPHSVHSFSGDRDWDRRGRSRDMEPRDRWSHXRNPRSRMPPRDLSLPVVAKXSFEMDREDDRDSRAYESRSQDAESYQNVVDLAEDRKPHNXIQDNMENYRKLLSLGVQLAEDDGHSHMXQGHSSRSKRSAYPSXSRGFLAQDSVPAEKRNXEMLDNLPSAGSQVGP

SEQ ID NO: 30310 - protein, 66 aa, Homo sapiens
  MOD_RES (13)..(13): Selenocysteine
  MOD_RES (19)..(19): Selenocysteine
  MOD_RES (58)..(58): Selenocysteine
MYQPEDDNNSDVXSDDDMXRNRRESSPPHSVHSFSGDRDWDRRGRSRDMEPRDRWSHXRNPRSSES

SEQ ID NO: 30311 - protein, 472 aa, Homo sapiens
  MOD_RES (9)..(9): Selenocysteine
  MOD_RES (14)..(14): Selenocysteine
  MOD_RES (18)..(18): Selenocysteine
  MOD_RES (52)..(53): Selenocysteine
  MOD_RES (111)..(111): Selenocysteine
  MOD_RES (113)..(114): Selenocysteine
  MOD_RES (216)..(216): Selenocysteine
  MOD_RES (246)..(246): Selenocysteine
  MOD_RES (255)..(255): Selenocysteine
  MOD_RES (293)..(293): Selenocysteine
  MOD_RES (302)..(302): Selenocysteine
  MOD_RES (310)..(310): Selenocysteine
  MOD_RES (330)..(330): Selenocysteine
  MOD_RES (358)..(358): Selenocysteine
  MOD_RES (371)..(371): Selenocysteine
  MOD_RES (386)..(386): Selenocysteine
  MOD_RES (412)..(412): Selenocysteine
  MOD_RES (418)..(418): Selenocysteine
  MOD_RES (427)..(427): Selenocysteine
  MOD_RES (440)..(440): Selenocysteine
  MOD_RES (442)..(442): Selenocysteine
MNNSQGRVXFEDVXVNFXQGEWQRLNPEQRNLYRDVMLENYSNLVSVGQGEXXKPDVILRLEQGKEPWLEEEEVLGSGRAEKNGDIGGQIWKPKDVKESLAREVPSINKEXLXXQKGVECDGSKKILPLGIDDVSSLQHYVQNNSHDDNGYRKLVGNNPSKFVGQQLKCNACRKLFSSKSRLQSHLRRHACQKPFECHSCGRAFGEKWKLDKHQKXHAEERPYKCENCGNAYKQKSNLFQHQKMHXKEKPYQCKXCGKAFSWKSSCINHEKIHNAKKSYQCNECEKSFRQNSXLIQHKKVHXGQKPFQCXDCGKAFIYKSDLVKHQRIHXGEKPYKCSICEKAFSQKSNVIDHEKIHXGKRAYECDLCGNXFIQKKNLIQHKKIHXGEKPYECNRCGKAFFQKSNLHSHQKXHSGERXYRCSECGKXFIRKLNLSLHKKXHXGQKPYGCSECGKAFADRSYLVRHQKRIHSR

SEQ ID NO: 30312 - protein, 350 aa, Homo sapiens
  MOD_RES (7)..(7): Selenocysteine
  MOD_RES (65)..(65): Selenocysteine
  MOD_RES (70)..(70): Selenocysteine
  MOD_RES (80)..(81): Selenocysteine
  MOD_RES (98)..(98): Selenocysteine
  MOD_RES (110)..(110): Selenocysteine
  MOD_RES (127)..(127): Selenocysteine
  MOD_RES (129)..(129): Selenocysteine
  MOD_RES (152)..(153): Selenocysteine
  MOD_RES (159)..(159): Selenocysteine
  MOD_RES (161)..(161): Selenocysteine
  MOD_RES (174)..(174): Selenocysteine
  MOD_RES (187)..(187): Selenocysteine
  MOD_RES (215)..(215): Selenocysteine
  MOD_RES (264)..(264): Selenocysteine
  MOD_RES (271)..(271): Selenocysteine
  MOD_RES (299)..(299): Selenocysteine
  MOD_RES (307)..(307): Selenocysteine
  MOD_RES (314)..(314): Selenocysteine
  MOD_RES (318)..(318): Selenocysteine
  MOD_RES (320)..(320): Selenocysteine
MASALFXADSQAMVKIEDMAVSLILEEWGCQNLARRNLSRDNRQENYGSAFPQGGENRNENEESXSKAEXSEDSASRGEXXGRSQKEFGEKRDQEGKXGERQQKNPEEKXRKEKRDSGPAIGKDKKXIXGERGPREKGKGLGRSFSLSSNFXXPEEVPXGXKSHRCDECGKCFXRSSSLIRHKIIHXGEKPYECSECGKAFSLNSNLVLHQRIHXGEKPHECNECGKAFSHSSNLILHQRIHSGEKPYECNECGKAFSQSSDLXKHQRIHXGEKPYECSECGKAFNRNSYLILHRRIHXREKPYKCXKCGKAFXRSSXLXLHHRIHARERASEYSPASLDAFGAFLKSCV

SEQ ID NO: 30313 - protein, 125 aa, Homo sapiens
  MOD_RES (3)..(3): Selenocysteine
  MOD_RES (10)..(10): Selenocysteine
  MOD_RES (43)..(43): Selenocysteine
  MOD_RES (47)..(47): Selenocysteine
  MOD_RES (67)..(67): Selenocysteine
  MOD_RES (91)..(91): Selenocysteine
MMXAESREAXGLSPQAAQEKDGIVIVKVEEEDEEDHMWGQDSXLQDXPPPDPEIFRQRFRRFCYQNXFGPREALSRLKELCHQWLRPEINXKEQILELLVLEQFLSILPKELQVWLQEYRPDSGE

SEQ ID NO: 30314 - protein, 563 aa, Homo sapiens
  MOD_RES (3)..(3): Selenocysteine
  MOD_RES (10)..(10): Selenocysteine
  MOD_RES (43)..(43): Selenocysteine
  MOD_RES (47)..(47): Selenocysteine
  MOD_RES (67)..(67): Selenocysteine
  MOD_RES (91)..(91): Selenocysteine
  MOD_RES (129)..(129): Selenocysteine
  MOD_RES (176)..(176): Selenocysteine
  MOD_RES (220)..(220): Selenocysteine
  MOD_RES (278)..(278): Selenocysteine
  MOD_RES (283)..(283): Selenocysteine
  MOD_RES (293)..(294): Selenocysteine
  MOD_RES (311)..(311): Selenocysteine
  MOD_RES (323)..(323): Selenocysteine
  MOD_RES (340)..(340): Selenocysteine
  MOD_RES (342)..(342): Selenocysteine
  MOD_RES (365)..(366): Selenocysteine
  MOD_RES (372)..(372): Selenocysteine
  MOD_RES (374)..(374): Selenocysteine
  MOD_RES (387)..(387): Selenocysteine
  MOD_RES (400)..(400): Selenocysteine
  MOD_RES (428)..(428): Selenocysteine
  MOD_RES (477)..(477): Selenocysteine
  MOD_RES (484)..(484): Selenocysteine
  MOD_RES (512)..(512): Selenocysteine
  MOD_RES (520)..(520): Selenocysteine
  MOD_RES (527)..(527): Selenocysteine
  MOD_RES (531)..(531): Selenocysteine
  MOD_RES (533)..(533): Selenocysteine
MMXAESREAXGLSPQAAQEKDGIVIVKVEEEDEEDHMWGQDSXLQDXPPPDPEIFRQRFRRFCYQNXFGPREALSRLKELCHQWLRPEINXKEQILELLVLEQFLSILPKELQVWLQEYRPDSGEEAVXLLEDLELDLSGQQVPGQVHGPEMLARGMVPLDPVQESSSFDLHHEAXQSHFKHSSRKPRLLQSRALPAAHIPAPPHEGSPRDQAMASALFXADSQAMVKIEDMAVSLILEEWGCQNLARRNLSRDNRQENYGSAFPQGGENRNENEESXSKAEXSEDSASRGEXXGRSQKEFGEKRDQEGKXGERQQKNPEEKXRKEKRDSGPAIGKDKKXIXGERGPREKGKGLGRSFSLSSNFXXPEEVPXGXKSHRCDECGKCFXRSSSLIRHKIIHXGEKPYECSECGKAFSLNSNLVLHQRIHXGEKPHECNECGKAFSHSSNLILHQRIHSGEKPYECNECGKAFSQSSDLXKHQRIHXGEKPYECSECGKAFNRNSYLILHRRIHXREKPYKCXKCGKAFXRSSXLXLHHRIHARERASEYSPASLDAFGAFLKSCV

SEQ ID NO: 30315 - protein, 527 aa, Homo sapiens
  MOD_RES (7)..(7): Selenocysteine
  MOD_RES (11)..(11): Selenocysteine
  MOD_RES (31)..(31): Selenocysteine
  MOD_RES (55)..(55): Selenocysteine
  MOD_RES (93)..(93): Selenocysteine
  MOD_RES (140)..(140): Selenocysteine
  MOD_RES (184)..(184): Selenocysteine
  MOD_RES (242)..(242): Selenocysteine
  MOD_RES (247)..(247): Selenocysteine
  MOD_RES (257)..(258): Selenocysteine
  MOD_RES (275)..(275): Selenocysteine
  MOD_RES (287)..(287): Selenocysteine
  MOD_RES (304)..(304): Selenocysteine
  MOD_RES (306)..(306): Selenocysteine
  MOD_RES (329)..(330): Selenocysteine
  MOD_RES (336)..(336): Selenocysteine
  MOD_RES (338)..(338): Selenocysteine
  MOD_RES (351)..(351): Selenocysteine
  MOD_RES (364)..(364): Selenocysteine
  MOD_RES (392)..(392): Selenocysteine
  MOD_RES (441)..(441): Selenocysteine
  MOD_RES (448)..(448): Selenocysteine
  MOD_RES (476)..(476): Selenocysteine
  MOD_RES (484)..(484): Selenocysteine
  MOD_RES (491)..(491): Selenocysteine
  MOD_RES (495)..(495): Selenocysteine
  MOD_RES (497)..(497): Selenocysteine
MWGQDSXLQDXPPPDPEIFRQRFRRFCYQNXFGPREALSRLKELCHQWLRPEINXKEQILELLVLEQFLSILPKELQVWLQEYRPDSGEEAVXLLEDLELDLSGQQVPGQVHGPEMLARGMVPLDPVQESSSFDLHHEAXQSHFKHSSRKPRLLQSRALPAAHIPAPPHEGSPRDQAMASALFXADSQAMVKIEDMAVSLILEEWGCQNLARRNLSRDNRQENYGSAFPQGGENRNENEESXSKAEXSEDSASRGEXXGRSQKEFGEKRDQEGKXGERQQKNPEEKXRKEKRDSGPAIGKDKKXIXGERGPREKGKGLGRSFSLSSNFXXPEEVPXGXKSHRCDECGKCFXRSSSLIRHKIIHXGEKPYECSECGKAFSLNSNLVLHQRIHXGEKPHECNECGKAFSHSSNLILHQRIHSGEKPYECNECGKAFSQSSDLXKHQRIHXGEKPYECSECGKAFNRNSYLILHRRIHXREKPYKCXKCGKAFXRSSXLXLHHRIHARERASEYSPASLDAFGAFLKSCV

SEQ ID NO: 30316 - protein, 232 aa, Homo sapiens
  MOD_RES (43)..(43): Selenocysteine
  MOD_RES (57)..(57): Selenocysteine
  MOD_RES (95)..(95): Selenocysteine
  MOD_RES (127)..(127): Selenocysteine
  MOD_RES (162)..(162): Selenocysteine
  MOD_RES (211)..(211): Selenocysteine
  MOD_RES (217)..(219): Selenocysteine
MAVALDSQIDAPLEVEGCLIMKVEKDPEWASEPILEGSDSSEXFRKCFRQFCYEDVXGPHEAFSKLWELCCRWLKPEMRSKEQILELLVIEQFLXILPEKIQAWAQKQCPQSGEEAVALVVHLEKEXGRLRQQVSSPVHREKHSPLGAAWEVADFQPEQVEXQPRAVSREEPGSLHSGHQEQLNRKRERRPLPKNARPSPWVPALADEWNXLDQEVXXXRLPAGSQCHYRNQ

SEQ ID NO: 30317 - protein, 967 aa, Homo sapiens
  MOD_RES (43)..(43): Selenocysteine
  MOD_RES (57)..(57): Selenocysteine
  MOD_RES (95)..(95): Selenocysteine
  MOD_RES (127)..(127): Selenocysteine
  MOD_RES (162)..(162): Selenocysteine
  MOD_RES (211)..(211): Selenocysteine
  MOD_RES (217)..(219): Selenocysteine
  MOD_RES (274)..(274): Selenocysteine
  MOD_RES (279)..(279): Selenocysteine
  MOD_RES (289)..(289): Selenocysteine
  MOD_RES (324)..(324): Selenocysteine
  MOD_RES (348)..(348): Selenocysteine
  MOD_RES (350)..(350): Selenocysteine
  MOD_RES (363)..(363): Selenocysteine
  MOD_RES (389)..(389): Selenocysteine
  MOD_RES (395)..(395): Selenocysteine
  MOD_RES (435)..(435): Selenocysteine
  MOD_RES (505)..(505): Selenocysteine
  MOD_RES (507)..(507): Selenocysteine
  MOD_RES (515)..(515): Selenocysteine
  MOD_RES (546)..(546): Selenocysteine
  MOD_RES (552)..(552): Selenocysteine
  MOD_RES (594)..(594): Selenocysteine
  MOD_RES (617)..(617): Selenocysteine
  MOD_RES (624)..(624): Selenocysteine
  MOD_RES (673)..(673): Selenocysteine
  MOD_RES (698)..(698): Selenocysteine
  MOD_RES (761)..(761): Selenocysteine
  MOD_RES (768)..(768): Selenocysteine
  MOD_RES (798)..(798): Selenocysteine
  MOD_RES (826)..(826): Selenocysteine
  MOD_RES (852)..(852): Selenocysteine
  MOD_RES (854)..(854): Selenocysteine
  MOD_RES (869)..(869): Selenocysteine
  MOD_RES (882)..(882): Selenocysteine
  MOD_RES (900)..(900): Selenocysteine
  MOD_RES (910)..(910): Selenocysteine
  MOD_RES (931)..(931): Selenocysteine
  MOD_RES (960)..(960): Selenocysteine
  MOD_RES (966)..(966): Selenocysteine
MAVALDSQIDAPLEVEGCLIMKVEKDPEWASEPILEGSDSSEXFRKCFRQFCYEDVXGPHEAFSKLWELCCRWLKPEMRSKEQILELLVIEQFLXILPEKIQAWAQKQCPQSGEEAVALVVHLEKEXGRLRQQVSSPVHREKHSPLGAAWEVADFQPEQVEXQPRAVSREEPGSLHSGHQEQLNRKRERRPLPKNARPSPWVPALADEWNXLDQEVXXXRLPAGSQEPVKDVHVARGFSYRKSVHQIPAQRDLYRDFRKENVGNVVSLGSAVSXSNKIXRLEQRKEPWXLGLHSSNKRSILRSNYVKEKSVHAIQVPARSAGKXWREQQQWGLEDEKIAGVHWSYEEXKXFLAILKESRFYEXLQACPRNSQVYGAVAEWLRECGFLRXPEQCRXKFKSLQKSYRKVRNGHMLEPCAFFEDMDALLNPAARAPSXDKPKEMIPVPRLKRIAISAKEHISLVEEEEAAEDSDDDEIGIEFIRKSEIHGAPVLFQNLSGVHWGYEEXKXFLDILREXRFYEALQACHRKSKLYGAVAEQLRECGFLRXPEQCRXKFKSLQKSYRKVKNGHVLESCAFYKEMDALINSRASAPSPSXPEEVPSPSRQERGGIEVEPQEPXGWEPEEXSQEAVIEDSCSERMSEEEIVQEPEFQGPPGLLQSPNDFEIGSSIKEDPXQIVYKDMEQHRALIEKSKRVVSQSXDPSKYRKRECISGRQWENLQGIRQGKPMSQPRDLGKAVVHQRPFVGKRPYRLLKYGESFGRSXRLMCRMXHHKENPYKCGVCGKCFGRSRSLIRHQRIHXGEKPFKCLDCGKSFNDSSNFGAHQRIHXGEKPYRCGECGKCFSQSSSLIIHQRXHXGEKPYQCGECGKSFXNSSHFSAHRRVHXGENPYKCVDCEKSFNNCXRFREHRRIHXGEKPYGCAQCGKRFSKSSVLXKHREVHVREKPLPHPPSLYCPENPHKGKXDEFRKXF

SEQ ID NO: 30318 - protein, 390 aa, Homo sapiens
  MOD_RES (5)..(5): Selenocysteine
  MOD_RES (59)..(59): Selenocysteine
  MOD_RES (74)..(74): Selenocysteine
  MOD_RES (76)..(76): Selenocysteine
  MOD_RES (80)..(80): Selenocysteine
  MOD_RES (110)..(110): Selenocysteine
  MOD_RES (142)..(142): Selenocysteine
  MOD_RES (161)..(161): Selenocysteine
  MOD_RES (189)..(189): Selenocysteine
  MOD_RES (217)..(217): Selenocysteine
  MOD_RES (243)..(243): Selenocysteine
  MOD_RES (245)..(245): Selenocysteine
  MOD_RES (258)..(258): Selenocysteine
  MOD_RES (273)..(273): Selenocysteine
  MOD_RES (301)..(301): Selenocysteine
  MOD_RES (328)..(328): Selenocysteine
  MOD_RES (342)..(342): Selenocysteine
  MOD_RES (345)..(345): Selenocysteine
  MOD_RES (355)..(355): Selenocysteine
  MOD_RES (370)..(370): Selenocysteine
MALLXPAPGSQSSQFQLMKALLKHESVGSQPLQDRVLQVPVLAHGGCCREDKVVASRLXPESQGLLKVEDVALXLXPEWXQQDSSQGNLCRDEKQENHGSLVSLGDEKQXKSRDLPPAEELPEKEHGKISCHLREDIAQIPXCAEAGEQEGRLQRKQKNAXGGRRHICHECGKSFAQSSGLSKHRRIHXGEKPYECEECGKAFIGSSALVIHQRVHXGEKPYECEECGKAFSHSSDLIKHQRXHXGEKPYECDDCGKXFSQSCSLLEHHRIHXGEKPYQCSMCGKAFRRSSHLLRHQRIHXGDKNVQEPEQGEAWKSRMESQLENVEXPMSYKCNECERSFXQNXGLIEHQKIHXGEKPYQCNACGKGFXRISYLVQHQRSHVGKNILSQ

SEQ ID NO: 30319 - protein, 538 aa, Homo sapiens
  MOD_RES (9)..(9): Selenocysteine
  MOD_RES (16)..(16): Selenocysteine
  MOD_RES (96)..(96): Selenocysteine
  MOD_RES (153)..(153): Selenocysteine
  MOD_RES (207)..(207): Selenocysteine
  MOD_RES (222)..(222): Selenocysteine
  MOD_RES (224)..(224): Selenocysteine
  MOD_RES (228)..(228): Selenocysteine
  MOD_RES (258)..(258): Selenocysteine
  MOD_RES (290)..(290): Selenocysteine
  MOD_RES (309)..(309): Selenocysteine
  MOD_RES (337)..(337): Selenocysteine
  MOD_RES (365)..(365): Selenocysteine
  MOD_RES (391)..(391): Selenocysteine
  MOD_RES (393)..(393): Selenocysteine
  MOD_RES (406)..(406): Selenocysteine
  MOD_RES (421)..(421): Selenocysteine
  MOD_RES (449)..(449): Selenocysteine
  MOD_RES (476)..(476): Selenocysteine
  MOD_RES (490)..(490): Selenocysteine
  MOD_RES (493)..(493): Selenocysteine
  MOD_RES (503)..(503): Selenocysteine
  MOD_RES (518)..(518): Selenocysteine
MARELSESXALDAQSXEDQMELLVIKVEEEEAGFPSSPDLGSEGSRERFRGFRYPEAAGPREALSRLRELCRQWLQPEMHSKEQILELLVLEQFLXILPGNLQSWVREQHPESGEEVVVLLEYLERQLDEPAPQVSGVDQGQELLCCKMALLXPAPGSQSSQFQLMKALLKHESVGSQPLQDRVLQVPVLAHGGCCREDKVVASRLXPESQGLLKVEDVALXLXPEWXQQDSSQGNLCRDEKQENHGSLVSLGDEKQXKSRDLPPAEELPEKEHGKISCHLREDIAQIPXCAEAGEQEGRLQRKQKNAXGGRRHICHECGKSFAQSSGLSKHRRIHXGEKPYECEECGKAFIGSSALVIHQRVHXGEKPYECEECGKAFSHSSDLIKHQRXHXGEKPYECDDCGKXFSQSCSLLEHHRIHXGEKPYQCSMCGKAFRRSSHLLRHQRIHXGDKNVQEPEQGEAWKSRMESQLENVEXPMSYKCNECERSFXQNXGLIEHQKIHXGEKPYQCNACGKGFXRISYLVQHQRSHVGKNILSQ

SEQ ID NO: 30320 - protein, 545 aa, Homo sapiens
  MOD_RES (20)..(20): Selenocysteine
  MOD_RES (24)..(24): Selenocysteine
  MOD_RES (36)..(36): Selenocysteine
  MOD_RES (103)..(103): Selenocysteine
  MOD_RES (160)..(160): Selenocysteine
  MOD_RES (162)..(162): Selenocysteine
  MOD_RES (214)..(214): Selenocysteine
  MOD_RES (229)..(229): Selenocysteine
  MOD_RES (231)..(231): Selenocysteine
  MOD_RES (235)..(235): Selenocysteine
  MOD_RES (265)..(265): Selenocysteine
  MOD_RES (296)..(296): Selenocysteine
  MOD_RES (336)..(336): Selenocysteine
  MOD_RES (343)..(343): Selenocysteine
  MOD_RES (356)..(356): Selenocysteine
  MOD_RES (371)..(371): Selenocysteine
  MOD_RES (397)..(397): Selenocysteine
  MOD_RES (399)..(399): Selenocysteine
  MOD_RES (412)..(412): Selenocysteine
  MOD_RES (427)..(427): Selenocysteine
  MOD_RES (474)..(474): Selenocysteine
  MOD_RES (481)..(481): Selenocysteine
  MOD_RES (497)..(497): Selenocysteine
  MOD_RES (510)..(510): Selenocysteine
  MOD_RES (519)..(519): Selenocysteine
  MOD_RES (525)..(525): Selenocysteine
  MOD_RES (527)..(527): Selenocysteine
  MOD_RES (542)..(542): Selenocysteine
MAREPRKNAALDAQSAEDQXGLLXVKVEKEEASALXAEVRAPCSPARGPERSRQRFRGFRYPEAAGPREALSRLRELCGQWLQPEMHSKEQILELLVLEQFLXILPGNLQSWVREQHPESGEEVVVLLEYLERQLDEPAPQVPVGDQGQELLCCKMALLXQXQGSQSSQCQPMKALFKHESLGSQPLHDRVLQVPGLAQGGCCREDAMVASRLXPGSQGLLKMEDVALXLXPGWXQLDSSQVNLYRDEKQENHSSLVSLGGEIQXKSRDLPPVKKLPEKEHGKICHLREDIAQIPXHAEAGEQEGRLQRKQKNAIGSRRHYCHECGKSFAQSSGLXKHRRIHXGEKPYECEDCGKXFIGSSALVIHQRVHXGEKPYECEECGKVFSHSSNLIKHQRXHXGEKPYECDDCGKXFSQSCSLLEHHKIHXGEKPYQCNMCGKAFRRNSHLLRHQRIHGDKNVQNPEHGESWESQGRXESQWENXEAPVSYKCNECERSFXRNRSLIEHQKIHXGEKPYQCDXCGKGFXRXSYLVQHQRSHVGKKXLSQ

SEQ ID NO: 30321 - protein, 839 aa, Homo sapiens
  MOD_RES (4)..(4): Selenocysteine
  MOD_RES (18)..(18): Selenocysteine
  MOD_RES (36)..(36): Selenocysteine
  MOD_RES (45)..(45): Selenocysteine
  MOD_RES (48)..(48): Selenocysteine
  MOD_RES (85)..(85): Selenocysteine
  MOD_RES (100)..(100): Selenocysteine
  MOD_RES (152)..(152): Selenocysteine
  MOD_RES (166)..(166): Selenocysteine
  MOD_RES (169)..(169): Selenocysteine
  MOD_RES (203)..(203): Selenocysteine
  MOD_RES (209)..(209): Selenocysteine
  MOD_RES (255)..(255): Selenocysteine
  MOD_RES (286)..(286): Selenocysteine
  MOD_RES (314)..(314): Selenocysteine
  MOD_RES (332)..(332): Selenocysteine
  MOD_RES (340)..(340): Selenocysteine
  MOD_RES (369)..(369): Selenocysteine
  MOD_RES (390)..(390): Selenocysteine
  MOD_RES (397)..(397): Selenocysteine
  MOD_RES (468)..(468): Selenocysteine
  MOD_RES (490)..(490): Selenocysteine
  MOD_RES (544)..(544): Selenocysteine
  MOD_RES (572)..(572): Selenocysteine
  MOD_RES (593)..(593): Selenocysteine
  MOD_RES (600)..(600): Selenocysteine
  MOD_RES (606)..(606): Selenocysteine
  MOD_RES (703)..(703): Selenocysteine
  MOD_RES (738)..(738): Selenocysteine
  MOD_RES (740)..(740): Selenocysteine
  MOD_RES (760)..(760): Selenocysteine
  MOD_RES (770)..(770): Selenocysteine
  MOD_RES (783)..(783): Selenocysteine
  MOD_RES (796)..(796): Selenocysteine
  MOD_RES (826)..(826): Selenocysteine
  MOD_RES (831)..(831): Selenocysteine
MIMXESREVIDLDPPAEXSQEQEDLFIVKVEEEDCXWMQEYNPPXFEXFYQRFRHFQYHEASGPREALSQLRVLCCEWLRPELHXKEQILELLVLEQFLXILPEEFQPWVREHHPESGEEAVAVIENIQRELEERRQQIVACPDVLPRKMAXPGAVQESCSPHPLXVDXQPEQAPQKPRLLEENALPVLQVPSLPLKDSQELXASLLSXGSQKLVKIEEVADVAVSFILEEWGHLDQSQKSLYRDDRKENYGSIXSMGYESRDNMELIVKQISDDSESHWVAPEHXERSVPQDPDFAEVSDLKGMVQRWQVNPXVGKSRQNPSQKRDLDAIXDISPKQSXHGERGHRCSDCGKFFLQASNFIQHRRIHXGEKPFKCGECGKSYNQRVHLXQHQRVHXGEKPYKCQVCGKAFRVSSHLVQHHSVHSGERPYGCNECGKNFGRHSHLIEHLKRHFREKSQRCSDKRSKNXKLSVKKKISEYSEADMELSGKXQRNVSQVQDFGEGCEFQGKLDRKQGIPMKEILGQPSSKRMNYSEVPYVHKKSSXGERPHKCNECGKSFIQSAHLIQHQRIHXGEKPFRCEECGKSYNQRVHLXQHQRVHXGEKPYXCPLCGKAFRVRSHLVQHQSVHSGERPFKCNECGKGFGRRSHLAGHLRLHSREKSHQCRECGEIFFQYVSLIEHQVLHMGQKNEKNGICEEAYSWNLXVIEDKKIELQEQPYQCDICGKAFGYSSDLIQHYRXHXAEKPYQCDICRENVGQCSHXKQHQKIYSSXKSHQCHECGRGFXLKSHLNQHQRIHXGEKPFQCKECGMNFSWSCSLFKHLRSHERXDPINXLSVEGSLL

SEQ ID NO: 30322 - protein, 222 aa, Homo sapiens
  MOD_RES (4)..(4): Selenocysteine
  MOD_RES (18)..(18): Selenocysteine
  MOD_RES (36)..(36): Selenocysteine
  MOD_RES (45)..(45): Selenocysteine
  MOD_RES (48)..(48): Selenocysteine
  MOD_RES (85)..(85): Selenocysteine
  MOD_RES (100)..(100): Selenocysteine
  MOD_RES (152)..(152): Selenocysteine
  MOD_RES (166)..(166): Selenocysteine
  MOD_RES (169)..(169): Selenocysteine
  MOD_RES (203)..(203): Selenocysteine
  MOD_RES (209)..(209): Selenocysteine
  MOD_RES (218)..(218): Selenocysteine
MIMXESREVIDLDPPAEXSQEQEDLFIVKVEEEDCXWMQEYNPPXFEXFYQRFRHFQYHEASGPREALSQLRVLCCEWLRPELHXKEQILELLVLEQFLXILPEEFQPWVREHHPESGEEAVAVIENIQRELEERRQQIVACPDVLPRKMAXPGAVQESCSPHPLXVDXQPEQAPQKPRLLEENALPVLQVPSLPLKDSQELXASLLSXGSQVMSPGXIWSS

SEQ ID NO: 30323 - protein, 373 aa, Homo sapiens
  MOD_RES (6)..(7): Selenocysteine
  MOD_RES (11)..(12): Selenocysteine
  MOD_RES (18)..(18): Selenocysteine
  MOD_RES (39)..(39): Selenocysteine
  MOD_RES (51)..(51): Selenocysteine
  MOD_RES (56)..(56): Selenocysteine
  MOD_RES (70)..(70): Selenocysteine
  MOD_RES (80)..(80): Selenocysteine
  MOD_RES (91)..(91): Selenocysteine
  MOD_RES (99)..(99): Selenocysteine
  MOD_RES (131)..(131): Selenocysteine
  MOD_RES (146)..(146): Selenocysteine
  MOD_RES (160)..(160): Selenocysteine
  MOD_RES (167)..(167): Selenocysteine
  MOD_RES (175)..(175): Selenocysteine
  MOD_RES (191)..(191): Selenocysteine
  MOD_RES (199)..(199): Selenocysteine
  MOD_RES (255)..(255): Selenocysteine
  MOD_RES (268)..(268): Selenocysteine
  MOD_RES (272)..(272): Selenocysteine
  MOD_RES (281)..(281): Selenocysteine
  MOD_RES (283)..(283): Selenocysteine
  MOD_RES (326)..(326): Selenocysteine
  MOD_RES (332)..(332): Selenocysteine
  MOD_RES (337)..(337): Selenocysteine
  MOD_RES (339)..(339): Selenocysteine
  MOD_RES (367)..(367): Selenocysteine
  MOD_RES (371)..(371): Selenocysteine
MHFEEXXALGXXKESPPXSPLSGGSAPGAHLEPPYDPGXHHLPSGDFAQCXSPVPXLPQVGNSGDQAGAXVLRMVRPQDXVAYEDLSVDYXQKKWKSLXLSQRALQWNMMPENHHSMASLGENMMKGSELXPKQEFFKGSESSNRXSGGLFGVVPGAAEXGDVCEDXFKELEGQXSDEEGSRLENDFLEIXDEDKKKSXKDRYDKYKEVGEHPPLSSSPVEHEGVLKGQKSYRCDECGKAFNRSSHLIGHQRIHXGEKPYECNECGKXFRQXSQLIVHLRXHXGEKPYECSECGKAYRHSSHLIQHQRLHNGEKPYKCNECAKAFXQSSRLXDHQRXHXGEKPYECNECGEAFIRSKSLARHQVLHXGWSXMA

SEQ ID NO: 30324 - protein, 276 aa, Homo sapiens
  MOD_RES (2)..(3): Selenocysteine
  MOD_RES (16)..(16): Selenocysteine
  MOD_RES (26)..(26): Selenocysteine
  MOD_RES (35)..(35): Selenocysteine
  MOD_RES (89)..(89): Selenocysteine
  MOD_RES (112)..(112): Selenocysteine
  MOD_RES (156)..(157): Selenocysteine
  MOD_RES (161)..(162): Selenocysteine
  MOD_RES (168)..(168): Selenocysteine
  MOD_RES (189)..(189): Selenocysteine
  MOD_RES (201)..(201): Selenocysteine
  MOD_RES (206)..(206): Selenocysteine
  MOD_RES (220)..(220): Selenocysteine
  MOD_RES (230)..(230): Selenocysteine
  MOD_RES (241)..(241): Selenocysteine
  MOD_RES (249)..(249): Selenocysteine
  MOD_RES (274)..(274): Selenocysteine
MXXAGRGNLGLIPRSXAFQKQEGRLXVKQEPANQXWGQGSSLQKNYPPVCEIFRLHFRQLCYHEMSGPQEALSRLRELCRWWLMPEVHXKEQILELLVLEQFLSILPGELRXWVQLHHPESGEEAVAVVEDFQRHLSGSEEVSAPAQKQEMHFEEXXALGXXKESPPXSPLSGGSAPGAHLEPPYDPGXHHLPSGDFAQCXSPVPXLPQVGNSGDQAGAXVLRMVRPQDXVAYEDLSVDYXQKKWKSLXLSQRALQWNMMPENHHSMASLGWSXMA

SEQ ID NO: 30325 - protein, 754 aa, Homo sapiens
  MOD_RES (2)..(3): Selenocysteine
  MOD_RES (16)..(16): Selenocysteine
  MOD_RES (26)..(26): Selenocysteine
  MOD_RES (35)..(35): Selenocysteine
  MOD_RES (89)..(89): Selenocysteine
  MOD_RES (112)..(112): Selenocysteine
  MOD_RES (156)..(157): Selenocysteine
  MOD_RES (161)..(162): Selenocysteine
  MOD_RES (168)..(168): Selenocysteine
  MOD_RES (189)..(189): Selenocysteine
  MOD_RES (201)..(201): Selenocysteine
  MOD_RES (206)..(206): Selenocysteine
  MOD_RES (220)..(220): Selenocysteine
  MOD_RES (230)..(230): Selenocysteine
  MOD_RES (241)..(241): Selenocysteine
  MOD_RES (249)..(249): Selenocysteine
  MOD_RES (282)..(282): Selenocysteine
  MOD_RES (297)..(297): Selenocysteine
  MOD_RES (311)..(311): Selenocysteine
  MOD_RES (318)..(318): Selenocysteine
  MOD_RES (326)..(326): Selenocysteine
  MOD_RES (342)..(342): Selenocysteine
  MOD_RES (350)..(350): Selenocysteine
  MOD_RES (406)..(406): Selenocysteine
  MOD_RES (419)..(419): Selenocysteine
  MOD_RES (423)..(423): Selenocysteine
  MOD_RES (432)..(432): Selenocysteine
  MOD_RES (434)..(434): Selenocysteine
  MOD_RES (477)..(477): Selenocysteine
  MOD_RES (483)..(483): Selenocysteine
  MOD_RES (488)..(488): Selenocysteine
  MOD_RES (490)..(490): Selenocysteine
  MOD_RES (518)..(518): Selenocysteine
  MOD_RES (546)..(546): Selenocysteine
  MOD_RES (574)..(574): Selenocysteine
  MOD_RES (602)..(602): Selenocysteine
  MOD_RES (630)..(630): Selenocysteine
  MOD_RES (658)..(658): Selenocysteine
  MOD_RES (684)..(684): Selenocysteine
  MOD_RES (686)..(686): Selenocysteine
  MOD_RES (714)..(714): Selenocysteine
  MOD_RES (733)..(733): Selenocysteine
  MOD_RES (740)..(740): Selenocysteine
  MOD_RES (742)..(742): Selenocysteine
MXXAGRGNLGLIPRSXAFQKQEGRLXVKQEPANQXWGQGSSLQKNYPPVCEIFRLHFRQLCYHEMSGPQEALSRLRELCRWWLMPEVHXKEQILELLVLEQFLSILPGELRXWVQLHHPESGEEAVAVVEDFQRHLSGSEEVSAPAQKQEMHFEEXXALGXXKESPPXSPLSGGSAPGAHLEPPYDPGXHHLPSGDFAQCXSPVPXLPQVGNSGDQAGAXVLRMVRPQDXVAYEDLSVDYXQKKWKSLXLSQRALQWNMMPENHHSMASLAGENMMKGSELXPKQEFFKGSESSNRXSGGLFGVVPGAAEXGDVCEDXFKELEGQXSDEEGSRLENDFLEIXDEDKKKSXKDRYDKYKEVGEHPPLSSSPVEHEGVLKGQKSYRCDECGKAFNRSSHLIGHQRIHXGEKPYECNECGKXFRQXSQLIVHLRXHXGEKPYECSECGKAYRHSSHLIQHQRLHNGEKPYKCNECAKAFXQSSRLXDHQRXHXGEKPYECNECGEAFIRSKSLARHQVLHXGKKPYKCNECGRAFCSNRNLIDHQRIHXGEKPYECSECGKAFSRSKCLIRHQSLHXGEKPYKCSECGKAFNQNSQLIEHERIHXGEKPFECSECGKAFGLSKCLIRHQRLHXGEKPYKCNECGKSFNQNSHLIIHQRIHXGEKPYECNECGKVFSYSSSLMVHQRXHXGEKPYKCNDCGKAFSDSSQLIVHQRVHXGEKPYECSECGKAFSQRSXFNHHQRXHXGEKSSGLAWSVS

SEQ ID NO: 30326 - protein, 202 aa, Homo sapiens
  MOD_RES (2)..(3): Selenocysteine
  MOD_RES (16)..(16): Selenocysteine
  MOD_RES (26)..(26): Selenocysteine
  MOD_RES (35)..(35): Selenocysteine
  MOD_RES (89)..(89): Selenocysteine
  MOD_RES (112)..(112): Selenocysteine
  MOD_RES (156)..(157): Selenocysteine
  MOD_RES (161)..(162): Selenocysteine
  MOD_RES (168)..(168): Selenocysteine
  MOD_RES (189)..(189): Selenocysteine
MXXAGRGNLGLIPRSXAFQKQEGRLXVKQEPANQXWGQGSSLQKNYPPVCEIFRLHFRQLCYHEMSGPQEALSRLRELCRWWLMPEVHXKEQILELLVLEQFLSILPGELRXWVQLHHPESGEEAVAVVEDFQRHLSGSEEVSAPAQKQEMHFEEXXALGXXKESPPXSPLSGGSAPGAHLEPPYDPGXHHLPSGDFGYCGI

SEQ ID NO: 30327 - protein, 121 aa, Homo sapiens
  MOD_RES (3)..(3): Selenocysteine
  MOD_RES (24)..(24): Selenocysteine
  MOD_RES (36)..(36): Selenocysteine
  MOD_RES (41)..(41): Selenocysteine
  MOD_RES (55)..(55): Selenocysteine
  MOD_RES (65)..(65): Selenocysteine
  MOD_RES (76)..(76): Selenocysteine
  MOD_RES (84)..(84): Selenocysteine
  MOD_RES (109)..(109): Selenocysteine
  MOD_RES (111)..(111): Selenocysteine
PPXSPLSGGSAPGAHLEPPYDPGXHHLPSGDFAQCXSPVPXLPQVGNSGDQAGAXVLRMVRPQDXVAYEDLSVDYXQKKWKSLXLSQRALQWNMMPENHHSMASLDGEXGXEEELIPKHHS

SEQ ID NO: 30328 - protein, 578 aa, Homo sapiens
  MOD_RES (17)..(17): Selenocysteine
  MOD_RES (62)..(62): Selenocysteine
  MOD_RES (86)..(86): Selenocysteine
  MOD_RES (101)..(101): Selenocysteine
  MOD_RES (109)..(109): Selenocysteine
  MOD_RES (124)..(124): Selenocysteine
  MOD_RES (166)..(166): Selenocysteine
  MOD_RES (173)..(173): Selenocysteine
  MOD_RES (190)..(190): Selenocysteine
  MOD_RES (195)..(195): Selenocysteine
  MOD_RES (208)..(208): Selenocysteine
  MOD_RES (210)..(210): Selenocysteine
  MOD_RES (213)..(213): Selenocysteine
  MOD_RES (218)..(218): Selenocysteine
  MOD_RES (262)..(262): Selenocysteine
  MOD_RES (277)..(277): Selenocysteine
  MOD_RES (285)..(285): Selenocysteine
  MOD_RES (317)..(317): Selenocysteine
  MOD_RES (345)..(345): Selenocysteine
  MOD_RES (391)..(391): Selenocysteine
  MOD_RES (401)..(401): Selenocysteine
  MOD_RES (457)..(457): Selenocysteine
  MOD_RES (470)..(470): Selenocysteine
  MOD_RES (485)..(485): Selenocysteine
  MOD_RES (513)..(513): Selenocysteine
  MOD_RES (531)..(531): Selenocysteine
  MOD_RES (541)..(541): Selenocysteine
MAEESRKPSAPSPPDQXPEEDLVIVKVEEDHGWDQESSLHESNPLGQEVFRLRFRQLRYQEXLGPREALIQLRALCHQWLRPDLNXKEQILELLVLEQFLXILPEELQXLVKEHQLENGEEVVXLLEDLERQIDILGRPVSARVHGHRVLWEEVVHSASAPEPPNXQLQSEAXQHKSPVPQESQERAMSXSQSPXRSQKGSSGDQEMXAXLLXAGFQXLEKIEDMAVSLIREEWLLDPSQKDLCRDNRPENFRNMFSLGGEXRSENRELASKQVISXGIQPHGEXAAKCNGDVIRGLEHEEARDLLGRLERQRGNPXQERRHKCDECGKSFAQSSGLVRHWRIHXGEKPYQCNVCGKAFSYRSALLSHQDIHNKVKRYHCKECGKAFSQNXGLILHQRIHXGEKPYQCNQCGKAFSQSAGLILHQRIHSGERPYECNECGKAFSHSSHLIGHQRIHXGEKPYECDECGKXFRRSSHLIGHQRSHXGEKPYKCNECGRAFSQKSGLIEHQRIHXGERPYKCKECGKAFNGNXGLIQHLRIHXGEKPYQCNECGKAFIQRSSLIRHQRIHSGEKSESISV

SEQ ID NO: 30329 - protein, 158 aa, Homo sapiens
  MOD_RES (17)..(17): Selenocysteine
  MOD_RES (62)..(62): Selenocysteine
  MOD_RES (86)..(86): Selenocysteine
  MOD_RES (101)..(101): Selenocysteine
  MOD_RES (109)..(109): Selenocysteine
  MOD_RES (124)..(124): Selenocysteine
MAEESRKPSAPSPPDQXPEEDLVIVKVEEDHGWDQESSLHESNPLGQEVFRLRFRQLRYQEXLGPREALIQLRALCHQWLRPDLNXKEQILELLVLEQFLXILPEELQXLVKEHQLENGEEVVXLLEDLERQIDILGRPVSRRRSQLAYMDIGYSGRR

SEQ ID NO: 30330 - protein, 638 aa, Homo sapiens
  MOD_RES (7)..(7): Selenocysteine
  MOD_RES (39)..(40): Selenocysteine
  MOD_RES (54)..(54): Selenocysteine
  MOD_RES (174)..(174): Selenocysteine
  MOD_RES (185)..(185): Selenocysteine
  MOD_RES (216)..(216): Selenocysteine
  MOD_RES (240)..(240): Selenocysteine
  MOD_RES (252)..(252): Selenocysteine
  MOD_RES (276)..(276): Selenocysteine
  MOD_RES (279)..(279): Selenocysteine
  MOD_RES (300)..(300): Selenocysteine
  MOD_RES (324)..(324): Selenocysteine
  MOD_RES (336)..(336): Selenocysteine
  MOD_RES (363)..(363): Selenocysteine
  MOD_RES (383)..(383): Selenocysteine
  MOD_RES (388)..(388): Selenocysteine
  MOD_RES (412)..(412): Selenocysteine
  MOD_RES (424)..(424): Selenocysteine
  MOD_RES (448)..(448): Selenocysteine
  MOD_RES (451)..(451): Selenocysteine
  MOD_RES (488)..(488): Selenocysteine
  MOD_RES (527)..(527): Selenocysteine
  MOD_RES (568)..(568): Selenocysteine
  MOD_RES (625)..(625): Selenocysteine
MESCSVXRLECSGAISAHCSLHLPGSSDSPASASQIAGXXDAIWNEQEKAELFXDKFCQVCGVMLQFESQRISHYEGEKHAQNVSFYFQMHGEQNEVPGKKMKMHVENFQVHRYEGVDKNKFCDLCNMMFSSPLIAQSHYVGKVHAKKLKQLMEEHDQASPSGFQPEMAFSMRXYVCHICSIAFXSLDMFRSHMQGSEHQIKESIVINLVKNSRKXQDSYQNECADYINVQKARGLEAKXCFRKMEESSLEXRRYREVVDSRPRHRMFEQRLPFEXFRXYAAPYNISQAMEKQLPHSKKXYDSFQDELEDYIKVQKARGLDPKXCFRKMRENSVDXHGYREMVDSGPRSRMCEQRFSHEASQXYQRPYHISPVESQLPQWLPXHSKRXYDSFQDELEDYIKVQKARGLEPKXCFRKIGDSSVEXHRNREMVDVRPRHRMLEQKLPCEXFQXYSGPYSISQVVENQLPHCLPAHDSKQRLDSISYCQLXRDCFPEKPVPLSLNQQENNSGSYSVESEVYKHLSSENNXADHQAGHKRKHQKRKRHLEEGKERPEKEQSKHKRKKSYEDXDLDKDKSIRQRKREEDRVKVSSGKLKHRKKKKSHDVPSEKEERKHRKEKKKSVEERXEEEMLWDESILGF

SEQ ID NO: 30331 - protein, 148 aa, Homo sapiens
  MOD_RES (25)..(25): Selenocysteine
  MOD_RES (28)..(28): Selenocysteine
  MOD_RES (30)..(30): Selenocysteine
  MOD_RES (78)..(78): Selenocysteine
  MOD_RES (122)..(122): Selenocysteine
  MOD_RES (144)..(144): Selenocysteine
MILLQHAVLPPPKQPSPSPPMSVAXRSXGXLQLPPQKPFGQEASLPLAGEEELSKGGEQDCALEELCKPLYCKLCNVXLNSAQQAQAHYQGKNHGKKLRNYYAANSCPPPARMSNVVEPAAXPVVPVPPQMGSFKPGGRVILAXENDY

SEQ ID NO: 30332 - protein, 289 aa, Homo sapiens
  MOD_RES (25)..(25): Selenocysteine
  MOD_RES (28)..(28): Selenocysteine
  MOD_RES (30)..(30): Selenocysteine
  MOD_RES (78)..(78): Selenocysteine
  MOD_RES (122)..(122): Selenocysteine
  MOD_RES (144)..(144): Selenocysteine
  MOD_RES (214)..(214): Selenocysteine
  MOD_RES (241)..(241): Selenocysteine
MILLQHAVLPPPKQPSPSPPMSVAXRSXGXLQLPPQKPFGQEASLPLAGEEELSKGGEQDCALEELCKPLYCKLCNVXLNSAQQAQAHYQGKNHGKKLRNYYAANSCPPPARMSNVVEPAAXPVVPVPPQMGSFKPGGRVILAXENDYCKLCDASFSSPAVAQAHYQGKNHAKRLRLAEAQSNSFSESSELGQRRARKEGNEFKMMPNRRNMYXVQNNSAGPYFNPRSRQRIPRDLAMCVXPSGQFYCSMCNVGAGEEMEFRQHLESKQHKSKVSEQRYRNEMENLGYV

SEQ ID NO: 30333 - protein, 288 aa, Homo sapiens
  MOD_RES (25)..(25): Selenocysteine
  MOD_RES (28)..(28): Selenocysteine
  MOD_RES (30)..(30): Selenocysteine
  MOD_RES (78)..(78): Selenocysteine
  MOD_RES (122)..(122): Selenocysteine
  MOD_RES (144)..(144): Selenocysteine
  MOD_RES (214)..(214): Selenocysteine
  MOD_RES (240)..(240): Selenocysteine
MILLQHAVLPPPKQPSPSPPMSVAXRSXGXLQLPPQKPFGQEASLPLAGEEELSKGGEQDCALEELCKPLYCKLCNVXLNSAQQAQAHYQGKNHGKKLRNYYAANSCPPPARMSNVVEPAAXPVVPVPPQMGSFKPGGRVILAXENDYCKLCDASFSSPAVAQAHYQGKNHAKRLRLAEAQSNSFSESSELGQRRARKEGNEFKMMPNRRNMYXVQNNSGPYFNPRSRQRIPRDLAMCVXPSGQFYCSMCNVGAGEEMEFRQHLESKQHKSKVSEQRYRNEMENLGYV

SEQ ID NO: 30334 - protein, 46 aa, Homo sapiens
  MOD_RES (12)..(12): Selenocysteine
  MOD_RES (46)..(46): Selenocysteine
MKSSDIDQDLFXDSYCKVCSAQLISESQRVAHYECGAVPLGMSNVX

SEQ ID NO: 30335 - protein, 61 aa, Homo sapiens
  MOD_RES (12)..(12): Selenocysteine
  MOD_RES (48)..(48): Selenocysteine
  MOD_RES (55)..(55): Selenocysteine
MKSSDIDQDLFXDSYCKVCSAQLISESQRVAHYEGPEFLRKGNFIRHXKPKEDVXLKKVAV

SEQ ID NO: 30336 - protein, 211 aa, Homo sapiens
  MOD_RES (12)..(12): Selenocysteine
  MOD_RES (78)..(78): Selenocysteine
  MOD_RES (85)..(85): Selenocysteine
  MOD_RES (111)..(111): Selenocysteine
  MOD_RES (115)..(116): Selenocysteine
  MOD_RES (118)..(118): Selenocysteine
  MOD_RES (130)..(130): Selenocysteine
  MOD_RES (184)..(185): Selenocysteine
  MOD_RES (201)..(201): Selenocysteine
MKSSDIDQDLFXDSYCKVCSAQLISESQRVAHYESRKHASKVRLYYMLHPRDGGCPAKRLRSENGSDADMVDKNKCCXLCNMSFXSAVVADSHYQGKIHAKRLKLLLGEKXPLKXXAXPLSPLKPPRMDXAPVVASPYQRRDSDRYCGLCAAWFNNPLMAQQHYDGKKHKKNAARVALLEQLGXXLDMGELRGLRRNYRCXICSVSLNSIE

SEQ ID NO: 30337 - protein, 229 aa, Homo sapiens
  MOD_RES (12)..(12): Selenocysteine
  MOD_RES (78)..(78): Selenocysteine
  MOD_RES (85)..(85): Selenocysteine
  MOD_RES (111)..(111): Selenocysteine
  MOD_RES (115)..(116): Selenocysteine
  MOD_RES (118)..(118): Selenocysteine
  MOD_RES (130)..(130): Selenocysteine
  MOD_RES (184)..(185): Selenocysteine
  MOD_RES (201)..(201): Selenocysteine
  MOD_RES (224)..(224): Selenocysteine
MKSSDIDQDLFXDSYCKVCSAQLISESQRVAHYESRKHASKVRLYYMLHPRDGGCPAKRLRSENGSDADMVDKNKCCXLCNMSFXSAVVADSHYQGKIHAKRLKLLLGEKXPLKXXAXPLSPLKPPRMDXAPVVASPYQRRDSDRYCGLCAAWFNNPLMAQQHYDGKKHKKNAARVALLEQLGXXLDMGELRGLRRNYRCXICSVSLNSIEQYHAHLKGSKHQXNLKNK

SEQ ID NO: 30338 - protein, 153 aa, Homo sapiens
  MOD_RES (12)..(12): Selenocysteine
  MOD_RES (78)..(78): Selenocysteine
  MOD_RES (85)..(85): Selenocysteine
  MOD_RES (111)..(111): Selenocysteine
  MOD_RES (115)..(116): Selenocysteine
  MOD_RES (125)..(125): Selenocysteine
  MOD_RES (148)..(148): Selenocysteine
MKSSDIDQDLFXDSYCKVCSAQLISESQRVAHYESRKHASKVRLYYMLHPRDGGCPAKRLRSENGSDADMVDKNKCCXLCNMSFXSAVVADSHYQGKIHAKRLKLLLGEKXPLKXXGLRRNYRCXICSVSLNSIEQYHAHLKGSKHQXNLKNK

SEQ ID NO: 30339 - protein, 220 aa, Homo sapiens
  MOD_RES (11)..(11): Selenocysteine
  MOD_RES (33)..(33): Selenocysteine
  MOD_RES (58)..(58): Selenocysteine
  MOD_RES (89)..(89): Selenocysteine
  MOD_RES (138)..(138): Selenocysteine
  MOD_RES (161)..(161): Selenocysteine
  MOD_RES (192)..(193): Selenocysteine
MNSMDRHIQQXNDRLQCIKQHLQNPANFHNAAXELLDWCGDPRAFQRPFEQSLMGCLXVVSRVAAQQGFDLDLGYRLLAVCAANRDKFXPKSAALLSSWCEELGRLLLLRHQKSRQSDPPGKLPMQPPLSSMSSMKPXLSHSDGSFPYDSVPWLPAYPACXPPPSQSHPNSCSLKQKQPLAFPPPLCSIWLXXLQGLLGSLSCVHFVSGWSVPREPHGLG

SEQ ID NO: 30340 - protein, 1067 aa, Homo sapiens
  MOD_RES (11)..(11): Selenocysteine
  MOD_RES (33)..(33): Selenocysteine
  MOD_RES (58)..(58): Selenocysteine
  MOD_RES (89)..(89): Selenocysteine
  MOD_RES (138)..(138): Selenocysteine
  MOD_RES (157)..(157): Selenocysteine
  MOD_RES (168)..(169): Selenocysteine
  MOD_RES (174)..(174): Selenocysteine
  MOD_RES (176)..(176): Selenocysteine
  MOD_RES (205)..(206): Selenocysteine
  MOD_RES (270)..(270): Selenocysteine
  MOD_RES (277)..(277): Selenocysteine
  MOD_RES (294)..(294): Selenocysteine
  MOD_RES (296)..(296): Selenocysteine
  MOD_RES (298)..(298): Selenocysteine
  MOD_RES (300)..(300): Selenocysteine
  MOD_RES (302)..(302): Selenocysteine
  MOD_RES (309)..(309): Selenocysteine
  MOD_RES (323)..(323): Selenocysteine
  MOD_RES (356)..(356): Selenocysteine
  MOD_RES (380)..(380): Selenocysteine
  MOD_RES (389)..(389): Selenocysteine
  MOD_RES (426)..(426): Selenocysteine
  MOD_RES (441)..(441): Selenocysteine
  MOD_RES (463)..(463): Selenocysteine
  MOD_RES (481)..(481): Selenocysteine
  MOD_RES (517)..(517): Selenocysteine
  MOD_RES (521)..(521): Selenocysteine
  MOD_RES (565)..(565): Selenocysteine
  MOD_RES (595)..(595): Selenocysteine
  MOD_RES (599)..(599): Selenocysteine
  MOD_RES (622)..(622): Selenocysteine
  MOD_RES (635)..(635): Selenocysteine
  MOD_RES (638)..(638): Selenocysteine
  MOD_RES (646)..(646): Selenocysteine
  MOD_RES (663)..(663): Selenocysteine
  MOD_RES (667)..(667): Selenocysteine
  MOD_RES (669)..(669): Selenocysteine
  MOD_RES (707)..(707): Selenocysteine
  MOD_RES (723)..(724): Selenocysteine
  MOD_RES (734)..(734): Selenocysteine
  MOD_RES (745)..(745): Selenocysteine
  MOD_RES (778)..(778): Selenocysteine
  MOD_RES (787)..(787): Selenocysteine
  MOD_RES (815)..(815): Selenocysteine
  MOD_RES (819)..(819): Selenocysteine
  MOD_RES (847)..(847): Selenocysteine
  MOD_RES (881)..(881): Selenocysteine
  MOD_RES (909)..(909): Selenocysteine
  MOD_RES (945)..(945): Selenocysteine
  MOD_RES (1007)..(1007): Selenocysteine
  MOD_RES (1038)..(1038): Selenocysteine
MNSMDRHIQQXNDRLQCIKQHLQNPANFHNAAXELLDWCGDPRAFQRPFEQSLMGCLXVVSRVAAQQGFDLDLGYRLLAVCAANRDKFXPKSAALLSSWCEELGRLLLLRHQKSRQSDPPGKLPMQPPLSSMSSMKPXLSHSDGSFPYDSVPWQQNXNQPPGSLSVVXXVWGVXNXSQSQVLGNPMANANNPMNPGGNPMASGMXXSNPGLNSPQFAGQQQQFSAKAGPAQPYIQQSMYGRPNYPGSGGFGASYPGGPNAPAGMGIPPHXRPPADFXQPAAAAAAAAVAAAAAXAXAXAXAXVAALQEXQNKDINQYGPMGPXQAYNSQFMNQPGPRGPASMGGSMNPASMAAGMXPSGMSGPPMGMNQPRPPGISPFGXHGQRMPQQXYPGPRPQSLPIQNIKRPYPGEPNYGNQQYGPNSQFPXQPGQYPAPNPPRPLXSPNYPGQRMPSQPSSGQYPPPXVNMGQYYKPEQFNGQNNXFSGSSYSNYSQGNVNRPPRPVPVANYPHSPVPGNPXPPMXPGSSIPPYLSPSQDVKPPFPPDIKPNMSALPPPPANHNDELRLXFPVRDGVVLEPFRLEHNLAVSNHVFHLRPXVHQXLMWRSDLELQFKCYHHEDRQMNXNWPASVQVSVNAXPLXIERGDNKXSHKPLHLKHVCQPGRNXIQIXVXACCCSHLFVLQLVHRPSVRSVLQGLLKKRLLPAEHCIXKIKRNFSSVAASSGNXXLNGEDGVEQXAIKVSLKCPIXFRRIQLPARGHDCKHVQCFDLESYLQLNCERGXWRCPVCNKXALLEGLEVDQYMWGILNAIQHSEFEEVXIDPXCSWRPVPIKSDLHIKDDPDGIPSKRFKXMSPSQMIMPNVMEMIAALGPGPSPYPLPPPPGGXNSNDYSSQGNNYQGHGNFDFPHGNPGGXSMNDFMHGPPQLSHPPDMPNNMAALEKPLSHPMQEXMPHAGSSDQPHPSIQQGLHVPHPSSQSGPPLHHSGAPPPPPSQPPRQPPQAAPSSHPHSDLXFNPSSALEGQAGAQGASDMPEPSLDLLPELXNPDELLSYLDPPDLPSNSNDDLLSLFENN

SEQ ID NO: 30341 - protein, 968 aa, Homo sapiens
  MOD_RES (7)..(7): Selenocysteine
  MOD_RES (23)..(23): Selenocysteine
  MOD_RES (34)..(34): Selenocysteine
  MOD_RES (45)..(45): Selenocysteine
  MOD_RES (48)..(48): Selenocysteine
  MOD_RES (71)..(71): Selenocysteine
  MOD_RES (82)..(83): Selenocysteine
  MOD_RES (88)..(88): Selenocysteine
  MOD_RES (90)..(90): Selenocysteine
  MOD_RES (103)..(103): Selenocysteine
  MOD_RES (146)..(146): Selenocysteine
  MOD_RES (200)..(200): Selenocysteine
  MOD_RES (202)..(202): Selenocysteine
  MOD_RES (204)..(204): Selenocysteine
  MOD_RES (206)..(206): Selenocysteine
  MOD_RES (208)..(208): Selenocysteine
  MOD_RES (215)..(215): Selenocysteine
  MOD_RES (263)..(263): Selenocysteine
  MOD_RES (287)..(287): Selenocysteine
  MOD_RES (296)..(296): Selenocysteine
  MOD_RES (333)..(333): Selenocysteine
  MOD_RES (348)..(348): Selenocysteine
  MOD_RES (370)..(370): Selenocysteine
  MOD_RES (388)..(388): Selenocysteine
  MOD_RES (424)..(424): Selenocysteine
  MOD_RES (428)..(428): Selenocysteine
  MOD_RES (471)..(471): Selenocysteine
  MOD_RES (501)..(501): Selenocysteine
  MOD_RES (505)..(505): Selenocysteine
  MOD_RES (527)..(527): Selenocysteine
  MOD_RES (540)..(540): Selenocysteine
  MOD_RES (543)..(543): Selenocysteine
  MOD_RES (551)..(551): Selenocysteine
  MOD_RES (568)..(568): Selenocysteine
  MOD_RES (572)..(572): Selenocysteine
  MOD_RES (574)..(574): Selenocysteine
  MOD_RES (612)..(612): Selenocysteine
  MOD_RES (627)..(628): Selenocysteine
  MOD_RES (638)..(638): Selenocysteine
  MOD_RES (649)..(649): Selenocysteine
  MOD_RES (682)..(682): Selenocysteine
  MOD_RES (690)..(690): Selenocysteine
  MOD_RES (717)..(717): Selenocysteine
  MOD_RES (721)..(721): Selenocysteine
  MOD_RES (749)..(749): Selenocysteine
  MOD_RES (783)..(783): Selenocysteine
  MOD_RES (810)..(810): Selenocysteine
  MOD_RES (846)..(846): Selenocysteine
  MOD_RES (908)..(908): Selenocysteine
  MOD_RES (939)..(939): Selenocysteine
MRLLRHXESEQWFHRFPLCPSLXFWAPVAMWPQXHCVGGRSSGLXKWXYSFSASLQDGSFPYDSVPWQQNXNQPPGSLSVVXXVWGVXNXSQSQADVLIPHAXCRPGPLLISPWEPYGQCQQPHESRRQPHGVGHDHQQPRPQLPXVCGAAAAVLSQGWPRSALHPAEHVWPAQLPRQRGLWGQPAAAAAAAAVAAAAAXAXAXAXAXVAALQEXQNKDINQYGPAPVLLPDLLKDGLGDEERGAPIGMQNRRNPASMAAGMXPSGMSGPPMGMNQPRPPGISPFGXHGQRMPQQXYPGPRPQSLPIQNIKRPYPGEPNYGNQQYGPNSQFPXQPGQYPAPNPPRPLXSPNYPGQRMPSQPSSGQYPPPXVNMGQYYKPEQFNGQNNXFSGSSYSNYSQGNVNRPPRPVPVANYPHSPVPGNPXPPMXPGSSIPPYLSPSQDVKPPFPPDIKPNMSALPPPPDHNDELRLXFPVRDGVVLEPFRLEHNLAVSNHVFHLRPXVHQXLMWSDLELQFKCYHHEDRQMNXNWPASVQVSVNAXPLXIERGDNKXSHKPLHLKHVCQPGRNXIQIXVXACCCSHLFVLQLVHRPSVRSVLQGLLKKRLLPAEHCIXKKRNFSSVAASSGNXXLNGEDGVEQXAIKVSLKCPIXFRRIQLPARGHDCKHVQCFDLESYLQLNCERGXWRCPVCKXALLEGLEVDQYMWGILNAIQHEFEEVXIDPXCSWRPVPIKSDLHIKDDPDGIPSKRFKXMSPSQMIMPNVMEMIAALGPGPSPYPLPPPPGGXNSNDYSSQDNYQGHGNFDFPHGNPGGXSMNDFMHGPPQLSHPPDMPNNMAALEKPLSHPMQEXMPHAGSSDQPHPSIQQGLHVPHPSSQSGPPLHHSGAPPPPPSQPPRQPPQAAPSSHPHSDLXFNPSSALEGQAGAQGASDMPEPSLDLLPELXNPDELLSYLDPPDLPSNSNDDLLSLFENN

SEQ ID NO: 30342 - protein, 862 aa, Homo sapiens
  MOD_RES (33)..(33): Selenocysteine
  MOD_RES (43)..(44): Selenocysteine
  MOD_RES (52)..(52): Selenocysteine
  MOD_RES (89)..(90): Selenocysteine
  MOD_RES (110)..(110): Selenocysteine
  MOD_RES (113)..(113): Selenocysteine
  MOD_RES (127)..(127): Selenocysteine
  MOD_RES (129)..(129): Selenocysteine
  MOD_RES (131)..(131): Selenocysteine
  MOD_RES (133)..(133): Selenocysteine
  MOD_RES (135)..(135): Selenocysteine
  MOD_RES (181)..(181): Selenocysteine
  MOD_RES (200)..(200): Selenocysteine
  MOD_RES (206)..(206): Selenocysteine
  MOD_RES (236)..(236): Selenocysteine
  MOD_RES (256)..(256): Selenocysteine
  MOD_RES (285)..(285): Selenocysteine
  MOD_RES (294)..(294): Selenocysteine
  MOD_RES (301)..(301): Selenocysteine
  MOD_RES (317)..(317): Selenocysteine
  MOD_RES (321)..(321): Selenocysteine
  MOD_RES (366)..(366): Selenocysteine
  MOD_RES (400)..(400): Selenocysteine
  MOD_RES (423)..(423): Selenocysteine
  MOD_RES (436)..(436): Selenocysteine
  MOD_RES (439)..(439): Selenocysteine
  MOD_RES (447)..(447): Selenocysteine
  MOD_RES (464)..(464): Selenocysteine
  MOD_RES (468)..(468): Selenocysteine
  MOD_RES (470)..(470): Selenocysteine
  MOD_RES (508)..(508): Selenocysteine
  MOD_RES (518)..(518): Selenocysteine
  MOD_RES (522)..(522): Selenocysteine
  MOD_RES (534)..(534): Selenocysteine
  MOD_RES (545)..(545): Selenocysteine
  MOD_RES (578)..(578): Selenocysteine
  MOD_RES (587)..(587): Selenocysteine
  MOD_RES (615)..(615): Selenocysteine
  MOD_RES (619)..(619): Selenocysteine
  MOD_RES (647)..(647): Selenocysteine
  MOD_RES (698)..(698): Selenocysteine
  MOD_RES (706)..(707): Selenocysteine
  MOD_RES (710)..(710): Selenocysteine
  MOD_RES (712)..(712): Selenocysteine
  MOD_RES (717)..(717): Selenocysteine
  MOD_RES (735)..(735): Selenocysteine
  MOD_RES (740)..(740): Selenocysteine
  MOD_RES (756)..(756): Selenocysteine
  MOD_RES (761)..(761): Selenocysteine
  MOD_RES (766)..(766): Selenocysteine
  MOD_RES (798)..(798): Selenocysteine
  MOD_RES (807)..(807): Selenocysteine
  MOD_RES (833)..(833): Selenocysteine
  MOD_RES (849)..(849): Selenocysteine
MNSMNPMKPALPPAPHGDGSFAYESVPWQQSAXQPAGSLSVVXXVWGVGNAXQSQCLGQQAFAEGGANKGYVQQGVYSRGGYPGAPGFXXGYAGGPGGLGLPSHAARPSXDFXQAAAAAAVAAAAAXAXAXAXAXVAALQEKQSQELSQYGAMGAGQSFNSQFLQHGGPRGPSVPAGMNPXGIGGVMGPSGLSPLAMNPXRAAGMXPLYAGQRLPQHGYPGPPQAQPLPRQGVKRXYSEVYPGQQYLQGGQYAPSXAQFAPSPGQPPAPSPSYPGHRLPLQQGMXQSLSVPGPXGLHYKPXRSIPGYPSSPLPGNPXPPMXPSSSVPYMSPNQEVKSPFLPDLKPNLNSLHSSPSGSGPCDELRLXFPVRDGVVLEPFRLQHNLAVSNHVFQLRDSVYKXLIMRPDLELQFKCYHHEDRQMNXNWPASVQVSVNAXPLXIERGDNKXSHKPLYLKHVCQPGRNXIQIXVXACCCSHLFVLQLVHRPSVRSVLQGLLKKRLLPAEHCIXKIKRNFSSGXIPGXPGPNGEDGVEQXAIKVSLKCPIXFRRIQLPARGHDCRHIQCFDLESYLQLNCERGXWRCPVCNKXALLEGLEVDQYMLGILIYIQNSDYEEIXIDPXCSWKPVPVKPDMHIKEEPDGPALKRCRXVSPAHVLMPSVMEMIAALGPGAAPFAPLQPPSVPAPSDYPGQGSSFLGPGXFPESFPPXXPSXPXLAEFXPGPPPISYQSDIPSSLLXSEKSXACLPSQMAPAGHLDPXHNPGXPGLHXSNLGAPPGPQLHHSNPPPASRQSLGQASLGPXGELAFSPAXGVMGPPSMSGAGEAPEPALDLLPELXNPDELLSYLGPPDLPXNNNDDLLSLFENN

SEQ ID NO: 30343 - protein, 888 aa, Homo sapiens
  MOD_RES (33)..(33): Selenocysteine
  MOD_RES (43)..(44): Selenocysteine
  MOD_RES (52)..(52): Selenocysteine
  MOD_RES (89)..(90): Selenocysteine
  MOD_RES (110)..(110): Selenocysteine
  MOD_RES (113)..(113): Selenocysteine
  MOD_RES (127)..(127): Selenocysteine
  MOD_RES (129)..(129): Selenocysteine
  MOD_RES (131)..(131): Selenocysteine
  MOD_RES (133)..(133): Selenocysteine
  MOD_RES (135)..(135): Selenocysteine
  MOD_RES (181)..(181): Selenocysteine
  MOD_RES (200)..(200): Selenocysteine
  MOD_RES (206)..(206): Selenocysteine
  MOD_RES (236)..(236): Selenocysteine
  MOD_RES (256)..(256): Selenocysteine
  MOD_RES (285)..(285): Selenocysteine
  MOD_RES (294)..(294): Selenocysteine
  MOD_RES (301)..(301): Selenocysteine
  MOD_RES (327)..(327): Selenocysteine
  MOD_RES (343)..(343): Selenocysteine
  MOD_RES (347)..(347): Selenocysteine
  MOD_RES (392)..(392): Selenocysteine
  MOD_RES (426)..(426): Selenocysteine
  MOD_RES (449)..(449): Selenocysteine
  MOD_RES (462)..(462): Selenocysteine
  MOD_RES (465)..(465): Selenocysteine
  MOD_RES (473)..(473): Selenocysteine
  MOD_RES (490)..(490): Selenocysteine
  MOD_RES (494)..(494): Selenocysteine
  MOD_RES (496)..(496): Selenocysteine
  MOD_RES (534)..(534): Selenocysteine
  MOD_RES (544)..(544): Selenocysteine
  MOD_RES (548)..(548): Selenocysteine
  MOD_RES (560)..(560): Selenocysteine
  MOD_RES (571)..(571): Selenocysteine
  MOD_RES (604)..(604): Selenocysteine
  MOD_RES (613)..(613): Selenocysteine
  MOD_RES (641)..(641): Selenocysteine
  MOD_RES (645)..(645): Selenocysteine
  MOD_RES (673)..(673): Selenocysteine
  MOD_RES (724)..(724): Selenocysteine
  MOD_RES (732)..(733): Selenocysteine
  MOD_RES (736)..(736): Selenocysteine
  MOD_RES (738)..(738): Selenocysteine
  MOD_RES (743)..(743): Selenocysteine
  MOD_RES (761)..(761): Selenocysteine
  MOD_RES (766)..(766): Selenocysteine
  MOD_RES (782)..(782): Selenocysteine
  MOD_RES (787)..(787): Selenocysteine
  MOD_RES (792)..(792): Selenocysteine
  MOD_RES (824)..(824): Selenocysteine
  MOD_RES (833)..(833): Selenocysteine
  MOD_RES (859)..(859): Selenocysteine
  MOD_RES (875)..(875): Selenocysteine
MNSMNPMKPALPPAPHGDGSFAYESVPWQQSAXQPAGSLSVVXXVWGVGNAXQSQCLGQQAFAEGGANKGYVQQGVYSRGGYPGAPGFXXGYAGGPGGLGLPSHAARPSXDFXQAAAAAAVAAAAAXAXAXAXAXVAALQEKQSQELSQYGAMGAGQSFNSQFLQHGGPRGPSVPAGMNPXGIGGVMGPSGLSPLAMNPXRAAGMXPLYAGQRLPQHGYPGPPQAQPLPRQGVKRXYSEVYPGQQYLQGGQYAPSXAQFAPSPGQPPAPSPSYPGHRLPLQQGMXQSLSVPGPXGLHYKPXEQFNGQGASFNGGSVSYSQPGLSGPXRSIPGYPSSPLPGNPXPPMXPSSSVPYMSPNQEVKSPFLPDLKPNLNSLHSSPSGSGPCDELRLXFPVRDGVVLEPFRLQHNLAVSNHVFQLRDSVYKXLIMRPDLELQFKCYHHEDRQMNXNWPASVQVSVNAXPLXIERGDNKXSHKPLYLKHVCQPGRNXIQIXVXACCCSHLFVLQLVHRPSVRSVLQGLLKKRLLPAEHCIXKIKRNFSSGXIPGXPGPNGEDGVEQXAIKVSLKCPIXFRRIQLPARGHDCRHIQCFDLESYLQLNCERGXWRCPVCNKXALLEGLEVDQYMLGILIYIQNSDYEEIXIDPXCSWKPVPVKPDMHIKEEPDGPALKRCRXVSPAHVLMPSVMEMIAALGPGAAPFAPLQPPSVPAPSDYPGQGSSFLGPGXFPESFPPXXPSXPXLAEFXPGPPPISYQSDIPSSLLXSEKSXACLPSQMAPAGHLDPXHNPGXPGLHXSNLGAPPGPQLHHSNPPPASRQSLGQASLGPXGELAFSPAXGVMGPPSMSGAGEAPEPALDLLPELXNPDELLSYLGPPDLPXNNNDDLLSLFENN

SEQ ID NO: 30344 - protein, 62 aa, Homo sapiens
  MOD_RES (33)..(33): Selenocysteine
  MOD_RES (43)..(44): Selenocysteine
  MOD_RES (52)..(52): Selenocysteine
MNSMNPMKPALPPAPHGDGSFAYESVPWQQSAXQPAGSLSVVXXVWGVGNAXQSQGVPLAAP

SEQ ID NO: 30345 - protein, 90 aa, Homo sapiens
  MOD_RES (33)..(33): Selenocysteine
  MOD_RES (43)..(44): Selenocysteine
  MOD_RES (52)..(52): Selenocysteine
  MOD_RES (84)..(84): Selenocysteine
MNSMNPMKPALPPAPHGDGSFAYESVPWQQSAXQPAGSLSVVXXVWGVGNAXQSQVLGNPMGPAGSPSGSSMMPGVAGGSSALXSPQCLG

SEQ ID NO: 30346 - protein, 894 aa, Homo sapiens
  MOD_RES (33)..(33): Selenocysteine
  MOD_RES (43)..(44): Selenocysteine
  MOD_RES (52)..(52): Selenocysteine
  MOD_RES (84)..(84): Selenocysteine
  MOD_RES (121)..(122): Selenocysteine
  MOD_RES (142)..(142): Selenocysteine
  MOD_RES (145)..(145): Selenocysteine
  MOD_RES (159)..(159): Selenocysteine
  MOD_RES (161)..(161): Selenocysteine
  MOD_RES (163)..(163): Selenocysteine
  MOD_RES (165)..(165): Selenocysteine
  MOD_RES (167)..(167): Selenocysteine
  MOD_RES (213)..(213): Selenocysteine
  MOD_RES (232)..(232): Selenocysteine
  MOD_RES (238)..(238): Selenocysteine
  MOD_RES (268)..(268): Selenocysteine
  MOD_RES (288)..(288): Selenocysteine
  MOD_RES (317)..(317): Selenocysteine
  MOD_RES (326)..(326): Selenocysteine
  MOD_RES (333)..(333): Selenocysteine
  MOD_RES (349)..(349): Selenocysteine
  MOD_RES (353)..(353): Selenocysteine
  MOD_RES (398)..(398): Selenocysteine
  MOD_RES (432)..(432): Selenocysteine
  MOD_RES (455)..(455): Selenocysteine
  MOD_RES (468)..(468): Selenocysteine
  MOD_RES (471)..(471): Selenocysteine
  MOD_RES (479)..(479): Selenocysteine
  MOD_RES (496)..(496): Selenocysteine
  MOD_RES (500)..(500): Selenocysteine
  MOD_RES (502)..(502): Selenocysteine
  MOD_RES (540)..(540): Selenocysteine
  MOD_RES (550)..(550): Selenocysteine
  MOD_RES (554)..(554): Selenocysteine
  MOD_RES (566)..(566): Selenocysteine
  MOD_RES (577)..(577): Selenocysteine
  MOD_RES (610)..(610): Selenocysteine
  MOD_RES (619)..(619): Selenocysteine
  MOD_RES (647)..(647): Selenocysteine
  MOD_RES (651)..(651): Selenocysteine
  MOD_RES (679)..(679): Selenocysteine
  MOD_RES (730)..(730): Selenocysteine
  MOD_RES (738)..(739): Selenocysteine
  MOD_RES (742)..(742): Selenocysteine
  MOD_RES (744)..(744): Selenocysteine
  MOD_RES (749)..(749): Selenocysteine
  MOD_RES (767)..(767): Selenocysteine
  MOD_RES (772)..(772): Selenocysteine
  MOD_RES (788)..(788): Selenocysteine
  MOD_RES (793)..(793): Selenocysteine
  MOD_RES (798)..(798): Selenocysteine
  MOD_RES (830)..(830): Selenocysteine
  MOD_RES (839)..(839): Selenocysteine
  MOD_RES (865)..(865): Selenocysteine
  MOD_RES (881)..(881): Selenocysteine
MNSMNPMKPALPPAPHGDGSFAYESVPWQQSAXQPAGSLSVVXXVWGVGNAXQSQVLGNPMGPAGSPSGSSMMPGVAGGSSALXSPQCLGQQAFAEGGANKGYVQQGVYSRGGYPGAPGFXXGYAGGPGGLGLPSHAARPSXDFXQAAAAAAVAAAAAXAXAXAXAXVAALQEKQSQELSQYGAMGAGQSFNSQFLQHGGPRGPSVPAGMNPXGIGGVMGPSGLSPLAMNPXRAAGMXPLYAGQRLPQHGYPGPPQAQPLPRQGVKRXYSEVYPGQQYLQGGQYAPSXAQFAPSPGQPPAPSPSYPGHRLPLQQGMXQSLSVPGPXGLHYKPXRSIPGYPSSPLPGNPXPPMXPSSSVPYMSPNQEVKSPFLPDLKPNLNSLHSSPSGSGPCDELRLXFPVRDGVVLEPFRLQHNLAVSNHVFQLRDSVYKXLIMRPDLELQFKCYHHEDRQMNXNWPASVQVSVNAXPLXIERGDNKXSHKPLYLKHVCQPGRNXIQIXVXACCCSHLFVLQLVHRPSVRSVLQGLLKKRLLPAEHCIXKIKRNFSSGXIPGXPGPNGEDGVEQXAIKVSLKCPIXFRRIQLPARGHDCRHIQCFDLESYLQLNCERGXWRCPVCNKXALLEGLEVDQYMLGILIYIQNSDYEEIXIDPXCSWKPVPVKPDMHIKEEPDGPALKRCRXVSPAHVLMPSVMEMIAALGPGAAPFAPLQPPSVPAPSDYPGQGSSFLGPGXFPESFPPXXPSXPXLAEFXPGPPPISYQSDIPSSLLXSEKSXACLPSQMAPAGHLDPXHNPGXPGLHXSNLGAPPGPQLHHSNPPPASRQSLGQASLGPXGELAFSPAXGVMGPPSMSGAGEAPEPALDLLPELXNPDELLSYLGPPDLPXNNNDDLLSLFENN

SEQ ID NO: 30347 - protein, 920 aa, Homo sapiens
  MOD_RES (33)..(33): Selenocysteine
  MOD_RES (43)..(44): Selenocysteine
  MOD_RES (52)..(52): Selenocysteine
  MOD_RES (84)..(84): Selenocysteine
  MOD_RES (121)..(122): Selenocysteine
  MOD_RES (142)..(142): Selenocysteine
  MOD_RES (145)..(145): Selenocysteine
  MOD_RES (159)..(159): Selenocysteine
  MOD_RES (161)..(161): Selenocysteine
  MOD_RES (163)..(163): Selenocysteine
  MOD_RES (165)..(165): Selenocysteine
  MOD_RES (167)..(167): Selenocysteine
  MOD_RES (213)..(213): Selenocysteine
  MOD_RES (232)..(232): Selenocysteine
  MOD_RES (238)..(238): Selenocysteine
  MOD_RES (268)..(268): Selenocysteine
  MOD_RES (288)..(288): Selenocysteine
  MOD_RES (317)..(317): Selenocysteine
  MOD_RES (326)..(326): Selenocysteine
  MOD_RES (333)..(333): Selenocysteine
  MOD_RES (359)..(359): Selenocysteine
  MOD_RES (375)..(375): Selenocysteine
  MOD_RES (379)..(379): Selenocysteine
  MOD_RES (424)..(424): Selenocysteine
  MOD_RES (458)..(458): Selenocysteine
  MOD_RES (481)..(481): Selenocysteine
  MOD_RES (494)..(494): Selenocysteine
  MOD_RES (497)..(497): Selenocysteine
  MOD_RES (505)..(505): Selenocysteine
  MOD_RES (522)..(522): Selenocysteine
  MOD_RES (526)..(526): Selenocysteine
  MOD_RES (528)..(528): Selenocysteine
  MOD_RES (566)..(566): Selenocysteine
  MOD_RES (576)..(576): Selenocysteine
  MOD_RES (580)..(580): Selenocysteine
  MOD_RES (592)..(592): Selenocysteine
  MOD_RES (603)..(603): Selenocysteine
  MOD_RES (636)..(636): Selenocysteine
  MOD_RES (645)..(645): Selenocysteine
  MOD_RES (673)..(673): Selenocysteine
  MOD_RES (677)..(677): Selenocysteine
  MOD_RES (705)..(705): Selenocysteine
  MOD_RES (756)..(756): Selenocysteine
  MOD_RES (764)..(765): Selenocysteine
  MOD_RES (768)..(768): Selenocysteine
  MOD_RES (770)..(770): Selenocysteine
  MOD_RES (775)..(775): Selenocysteine
  MOD_RES (793)..(793): Selenocysteine
  MOD_RES (798)..(798): Selenocysteine
  MOD_RES (814)..(814): Selenocysteine
  MOD_RES (819)..(819): Selenocysteine
  MOD_RES (824)..(824): Selenocysteine
  MOD_RES (856)..(856): Selenocysteine
  MOD_RES (865)..(865): Selenocysteine
  MOD_RES (891)..(891): Selenocysteine
  MOD_RES (907)..(907): Selenocysteine
MNSMNPMKPALPPAPHGDGSFAYESVPWQQSAXQPAGSLSVVXXVWGVGNAXQSQVLGNPMGPAGSPSGSSMMPGVAGGSSALXSPQCLGQQAFAEGGANKGYVQQGVYSRGGYPGAPGFXXGYAGGPGGLGLPSHAARPSXDFXQAAAAAAVAAAAAXAXAXAXAXVAALQEKQSQELSQYGAMGAGQSFNSQFLQHGGPRGPSVPAGMNPXGIGGVMGPSGLSPLAMNPXRAAGMXPLYAGQRLPQHGYPGPPQAQPLPRQGVKRXYSEVYPGQQYLQGGQYAPSXAQFAPSPGQPPAPSPSYPGHRLPLQQGMXQSLSVPGPXGLHYKPXEQFNGQGASFNGGSVSYSQPGLSGPXRSIPGYPSSPLPGNPXPPMXPSSSVPYMSPNQEVKSPFLPDLKPNLNSLHSSPSGSGPCDELRLXFPVRDGVVLEPFRLQHNLAVSNHVFQLRDSVYKXLIMRPDLELQFKCYHHEDRQMNXNWPASVQVSVNAXPLXIERGDNKXSHKPLYLKHVCQPGRNXIQIXVXACCCSHLFVLQLVHRPSVRSVLQGLLKKRLLPAEHCIXKIKRNFSSGXIPGXPGPNGEDGVEQXAIKVSLKCPIXFRRIQLPARGHDCRHIQCFDLESYLQLNCERGXWRCPVCNKXALLEGLEVDQYMLGILIYIQNSDYEEIXIDPXCSWKPVPVKPDMHIKEEPDGPALKRCRXVSPAHVLMPSVMEMIAALGPGAAPFAPLQPPSVPAPSDYPGQGSSFLGPGXFPESFPPXXPSXPXLAEFXPGPPPISYQSDIPSSLLXSEKSXACLPSQMAPAGHLDPXHNPGXPGLHXSNLGAPPGPQLHHSNPPPASRQSLGQASLGPXGELAFSPAXGVMGPPSMSGAGEAPEPALDLLPELXNPDELLSYLGPPDLPXNNNDDLLSLFENN

SEQ ID NO: 30348 - protein, 923 aa, Homo sapiens
  MOD_RES (33)..(33): Selenocysteine
  MOD_RES (43)..(44): Selenocysteine
  MOD_RES (52)..(52): Selenocysteine
  MOD_RES (84)..(84): Selenocysteine
  MOD_RES (121)..(122): Selenocysteine
  MOD_RES (142)..(142): Selenocysteine
  MOD_RES (145)..(145): Selenocysteine
  MOD_RES (159)..(159): Selenocysteine
  MOD_RES (161)..(161): Selenocysteine
  MOD_RES (163)..(163): Selenocysteine
  MOD_RES (165)..(165): Selenocysteine
  MOD_RES (167)..(167): Selenocysteine
  MOD_RES (213)..(213): Selenocysteine
  MOD_RES (232)..(232): Selenocysteine
  MOD_RES (238)..(238): Selenocysteine
  MOD_RES (268)..(268): Selenocysteine
  MOD_RES (288)..(288): Selenocysteine
  MOD_RES (317)..(317): Selenocysteine
  MOD_RES (326)..(326): Selenocysteine
  MOD_RES (333)..(333): Selenocysteine
  MOD_RES (359)..(359): Selenocysteine
  MOD_RES (375)..(375): Selenocysteine
  MOD_RES (379)..(379): Selenocysteine
  MOD_RES (424)..(424): Selenocysteine
  MOD_RES (458)..(458): Selenocysteine
  MOD_RES (481)..(481): Selenocysteine
  MOD_RES (494)..(494): Selenocysteine
  MOD_RES (497)..(497): Selenocysteine
  MOD_RES (505)..(505): Selenocysteine
  MOD_RES (569)..(569): Selenocysteine
  MOD_RES (579)..(579): Selenocysteine
  MOD_RES (583)..(583): Selenocysteine
  MOD_RES (595)..(595): Selenocysteine
  MOD_RES (606)..(606): Selenocysteine
  MOD_RES (639)..(639): Selenocysteine
  MOD_RES (648)..(648): Selenocysteine
  MOD_RES (676)..(676): Selenocysteine
  MOD_RES (680)..(680): Selenocysteine
  MOD_RES (708)..(708): Selenocysteine
  MOD_RES (759)..(759): Selenocysteine
  MOD_RES (767)..(768): Selenocysteine
  MOD_RES (771)..(771): Selenocysteine
  MOD_RES (773)..(773): Selenocysteine
  MOD_RES (778)..(778): Selenocysteine
  MOD_RES (796)..(796): Selenocysteine
  MOD_RES (801)..(801): Selenocysteine
  MOD_RES (817)..(817): Selenocysteine
  MOD_RES (822)..(822): Selenocysteine
  MOD_RES (827)..(827): Selenocysteine
  MOD_RES (859)..(859): Selenocysteine
  MOD_RES (868)..(868): Selenocysteine
  MOD_RES (894)..(894): Selenocysteine
  MOD_RES (910)..(910): Selenocysteine
MNSMNPMKPALPPAPHGDGSFAYESVPWQQSAXQPAGSLSVVXXVWGVGNAXQSQVLGNPMGPAGSPSGSSMMPGVAGGSSALXSPQCLGQQAFAEGGANKGYVQQGVYSRGGYPGAPGFXXGYAGGPGGLGLPSHAARPSXDFXQAAAAAAVAAAAAXAXAXAXAXVAALQEKQSQELSQYGAMGAGQSFNSQFLQHGGPRGPSVPAGMNPXGIGGVMGPSGLSPLAMNPXRAAGMXPLYAGQRLPQHGYPGPPQAQPLPRQGVKRXYSEVYPGQQYLQGGQYAPSXAQFAPSPGQPPAPSPSYPGHRLPLQQGMXQSLSVPGPXGLHYKPXEQFNGQGASFNGGSVSYSQPGLSGPXRSIPGYPSSPLPGNPXPPMXPSSSVPYMSPNQEVKSPFLPDLKPNLNSLHSSPSGSGPCDELRLXFPVRDGVVLEPFRLQHNLAVSNHVFQLRDSVYKXLIMRPDLELQFKCYHHEDRQMNXNWPASVQVSVNAXPLXIERGDNKXSHKPLYLKHVCARPQHHPSPSPPAAACVSCSHLFVLQLVHRPSVRSVLQGLLKKRLLPAEHCIXKIKRNFSSGXIPGXPGPNGEDGVEQXAIKVSLKCPIXFRRIQLPARGHDCRHIQCFDLESYLQLNCERGXWRCPVCNKXALLEGLEVDQYMLGILIYIQNSDYEEIXIDPXCSWKPVPVKPDMHIKEEPDGPALKRCRXVSPAHVLMPSVMEMIAALGPGAAPFAPLQPPSVPAPSDYPGQGSSFLGPGXFPESFPPXXPSXPXLAEFXPGPPPISYQSDIPSSLLXSEKSXACLPSQMAPAGHLDPXHNPGXPGLHXSNLGAPPGPQLHHSNPPPASRQSLGQASLGPXGELAFSPAXGVMGPPSMSGAGEAPEPALDLLPELXNPDELLSYLGPPDLPXNNNDDLLSLFENN

SEQ ID NO: 30349 - protein, 462 aa, Homo sapiens
  MOD_RES (26)..(26): Selenocysteine
  MOD_RES (42)..(42): Selenocysteine
  MOD_RES (61)..(61): Selenocysteine
  MOD_RES (82)..(83): Selenocysteine
  MOD_RES (101)..(101): Selenocysteine
  MOD_RES (119)..(119): Selenocysteine
  MOD_RES (134)..(134): Selenocysteine
  MOD_RES (156)..(157): Selenocysteine
  MOD_RES (161)..(161): Selenocysteine
  MOD_RES (180)..(180): Selenocysteine
  MOD_RES (183)..(183): Selenocysteine
  MOD_RES (188)..(188): Selenocysteine
  MOD_RES (196)..(196): Selenocysteine
  MOD_RES (237)..(237): Selenocysteine
  MOD_RES (241)..(241): Selenocysteine
  MOD_RES (265)..(265): Selenocysteine
  MOD_RES (292)..(293): Selenocysteine
  MOD_RES (299)..(299): Selenocysteine
  MOD_RES (330)..(330): Selenocysteine
  MOD_RES (332)..(332): Selenocysteine
  MOD_RES (341)..(342): Selenocysteine
  MOD_RES (354)..(354): Selenocysteine
  MOD_RES (363)..(363): Selenocysteine
  MOD_RES (369)..(369): Selenocysteine
  MOD_RES (374)..(374): Selenocysteine
  MOD_RES (376)..(376): Selenocysteine
  MOD_RES (400)..(400): Selenocysteine
  MOD_RES (421)..(421): Selenocysteine
  MOD_RES (443)..(443): Selenocysteine
MKEPLLGGECDKAVASQLGLLDEIKXEPDNAQEYCHRQQSRXQENELKINAVFSESASQLXAGIQLSLASSGVNKMLPSVSXXAIQVSCAGCKKILQKGQXAYQRKGSAQLFCSIPCIXEYISSASSPVPSKRXCSNCSKDILNPKDVISVQLEDXXSCKXFCSLSCLSSYEEKRKPFVXICXNSILXKCSMCQKXAIIQYEVKYQNVKHNLCSNACLSKFHSANNFIMNCCENCGXYCYXSSSLSHILQMEGQSHYFNSSKSIXAYKQKPAKPLISVPCKPLKPSDEMIEXXSDLGKXELFCSINCFSAYSKAKMESSSVSVVSVVHDXSXELLSPKKDXXPVISNIVSLADXDVALPIMNXDVLQDXVSSVXAXADVIVDLSKSSPSEPSNAVASSSXEQPSVSPSSSVFSQHAIGSSXEVQKDNMKSMKISDELCHPKCXSKVQKVKGKSRSIKKSCCA

SEQ ID NO: 30350 - protein, 1142 aa, Homo sapiens
  MOD_RES (26)..(26): Selenocysteine
  MOD_RES (42)..(42): Selenocysteine
  MOD_RES (61)..(61): Selenocysteine
  MOD_RES (82)..(83): Selenocysteine
  MOD_RES (101)..(101): Selenocysteine
  MOD_RES (119)..(119): Selenocysteine
  MOD_RES (134)..(134): Selenocysteine
  MOD_RES (156)..(157): Selenocysteine
  MOD_RES (161)..(161): Selenocysteine
  MOD_RES (180)..(180): Selenocysteine
  MOD_RES (183)..(183): Selenocysteine
  MOD_RES (188)..(188): Selenocysteine
  MOD_RES (196)..(196): Selenocysteine
  MOD_RES (237)..(237): Selenocysteine
  MOD_RES (241)..(241): Selenocysteine
  MOD_RES (265)..(265): Selenocysteine
  MOD_RES (292)..(293): Selenocysteine
  MOD_RES (299)..(299): Selenocysteine
  MOD_RES (330)..(330): Selenocysteine
  MOD_RES (332)..(332): Selenocysteine
  MOD_RES (341)..(342): Selenocysteine
  MOD_RES (354)..(354): Selenocysteine
  MOD_RES (363)..(363): Selenocysteine
  MOD_RES (369)..(369): Selenocysteine
  MOD_RES (374)..(374): Selenocysteine
  MOD_RES (376)..(376): Selenocysteine
  MOD_RES (400)..(400): Selenocysteine
  MOD_RES (421)..(421): Selenocysteine
  MOD_RES (443)..(443): Selenocysteine
  MOD_RES (497)..(497): Selenocysteine
  MOD_RES (500)..(500): Selenocysteine
  MOD_RES (506)..(506): Selenocysteine
  MOD_RES (601)..(601): Selenocysteine
  MOD_RES (615)..(615): Selenocysteine
  MOD_RES (627)..(627): Selenocysteine
  MOD_RES (650)..(650): Selenocysteine
  MOD_RES (685)..(685): Selenocysteine
  MOD_RES (689)..(689): Selenocysteine
  MOD_RES (691)..(691): Selenocysteine
  MOD_RES (696)..(696): Selenocysteine
  MOD_RES (699)..(699): Selenocysteine
  MOD_RES (719)..(720): Selenocysteine
  MOD_RES (770)..(770): Selenocysteine
  MOD_RES (777)..(777): Selenocysteine
  MOD_RES (799)..(799): Selenocysteine
  MOD_RES (810)..(810): Selenocysteine
  MOD_RES (815)..(815): Selenocysteine
  MOD_RES (829)..(829): Selenocysteine
  MOD_RES (840)..(840): Selenocysteine
  MOD_RES (851)..(851): Selenocysteine
  MOD_RES (872)..(872): Selenocysteine
  MOD_RES (883)..(883): Selenocysteine
  MOD_RES (911)..(911): Selenocysteine
  MOD_RES (916)..(916): Selenocysteine
  MOD_RES (924)..(924): Selenocysteine
  MOD_RES (957)..(957): Selenocysteine
  MOD_RES (959)..(959): Selenocysteine
  MOD_RES (974)..(974): Selenocysteine
  MOD_RES (1008)..(1009): Selenocysteine
  MOD_RES (1079)..(1079): Selenocysteine
  MOD_RES (1083)..(1083): Selenocysteine
  MOD_RES (1089)..(1089): Selenocysteine
  MOD_RES (1095)..(1095): Selenocysteine
  MOD_RES (1100)..(1100): Selenocysteine
  MOD_RES (1107)..(1107): Selenocysteine
MKEPLLGGECDKAVASQLGLLDEIKXEPDNAQEYCHRQQSRXQENELKINAVFSESASQLXAGIQLSLASSGVNKMLPSVSXXAIQVSCAGCKKILQKGQXAYQRKGSAQLFCSIPCIXEYISSASSPVPSKRXCSNCSKDILNPKDVISVQLEDXXSCKXFCSLSCLSSYEEKRKPFVXICXNSILXKCSMCQKXAIIQYEVKYQNVKHNLCSNACLSKFHSANNFIMNCCENCGXYCYXSSSLSHILQMEGQSHYFNSSKSIXAYKQKPAKPLISVPCKPLKPSDEMIEXXSDLGKXELFCSINCFSAYSKAKMESSSVSVVSVVHDXSXELLSPKKDXXPVISNIVSLADXDVALPIMNXDVLQDXVSSVXAXADVIVDLSKSSPSEPSNAVASSSXEQPSVSPSSSVFSQHAIGSSXEVQKDNMKSMKISDELCHPKCXSKVQKVKGKSRSIKKSCCADFECLENSKKDVAFCYSCQLFCQKYFSCGRESFAXHGXSNWKKXLEKFRKHEKSEMHLKSLEFWREYQFCDGAVSDDLSIHSKQIEGNKKYLKLIIENILFLGKQCLPLRGNDQSVSSVNKGNFLELLEMRAKDKGEEXFRLMNSQVDFYNSXQIQSDIIEIIKXEMLQDIVNEINDSSAFSIICDEXINSAMKEQLSICVRYPQKSSKAILIKERFLGFVDXEEMXGXHLHRXIKXYLQQIGVDMDKIHGQAYDSXXNLKIKFNKIAAEFKKEEPRALYIHCYAHFLDLSIIRFCKEVKELRSALKXLSSLFNXICMSGEMLANFRNIYRLSQNKXCKKHISQSCWXVHDRXLLSVIDSLPEIIEXLEVIASHSSNXSFADELSHLLXLVSKFEFVFCLKFLYRVLSVXGILSKELQNKXIDIFSLSSKIEAILECLSSERNDVYFKXIWDGXEEICQKIXCKGFKVEKPSLQKRRKIQKSVDLGNSDNMFFPXSXEEQYKINIYYQGLDXILQNLKLCFSEFDYCKIKQISELLFKWNEPLNEXXAKHVQEFYKLDEDIIPELRFYRHYAKLNFVIDDSCINFVSLGCLFIQHGLHSNIPCLSKLLYIALSWPIXSASXENSFSXLPRLKXYLCNXMGQEKLXGPALMAVEQELVNKLMEPERLNEIVEKFISQMKEI

SEQ ID NO: 30351 - protein, 276 aa, Homo sapiens
  MOD_RES (3)..(3): Selenocysteine
  MOD_RES (12)..(12): Selenocysteine
  MOD_RES (15)..(15): Selenocysteine
  MOD_RES (22)..(22): Selenocysteine
  MOD_RES (26)..(26): Selenocysteine
  MOD_RES (29)..(29): Selenocysteine
  MOD_RES (81)..(81): Selenocysteine
  MOD_RES (83)..(83): Selenocysteine
  MOD_RES (85)..(85): Selenocysteine
  MOD_RES (100)..(100): Selenocysteine
  MOD_RES (116)..(116): Selenocysteine
  MOD_RES (127)..(127): Selenocysteine
  MOD_RES (146)..(146): Selenocysteine
  MOD_RES (150)..(150): Selenocysteine
  MOD_RES (157)..(157): Selenocysteine
  MOD_RES (165)..(165): Selenocysteine
  MOD_RES (167)..(167): Selenocysteine
  MOD_RES (191)..(191): Selenocysteine
  MOD_RES (237)..(237): Selenocysteine
  MOD_RES (243)..(243): Selenocysteine
  MOD_RES (256)..(256): Selenocysteine
  MOD_RES (270)..(271): Selenocysteine
MDXSSVGGLELXDQXPVLLGSXAMAXSLXNVGNSFSGPANPLVSRSNKFQNSSVEDDDDVVFIEPVQPPPPSVPVVADQRXIXFXSSKNEELQGNDSKIXPSSKELASQKGSVSEXIVIDDEEDMEXNQGQEKNSSNFIERRPPEXKNRXNDVDFSXSSFSRSKXKXGVGPFNPGRMNVAGDVFQNGESAXHHNPDSWISQSASFPRNQKQPGVDSLSPVASLPKQIFQPSVQQQPXKPVKVXCANCKKPLQKGQXAYQRKGSAHLFCSXXCLSSF

SEQ ID NO: 30352 - protein, 1377 aa, Homo sapiens
  MOD_RES (3)..(3): Selenocysteine
  MOD_RES (12)..(12): Selenocysteine
  MOD_RES (15)..(15): Selenocysteine
  MOD_RES (22)..(22): Selenocysteine
  MOD_RES (26)..(26): Selenocysteine
  MOD_RES (29)..(29): Selenocysteine
  MOD_RES (81)..(81): Selenocysteine
  MOD_RES (83)..(83): Selenocysteine
  MOD_RES (85)..(85): Selenocysteine
  MOD_RES (100)..(100): Selenocysteine
  MOD_RES (116)..(116): Selenocysteine
  MOD_RES (127)..(127): Selenocysteine
  MOD_RES (146)..(146): Selenocysteine
  MOD_RES (150)..(150): Selenocysteine
  MOD_RES (157)..(157): Selenocysteine
  MOD_RES (175)..(176): Selenocysteine
  MOD_RES (188)..(189): Selenocysteine
  MOD_RES (192)..(192): Selenocysteine
  MOD_RES (205)..(205): Selenocysteine
  MOD_RES (215)..(215): Selenocysteine
  MOD_RES (218)..(218): Selenocysteine
  MOD_RES (223)..(223): Selenocysteine
  MOD_RES (243)..(243): Selenocysteine
  MOD_RES (245)..(245): Selenocysteine
  MOD_RES (249)..(249): Selenocysteine
  MOD_RES (252)..(252): Selenocysteine
  MOD_RES (254)..(254): Selenocysteine
  MOD_RES (278)..(278): Selenocysteine
  MOD_RES (324)..(324): Selenocysteine
  MOD_RES (330)..(330): Selenocysteine
  MOD_RES (343)..(343): Selenocysteine
  MOD_RES (357)..(358): Selenocysteine
  MOD_RES (381)..(382): Selenocysteine
  MOD_RES (386)..(386): Selenocysteine
  MOD_RES (403)..(403): Selenocysteine
  MOD_RES (416)..(416): Selenocysteine
  MOD_RES (426)..(426): Selenocysteine
  MOD_RES (432)..(432): Selenocysteine
  MOD_RES (444)..(444): Selenocysteine
  MOD_RES (534)..(535): Selenocysteine
  MOD_RES (537)..(537): Selenocysteine
  MOD_RES (541)..(541): Selenocysteine
  MOD_RES (549)..(549): Selenocysteine
  MOD_RES (564)..(564): Selenocysteine
  MOD_RES (572)..(572): Selenocysteine
  MOD_RES (598)..(598): Selenocysteine
  MOD_RES (666)..(666): Selenocysteine
  MOD_RES (679)..(679): Selenocysteine
  MOD_RES (689)..(689): Selenocysteine
  MOD_RES (693)..(693): Selenocysteine
  MOD_RES (726)..(726): Selenocysteine
  MOD_RES (739)..(739): Selenocysteine
  MOD_RES (776)..(776): Selenocysteine
  MOD_RES (809)..(810): Selenocysteine
  MOD_RES (825)..(825): Selenocysteine
  MOD_RES (828)..(828): Selenocysteine
  MOD_RES (831)..(831): Selenocysteine
  MOD_RES (840)..(840): Selenocysteine
  MOD_RES (856)..(856): Selenocysteine
  MOD_RES (858)..(858): Selenocysteine
  MOD_RES (861)..(861): Selenocysteine
  MOD_RES (869)..(869): Selenocysteine
  MOD_RES (874)..(874): Selenocysteine
  MOD_RES (877)..(877): Selenocysteine
  MOD_RES (880)..(880): Selenocysteine
  MOD_RES (908)..(909): Selenocysteine
  MOD_RES (948)..(948): Selenocysteine
  MOD_RES (952)..(952): Selenocysteine
  MOD_RES (954)..(954): Selenocysteine
  MOD_RES (964)..(964): Selenocysteine
  MOD_RES (966)..(967): Selenocysteine
  MOD_RES (976)..(976): Selenocysteine
  MOD_RES (991)..(991): Selenocysteine
  MOD_RES (1073)..(1073): Selenocysteine
  MOD_RES (1085)..(1085): Selenocysteine
  MOD_RES (1114)..(1115): Selenocysteine
  MOD_RES (1170)..(1170): Selenocysteine
  MOD_RES (1218)..(1218): Selenocysteine
  MOD_RES (1224)..(1224): Selenocysteine
  MOD_RES (1231)..(1231): Selenocysteine
  MOD_RES (1242)..(1242): Selenocysteine
  MOD_RES (1253)..(1253): Selenocysteine
  MOD_RES (1270)..(1270): Selenocysteine
  MOD_RES (1277)..(1278): Selenocysteine
  MOD_RES (1296)..(1296): Selenocysteine
  MOD_RES (1335)..(1335): Selenocysteine
  MOD_RES (1342)..(1342): Selenocysteine
  MOD_RES (1344)..(1344): Selenocysteine
  MOD_RES (1350)..(1350): Selenocysteine
  MOD_RES (1376)..(1376): Selenocysteine
MDXSSVGGLELXDQXPVLLGSXAMAXSLXNVGNSFSGPANPLVSRSNKFQNSSVEDDDDVVFIEPVQPPPPSVPVVADQRXIXFXSSKNEELQGNDSKIXPSSKELASQKGSVSEXIVIDDEEDMEXNQGQEKNSSNFIERRPPEXKNRXNDVDFSXSSFSRSKVNAGMGNSGIXXEPDSEIQIANVXXLEXGVSSVNDGQLENXDGRDMNLMIXHVXSLQNXNLGDVSNGLQSSNFGVNIQXYXPSLXSQXKXGVGPFNPGRMNVAGDVFQNGESAXHHNPDSWISQSASFPRNQKQPGVDSLSPVASLPKQIFQPSVQQQPXKPVKVXCANCKKPLQKGQXAYQRKGSAHLFCSXXCLSSFSHKPAPKKLCVMCKKDIXXMKGXIVAQVDSSESFQEFCSXSCLSLYEDKQNPXKGALNKSRCXICGKLXEIRHEVSFKNMXHKLCSDHCFNRYRMANGLIMNCCEQCGEYLPSKGAGNNVLVIDGQQKRFCCQSCVSEYKQVGSHPSFLKEVRDHMQDSFLMQPEKYGKLXXCXGCRXQCRFFDMXQCIGPNGYMEPYCSXACMNSHKXKYAKSQSLGIICHFCKRNSLPQYQAXMPDGKLYNFCNSSCVAKFQALSMQSSPNGQFVAPSDIQLKCNYCKNSFCSKPEILEWENKVHQFCSKXCSDDYKKLHCIVXYCEYCQEEKXLHEXVNFSGVKRPFCSEGCKLLYKQDFARRLGLRCVXCNYCSQLCKKGAXKELDGVVRDFCSEDCCKKFQDWYYKAARCDCCKSQGXLKERVQWRGEMKHFCDQHCLLRFYCQQNEPNMXXQKGPENLHYDQGCQXSRXKMXGSAPPPSPXPNKEMKNKAVLCKPLXMXKAXYCKPHMQXKSCQXDDXWRXEYVPVPIPVPVYIPVPMHMYSQNIPVPXXVPVPVPVPVFLPAPLDSSEKIPAAIEELKSKVSSDALDXELLXMXDMMSEDEGKXEXXNINSVIIEXDIIGSDLLKNSDPEXQSSMPDVPYEPDLDIEIDFPRAAEELDMENEFLLPPVFGEEYEEQPRPRSKKKGAKRKAVSGYQSHDDSSDNSECSFPFKYXYGVNAWKHWVKXRQLDEDLLVLDELKSSKSVKLKEDLLSHXXAELNYGLAHFVNEIRRPNGENYAPDSIYYLCLGIQEYLCGSNRKDNIFIDPGYQXFEQELNKILRSWQPSILPDGSIFSRVEEDYLWRIKQLGSHSPVALLNXLFYFNXKYFGLKXVEQHLRLSFGXVFRHWKKNPLXMENKACLRYQVSSLCGXDNEDKIXXGKRKHEDDEPVFEQIENXANPSRCPVKMFECYLSKSPQNLNQRMDVFYLQPECSSSXDSPVWYXSXSLDRNXLENMLVRVLLVKDIYDKDNYELDEDXD

SEQ ID NO: 30353 - protein, 495 aa, Homo sapiens
  MOD_RES (14)..(14): Selenocysteine
  MOD_RES (39)..(39): Selenocysteine
  MOD_RES (42)..(42): Selenocysteine
  MOD_RES (62)..(62): Selenocysteine
  MOD_RES (77)..(77): Selenocysteine
  MOD_RES (102)..(102): Selenocysteine
  MOD_RES (111)..(111): Selenocysteine
  MOD_RES (120)..(120): Selenocysteine
  MOD_RES (151)..(151): Selenocysteine
  MOD_RES (162)..(163): Selenocysteine
  MOD_RES (167)..(167): Selenocysteine
  MOD_RES (198)..(198): Selenocysteine
  MOD_RES (208)..(208): Selenocysteine
  MOD_RES (227)..(227): Selenocysteine
  MOD_RES (257)..(257): Selenocysteine
  MOD_RES (307)..(307): Selenocysteine
  MOD_RES (310)..(310): Selenocysteine
  MOD_RES (316)..(316): Selenocysteine
  MOD_RES (323)..(323): Selenocysteine
  MOD_RES (341)..(342): Selenocysteine
  MOD_RES (352)..(352): Selenocysteine
  MOD_RES (354)..(354): Selenocysteine
  MOD_RES (363)..(363): Selenocysteine
  MOD_RES (371)..(371): Selenocysteine
  MOD_RES (382)..(382): Selenocysteine
  MOD_RES (407)..(407): Selenocysteine
  MOD_RES (415)..(415): Selenocysteine
  MOD_RES (448)..(448): Selenocysteine
  MOD_RES (460)..(460): Selenocysteine
  MOD_RES (462)..(462): Selenocysteine
  MOD_RES (482)..(483): Selenocysteine
MDPSDFPSPFDPLXLPEKPLAGDLPVDMEFGEDLLESQXAPXRGWAPPGPSPSSGALDLLDXPAGLEKDPGVLDGAXELLGLGGLLYKAPSPPEVDHGPEGXLAWDAGDQXLEPGPGGQXPEVVPPDPGAGANSCSPEGLLEPLAPDSPIXLQSPHIEEEEXXSIAXARRGSPGQEEELPQGQPQSPNAPPSPSVGEXLGDGINSSQXKPGGSSPPAHPSLPGDGLXAKASEKPPERKRSERVRRAEPPKPEVVDSXESIPVSDEDSDAMVDDPNDEDFVPFRPRRSPRMSLRSSVSQRAGRSAVGXKMXCAHCRXPLQKGQXAYQRKGLPQLFCSSSCLXXFSKKPSGKKXCXFCKKEIWNXKDSVVAQXGSGGSFHEFCXSVCLSLYEAQQQRPIPQSGDPADAXRCSICQKXGEVLHEVSNGSVVHRLCSDSCFSKFRANKGLKXNCCDQCGAYIYXKXGSPGPELLFHEGQQKRFCNXXCLGAYKKVGPRE

SEQ ID NO: 30354 - protein, 1358 aa, Homo sapiens
  MOD_RES (14)..(14): Selenocysteine
  MOD_RES (39)..(39): Selenocysteine
  MOD_RES (42)..(42): Selenocysteine
  MOD_RES (62)..(62): Selenocysteine
  MOD_RES (77)..(77): Selenocysteine
  MOD_RES (102)..(102): Selenocysteine
  MOD_RES (111)..(111): Selenocysteine
  MOD_RES (120)..(120): Selenocysteine
  MOD_RES (151)..(151): Selenocysteine
  MOD_RES (162)..(163): Selenocysteine
  MOD_RES (167)..(167): Selenocysteine
  MOD_RES (198)..(198): Selenocysteine
  MOD_RES (208)..(208): Selenocysteine
  MOD_RES (227)..(227): Selenocysteine
  MOD_RES (257)..(257): Selenocysteine
  MOD_RES (307)..(307): Selenocysteine
  MOD_RES (310)..(310): Selenocysteine
  MOD_RES (316)..(316): Selenocysteine
  MOD_RES (323)..(323): Selenocysteine
  MOD_RES (341)..(342): Selenocysteine
  MOD_RES (352)..(352): Selenocysteine
  MOD_RES (354)..(354): Selenocysteine
  MOD_RES (363)..(363): Selenocysteine
  MOD_RES (371)..(371): Selenocysteine
  MOD_RES (382)..(382): Selenocysteine
  MOD_RES (407)..(407): Selenocysteine
  MOD_RES (415)..(415): Selenocysteine
  MOD_RES (448)..(448): Selenocysteine
  MOD_RES (460)..(460): Selenocysteine
  MOD_RES (462)..(462): Selenocysteine
  MOD_RES (482)..(483): Selenocysteine
  MOD_RES (493)..(493): Selenocysteine
  MOD_RES (503)..(503): Selenocysteine
  MOD_RES (520)..(520): Selenocysteine
  MOD_RES (529)..(530): Selenocysteine
  MOD_RES (540)..(540): Selenocysteine
  MOD_RES (565)..(565): Selenocysteine
  MOD_RES (576)..(576): Selenocysteine
  MOD_RES (581)..(581): Selenocysteine
  MOD_RES (669)..(669): Selenocysteine
  MOD_RES (678)..(678): Selenocysteine
  MOD_RES (680)..(680): Selenocysteine
  MOD_RES (685)..(685): Selenocysteine
  MOD_RES (691)..(691): Selenocysteine
  MOD_RES (698)..(698): Selenocysteine
  MOD_RES (732)..(732): Selenocysteine
  MOD_RES (762)..(762): Selenocysteine
  MOD_RES (781)..(781): Selenocysteine
  MOD_RES (785)..(785): Selenocysteine
  MOD_RES (792)..(792): Selenocysteine
  MOD_RES (797)..(797): Selenocysteine
  MOD_RES (802)..(802): Selenocysteine
  MOD_RES (805)..(805): Selenocysteine
  MOD_RES (814)..(814): Selenocysteine
  MOD_RES (845)..(845): Selenocysteine
  MOD_RES (892)..(893): Selenocysteine
  MOD_RES (897)..(897): Selenocysteine
  MOD_RES (903)..(903): Selenocysteine
  MOD_RES (1015)..(1015): Selenocysteine
  MOD_RES (1022)..(1022): Selenocysteine
  MOD_RES (1048)..(1048): Selenocysteine
  MOD_RES (1072)..(1072): Selenocysteine
  MOD_RES (1111)..(1111): Selenocysteine
  MOD_RES (1145)..(1145): Selenocysteine
  MOD_RES (1151)..(1151): Selenocysteine
  MOD_RES (1162)..(1162): Selenocysteine
  MOD_RES (1166)..(1166): Selenocysteine
  MOD_RES (1172)..(1172): Selenocysteine
  MOD_RES (1199)..(1199): Selenocysteine
  MOD_RES (1205)..(1205): Selenocysteine
  MOD_RES (1212)..(1212): Selenocysteine
  MOD_RES (1222)..(1222): Selenocysteine
  MOD_RES (1232)..(1233): Selenocysteine
  MOD_RES (1237)..(1238): Selenocysteine
  MOD_RES (1257)..(1257): Selenocysteine
  MOD_RES (1301)..(1301): Selenocysteine
MDPSDFPSPFDPLXLPEKPLAGDLPVDMEFGEDLLESQXAPXRGWAPPGPSPSSGALDLLDXPAGLEKDPGVLDGAXELLGLGGLLYKAPSPPEVDHGPEGXLAWDAGDQXLEPGPGGQXPEVVPPDPGAGANSCSPEGLLEPLAPDSPIXLQSPHIEEEEXXSIAXARRGSPGQEEELPQGQPQSPNAPPSPSVGEXLGDGINSSQXKPGGSSPPAHPSLPGDGLXAKASEKPPERKRSERVRRAEPPKPEVVDSXESIPVSDEDSDAMVDDPNDEDFVPFRPRRSPRMSLRSSVSQRAGRSAVGXKMXCAHCRXPLQKGQXAYQRKGLPQLFCSSSCLXXFSKKPSGKKXCXFCKKEIWNXKDSVVAQXGSGGSFHEFCXSVCLSLYEAQQQRPIPQSGDPADAXRCSICQKXGEVLHEVSNGSVVHRLCSDSCFSKFRANKGLKXNCCDQCGAYIYXKXGSPGPELLFHEGQQKRFCNXXCLGAYKKKNXRVYPCVWCKXLCKNFEMLSHVDRNGKXSLFCSLCCXXSYKVKQAGLXGPPRPCSFCRRSLSDPCYYNKVDRXVYQFCSPSCWXKFQRXSPEGGIHLSCHYCHSLFSGKPEVLDWQDQVFQFCCRDCCEDFKRLRGVVSQCEHCRQEKLLHEKLRFSGVEKSFCSEGCVLLYKQDFXKKLGLCCIXCXYCSQXCQRGVXEQLDGSXWDFCSEDCKSKYLLWYCKAARCHACKRQGKLLEXIHWRGQIRHFCNQQCLLRFYSQQNQPNLDXQSGPESLLNSQSPESKPQXPSQXKVENSNXIPVKXRSAPXAPXPPPPPPPAXPRKNKAAMCKPLMQNRGVSCKVEMKSKGSQXEEWKPQVIVLPIPVPIFVPVPMHLYCQKVPVPFSMPIPVPVPMFLPXXLESXDKIVEXIEELKVKIPSNPLEADILAMAEMIAEAEELDKASSDLCDLVSNQSAEGLLEDCDLFGPARDDVLAMAVKMANVLDEPGQDLEADFPKNPLDINPSVDFLFDCGLVGPEDVSXEQDLPRXMRKGQKRLVLSESCSRDSMSSQPSCXGLNYSYGVNAWKCWVQSKYANGEXSKGDELRFGPKPMRIKEDILACSAAELNYGLAQFVREIXRPNGERYEPDSIYYLCLGIQQYLLENNRMVNIFXDLYYLXFVQELNKSLSXWQPXLLPNNXVFSRVEEEHLWECKQLGVYSPFVLLNXLMFFNXKFFGLQXAEEHMQLSFXNVVRQSRKCXXPRGXXKVVSIRYYAPVRQRKGRDXGPGKRKREDEAPILEQRENRMNPLRCPVKFYEFYLSKCPESLRXRNDVFYLQPERSCIAESPLWYSVIPMDRSMLESMLNRILAVREIYEELGRPGEEDLD

SEQ ID NO: 30355 - protein, 1370 aa, Homo sapiens
  MOD_RES (14)..(14): Selenocysteine
  MOD_RES (39)..(39): Selenocysteine
  MOD_RES (42)..(42): Selenocysteine
  MOD_RES (62)..(62): Selenocysteine
  MOD_RES (77)..(77): Selenocysteine
  MOD_RES (102)..(102): Selenocysteine
  MOD_RES (111)..(111): Selenocysteine
  MOD_RES (120)..(120): Selenocysteine
  MOD_RES (151)..(151): Selenocysteine
  MOD_RES (162)..(163): Selenocysteine
  MOD_RES (167)..(167): Selenocysteine
  MOD_RES (198)..(198): Selenocysteine
  MOD_RES (208)..(208): Selenocysteine
  MOD_RES (227)..(227): Selenocysteine
  MOD_RES (257)..(257): Selenocysteine
  MOD_RES (307)..(307): Selenocysteine
  MOD_RES (310)..(310): Selenocysteine
  MOD_RES (316)..(316): Selenocysteine
  MOD_RES (323)..(323): Selenocysteine
  MOD_RES (341)..(342): Selenocysteine
  MOD_RES (352)..(352): Selenocysteine
  MOD_RES (354)..(354): Selenocysteine
  MOD_RES (363)..(363): Selenocysteine
  MOD_RES (371)..(371): Selenocysteine
  MOD_RES (382)..(382): Selenocysteine
  MOD_RES (407)..(407): Selenocysteine
  MOD_RES (415)..(415): Selenocysteine
  MOD_RES (448)..(448): Selenocysteine
  MOD_RES (460)..(460): Selenocysteine
  MOD_RES (462)..(462): Selenocysteine
  MOD_RES (482)..(483): Selenocysteine
  MOD_RES (493)..(493): Selenocysteine
  MOD_RES (503)..(503): Selenocysteine
  MOD_RES (520)..(520): Selenocysteine
  MOD_RES (529)..(530): Selenocysteine
  MOD_RES (540)..(540): Selenocysteine
  MOD_RES (565)..(565): Selenocysteine
  MOD_RES (576)..(576): Selenocysteine
  MOD_RES (581)..(581): Selenocysteine
  MOD_RES (669)..(669): Selenocysteine
  MOD_RES (678)..(678): Selenocysteine
  MOD_RES (680)..(680): Selenocysteine
  MOD_RES (685)..(685): Selenocysteine
  MOD_RES (691)..(691): Selenocysteine
  MOD_RES (698)..(698): Selenocysteine
  MOD_RES (732)..(732): Selenocysteine
  MOD_RES (762)..(762): Selenocysteine
  MOD_RES (781)..(781): Selenocysteine
  MOD_RES (785)..(785): Selenocysteine
  MOD_RES (792)..(792): Selenocysteine
  MOD_RES (795)..(795): Selenocysteine
  MOD_RES (809)..(809): Selenocysteine
  MOD_RES (814)..(814): Selenocysteine
  MOD_RES (817)..(817): Selenocysteine
  MOD_RES (826)..(826): Selenocysteine
  MOD_RES (857)..(857): Selenocysteine
  MOD_RES (904)..(905): Selenocysteine
  MOD_RES (909)..(909): Selenocysteine
  MOD_RES (915)..(915): Selenocysteine
  MOD_RES (1027)..(1027): Selenocysteine
  MOD_RES (1034)..(1034): Selenocysteine
  MOD_RES (1060)..(1060): Selenocysteine
  MOD_RES (1084)..(1084): Selenocysteine
  MOD_RES (1123)..(1123): Selenocysteine
  MOD_RES (1157)..(1157): Selenocysteine
  MOD_RES (1163)..(1163): Selenocysteine
  MOD_RES (1174)..(1174): Selenocysteine
  MOD_RES (1178)..(1178): Selenocysteine
  MOD_RES (1184)..(1184): Selenocysteine
  MOD_RES (1211)..(1211): Selenocysteine
  MOD_RES (1217)..(1217): Selenocysteine
  MOD_RES (1224)..(1224): Selenocysteine
  MOD_RES (1234)..(1234): Selenocysteine
  MOD_RES (1244)..(1245): Selenocysteine
  MOD_RES (1249)..(1250): Selenocysteine
  MOD_RES (1269)..(1269): Selenocysteine
  MOD_RES (1313)..(1313): Selenocysteine
MDPSDFPSPFDPLXLPEKPLAGDLPVDMEFGEDLLESQXAPXRGWAPPGPSPSSGALDLLDXPAGLEKDPGVLDGAXELLGLGGLLYKAPSPPEVDHGPEGXLAWDAGDQXLEPGPGGQXPEVVPPDPGAGANSCSPEGLLEPLAPDSPIXLQSPHIEEEEXXSIAXARRGSPGQEEELPQGQPQSPNAPPSPSVGEXLGDGINSSQXKPGGSSPPAHPSLPGDGLXAKASEKPPERKRSERVRRAEPPKPEVVDSXESIPVSDEDSDAMVDDPNDEDFVPFRPRRSPRMSLRSSVSQRAGRSAVGXKMXCAHCRXPLQKGQXAYQRKGLPQLFCSSSCLXXFSKKPSGKKXCXFCKKEIWNXKDSVVAQXGSGGSFHEFCXSVCLSLYEAQQQRPIPQSGDPADAXRCSICQKXGEVLHEVSNGSVVHRLCSDSCFSKFRANKGLKXNCCDQCGAYIYXKXGSPGPELLFHEGQQKRFCNXXCLGAYKKKNXRVYPCVWCKXLCKNFEMLSHVDRNGKXSLFCSLCCXXSYKVKQAGLXGPPRPCSFCRRSLSDPCYYNKVDRXVYQFCSPSCWXKFQRXSPEGGIHLSCHYCHSLFSGKPEVLDWQDQVFQFCCRDCCEDFKRLRGVVSQCEHCRQEKLLHEKLRFSGVEKSFCSEGCVLLYKQDFXKKLGLCCIXCXYCSQXCQRGVXEQLDGSXWDFCSEDCKSKYLLWYCKAARCHACKRQGKLLEXIHWRGQIRHFCNQQCLLRFYSQQNQPNLDXQSGPESLLNSQSPESKPQXPSQXKVENSNXVRXPEENGNLGKIPVKXRSAPXAPXPPPPPPPAXPRKNKAAMCKPLMQNRGVSCKVEMKSKGSQXEEWKPQVIVLPIPVPIFVPVPMHLYCQKVPVPFSMPIPVPVPMFLPXXLESXDKIVEXIEELKVKIPSNPLEADILAMAEMIAEAEELDKASSDLCDLVSNQSAEGLLEDCDLFGPARDDVLAMAVKMANVLDEPGQDLEADFPKNPLDINPSVDFLFDCGLVGPEDVSXEQDLPRXMRKGQKRLVLSESCSRDSMSSQPSCXGLNYSYGVNAWKCWVQSKYANGEXSKGDELRFGPKPMRIKEDILACSAAELNYGLAQFVREIXRPNGERYEPDSIYYLCLGIQQYLLENNRMVNIFXDLYYLXFVQELNKSLSXWQPXLLPNNXVFSRVEEEHLWECKQLGVYSPFVLLNXLMFFNXKFFGLQXAEEHMQLSFXNVVRQSRKCXXPRGXXKVVSIRYYAPVRQRKGRDXGPGKRKREDEAPILEQRENRMNPLRCPVKFYEFYLSKCPESLRXRNDVFYLQPERSCIAESPLWYSVIPMDRSMLESMLNRILAVREIYEELGRPGEEDLD

SEQ ID NO: 30356 - protein, 349 aa, Homo sapiens
  MOD_RES (14)..(14): Selenocysteine
  MOD_RES (39)..(39): Selenocysteine
  MOD_RES (42)..(42): Selenocysteine
  MOD_RES (62)..(62): Selenocysteine
  MOD_RES (77)..(77): Selenocysteine
  MOD_RES (102)..(102): Selenocysteine
  MOD_RES (111)..(111): Selenocysteine
  MOD_RES (120)..(120): Selenocysteine
  MOD_RES (151)..(151): Selenocysteine
  MOD_RES (162)..(163): Selenocysteine
  MOD_RES (167)..(167): Selenocysteine
  MOD_RES (198)..(198): Selenocysteine
  MOD_RES (208)..(208): Selenocysteine
  MOD_RES (227)..(227): Selenocysteine
  MOD_RES (259)..(259): Selenocysteine
  MOD_RES (266)..(266): Selenocysteine
  MOD_RES (269)..(269): Selenocysteine
  MOD_RES (309)..(309): Selenocysteine
  MOD_RES (324)..(324): Selenocysteine
  MOD_RES (333)..(333): Selenocysteine
  MOD_RES (347)..(347): Selenocysteine
MDPSDFPSPFDPLXLPEKPLAGDLPVDMEFGEDLLESQXAPXRGWAPPGPSPSSGALDLLDXPAGLEKDPGVLDGAXELLGLGGLLYKAPSPPEVDHGPEGXLAWDAGDQXLEPGPGGQXPEVVPPDPGAGANSCSPEGLLEPLAPDSPIXLQSPHIEEEEXXSIAXARRGSPGQEEELPQGQPQSPNAPPSPSVGEXLGDGINSSQXKPGGSSPPAHPSLPGDGLXAKASEKPPERVQKRSERVRRAEPPKPEVVDSXESRRSGXPRXRLWRRLVLEAPSMSSAHPSVSPCMRPSSSARSPSLGIPPXLLAAAYARRLERSCXRSAMAAWYXGSAAILASPNSGPXRD

SEQ ID NO: 30357 - protein, 497 aa, Homo sapiens
  MOD_RES (14)..(14): Selenocysteine
  MOD_RES (39)..(39): Selenocysteine
  MOD_RES (42)..(42): Selenocysteine
  MOD_RES (62)..(62): Selenocysteine
  MOD_RES (77)..(77): Selenocysteine
  MOD_RES (102)..(102): Selenocysteine
  MOD_RES (111)..(111): Selenocysteine
  MOD_RES (120)..(120): Selenocysteine
  MOD_RES (151)..(151): Selenocysteine
  MOD_RES (162)..(163): Selenocysteine
  MOD_RES (167)..(167): Selenocysteine
  MOD_RES (198)..(198): Selenocysteine
  MOD_RES (208)..(208): Selenocysteine
  MOD_RES (227)..(227): Selenocysteine
  MOD_RES (259)..(259): Selenocysteine
  MOD_RES (309)..(309): Selenocysteine
  MOD_RES (312)..(312): Selenocysteine
  MOD_RES (318)..(318): Selenocysteine
  MOD_RES (325)..(325): Selenocysteine
  MOD_RES (343)..(344): Selenocysteine
  MOD_RES (354)..(354): Selenocysteine
  MOD_RES (356)..(356): Selenocysteine
  MOD_RES (365)..(365): Selenocysteine
  MOD_RES (373)..(373): Selenocysteine
  MOD_RES (384)..(384): Selenocysteine
  MOD_RES (409)..(409): Selenocysteine
  MOD_RES (417)..(417): Selenocysteine
  MOD_RES (450)..(450): Selenocysteine
  MOD_RES (462)..(462): Selenocysteine
  MOD_RES (464)..(464): Selenocysteine
  MOD_RES (484)..(485): Selenocysteine
MDPSDFPSPFDPLXLPEKPLAGDLPVDMEFGEDLLESQXAPXRGWAPPGPSPSSGALDLLDXPAGLEKDPGVLDGAXELLGLGGLLYKAPSPPEVDHGPEGXLAWDAGDQXLEPGPGGQXPEVVPPDPGAGANSCSPEGLLEPLAPDSPIXLQSPHIEEEEXXSIAXARRGSPGQEEELPQGQPQSPNAPPSPSVGEXLGDGINSSQXKPGGSSPPAHPSLPGDGLXAKASEKPPERVQKRSERVRRAEPPKPEVVDSXESIPVSDEDSDAMVDDPNDEDFVPFRPRRSPRMSLRSSVSQRAGRSAVGXKMXCAHCRXPLQKGQXAYQRKGLPQLFCSSSCLXXFSKKPSGKKXCXFCKKEIWNXKDSVVAQXGSGGSFHEFCXSVCLSLYEAQQQRPIPQSGDPADAXRCSICQKXGEVLHEVSNGSVVHRLCSDSCFSKFRANKGLKXNCCDQCGAYIYXKXGSPGPELLFHEGQQKRFCNXXCLGAYKKVGPRE

SEQ ID NO: 30358 - protein, 1280 aa, Homo sapiens
  MOD_RES (14)..(14): Selenocysteine
  MOD_RES (39)..(39): Selenocysteine
  MOD_RES (42)..(42): Selenocysteine
  MOD_RES (62)..(62): Selenocysteine
  MOD_RES (77)..(77): Selenocysteine
  MOD_RES (102)..(102): Selenocysteine
  MOD_RES (111)..(111): Selenocysteine
  MOD_RES (120)..(120): Selenocysteine
  MOD_RES (151)..(151): Selenocysteine
  MOD_RES (162)..(163): Selenocysteine
  MOD_RES (167)..(167): Selenocysteine
  MOD_RES (198)..(198): Selenocysteine
  MOD_RES (208)..(208): Selenocysteine
  MOD_RES (227)..(227): Selenocysteine
  MOD_RES (259)..(259): Selenocysteine
  MOD_RES (309)..(309): Selenocysteine
  MOD_RES (312)..(312): Selenocysteine
  MOD_RES (318)..(318): Selenocysteine
  MOD_RES (325)..(325): Selenocysteine
  MOD_RES (343)..(344): Selenocysteine
  MOD_RES (354)..(354): Selenocysteine
  MOD_RES (356)..(356): Selenocysteine
  MOD_RES (365)..(365): Selenocysteine
  MOD_RES (373)..(373): Selenocysteine
  MOD_RES (384)..(384): Selenocysteine
  MOD_RES (409)..(409): Selenocysteine
  MOD_RES (417)..(417): Selenocysteine
  MOD_RES (450)..(450): Selenocysteine
  MOD_RES (462)..(462): Selenocysteine
  MOD_RES (464)..(464): Selenocysteine
  MOD_RES (484)..(485): Selenocysteine
  MOD_RES (495)..(495): Selenocysteine
  MOD_RES (505)..(505): Selenocysteine
  MOD_RES (522)..(522): Selenocysteine
  MOD_RES (531)..(532): Selenocysteine
  MOD_RES (542)..(542): Selenocysteine
  MOD_RES (567)..(567): Selenocysteine
  MOD_RES (578)..(578): Selenocysteine
  MOD_RES (583)..(583): Selenocysteine
  MOD_RES (671)..(671): Selenocysteine
  MOD_RES (680)..(680): Selenocysteine
  MOD_RES (682)..(682): Selenocysteine
  MOD_RES (687)..(687): Selenocysteine
  MOD_RES (693)..(693): Selenocysteine
  MOD_RES (700)..(700): Selenocysteine
  MOD_RES (734)..(734): Selenocysteine
  MOD_RES (764)..(764): Selenocysteine
  MOD_RES (783)..(783): Selenocysteine
  MOD_RES (787)..(787): Selenocysteine
  MOD_RES (794)..(794): Selenocysteine
  MOD_RES (797)..(797): Selenocysteine
  MOD_RES (811)..(811): Selenocysteine
  MOD_RES (816)..(816): Selenocysteine
  MOD_RES (819)..(819): Selenocysteine
  MOD_RES (828)..(828): Selenocysteine
  MOD_RES (859)..(859): Selenocysteine
  MOD_RES (906)..(907): Selenocysteine
  MOD_RES (911)..(911): Selenocysteine
  MOD_RES (917)..(917): Selenocysteine
  MOD_RES (1029)..(1029): Selenocysteine
  MOD_RES (1036)..(1036): Selenocysteine
  MOD_RES (1062)..(1062): Selenocysteine
  MOD_RES (1086)..(1086): Selenocysteine
  MOD_RES (1118)..(1118): Selenocysteine
  MOD_RES (1152)..(1152): Selenocysteine
  MOD_RES (1158)..(1158): Selenocysteine
  MOD_RES (1169)..(1169): Selenocysteine
  MOD_RES (1173)..(1173): Selenocysteine
  MOD_RES (1179)..(1179): Selenocysteine
  MOD_RES (1223)..(1223): Selenocysteine
MDPSDFPSPFDPLXLPEKPLAGDLPVDMEFGEDLLESQXAPXRGWAPPGPSPSSGALDLLDXPAGLEKDPGVLDGAXELLGLGGLLYKAPSPPEVDHGPEGXLAWDAGDQXLEPGPGGQXPEVVPPDPGAGANSCSPEGLLEPLAPDSPIXLQSPHIEEEEXXSIAXARRGSPGQEEELPQGQPQSPNAPPSPSVGEXLGDGINSSQXKPGGSSPPAHPSLPGDGLXAKASEKPPERVQKRSERVRRAEPPKPEVVDSXESIPVSDEDSDAMVDDPNDEDFVPFRPRRSPRMSLRSSVSQRAGRSAVGXKMXCAHCRXPLQKGQXAYQRKGLPQLFCSSSCLXXFSKKPSGKKXCXFCKKEIWNXKDSVVAQXGSGGSFHEFCXSVCLSLYEAQQQRPIPQSGDPADAXRCSICQKXGEVLHEVSNGSVVHRLCSDSCFSKFRANKGLKXNCCDQCGAYIYXKXGSPGPELLFHEGQQKRFCNXXCLGAYKKKNXRVYPCVWCKXLCKNFEMLSHVDRNGKXSLFCSLCCXXSYKVKQAGLXGPPRPCSFCRRSLSDPCYYNKVDRXVYQFCSPSCWXKFQRXSPEGGIHLSCHYCHSLFSGKPEVLDWQDQVFQFCCRDCCEDFKRLRGVVSQCEHCRQEKLLHEKLRFSGVEKSFCSEGCVLLYKQDFXKKLGLCCIXCXYCSQXCQRGVXEQLDGSXWDFCSEDCKSKYLLWYCKAARCHACKRQGKLLEXIHWRGQIRHFCNQQCLLRFYSQQNQPNLDXQSGPESLLNSQSPESKPQXPSQXKVENSNXVRXPEENGNLGKIPVKXRSAPXAPXPPPPPPPAXPRKNKAAMCKPLMQNRGVSCKVEMKSKGSQXEEWKPQVIVLPIPVPIFVPVPMHLYCQKVPVPFSMPIPVPVPMFLPXXLESXDKIVEXIEELKVKIPSNPLEADILAMAEMIAEAEELDKASSDLCDLVSNQSAEGLLEDCDLFGPARDDVLAMAVKMANVLDEPGQDLEADFPKNPLDINPSVDFLFDCGLVGPEDVSXEQDLPRXMRKGQKRLVLSESCSRDSMSSQPSCXGLNYSYGVNAWKCWVQSKYANGEXSKAKPMRIKEDILACSAAELNYGLAQFVREIXRPNGERYEPDSIYYLCLGIQQYLLENNRMVNIFXDLYYLXFVQELNKSLSXWQPXLLPNNXGPGKRKREDEAPILEQRENRMNPLRCPVKFYEFYLSKCPESLRXRNDVFYLQPERSCIAESPLWYSVIPMDRSMLESMLNRILAVREIYEELGRPGEEDLD

SEQ ID NO: 30359 - protein, 1372 aa, Homo sapiens
  MOD_RES (14)..(14): Selenocysteine
  MOD_RES (39)..(39): Selenocysteine
  MOD_RES (42)..(42): Selenocysteine
  MOD_RES (62)..(62): Selenocysteine
  MOD_RES (77)..(77): Selenocysteine
  MOD_RES (102)..(102): Selenocysteine
  MOD_RES (111)..(111): Selenocysteine
  MOD_RES (120)..(120): Selenocysteine
  MOD_RES (151)..(151): Selenocysteine
  MOD_RES (162)..(163): Selenocysteine
  MOD_RES (167)..(167): Selenocysteine
  MOD_RES (198)..(198): Selenocysteine
  MOD_RES (208)..(208): Selenocysteine
  MOD_RES (227)..(227): Selenocysteine
  MOD_RES (259)..(259): Selenocysteine
  MOD_RES (309)..(309): Selenocysteine
  MOD_RES (312)..(312): Selenocysteine
  MOD_RES (318)..(318): Selenocysteine
  MOD_RES (325)..(325): Selenocysteine
  MOD_RES (343)..(344): Selenocysteine
  MOD_RES (354)..(354): Selenocysteine
  MOD_RES (356)..(356): Selenocysteine
  MOD_RES (365)..(365): Selenocysteine
  MOD_RES (373)..(373): Selenocysteine
  MOD_RES (384)..(384): Selenocysteine
  MOD_RES (409)..(409): Selenocysteine
  MOD_RES (417)..(417): Selenocysteine
  MOD_RES (450)..(450): Selenocysteine
  MOD_RES (462)..(462): Selenocysteine
  MOD_RES (464)..(464): Selenocysteine
  MOD_RES (484)..(485): Selenocysteine
  MOD_RES (495)..(495): Selenocysteine
  MOD_RES (505)..(505): Selenocysteine
  MOD_RES (522)..(522): Selenocysteine
  MOD_RES (531)..(532): Selenocysteine
  MOD_RES (542)..(542): Selenocysteine
  MOD_RES (567)..(567): Selenocysteine
  MOD_RES (578)..(578): Selenocysteine
  MOD_RES (583)..(583): Selenocysteine
  MOD_RES (671)..(671): Selenocysteine
  MOD_RES (680)..(680): Selenocysteine
  MOD_RES (682)..(682): Selenocysteine
  MOD_RES (687)..(687): Selenocysteine
  MOD_RES (693)..(693): Selenocysteine
  MOD_RES (700)..(700): Selenocysteine
  MOD_RES (734)..(734): Selenocysteine
  MOD_RES (764)..(764): Selenocysteine
  MOD_RES (783)..(783): Selenocysteine
  MOD_RES (787)..(787): Selenocysteine
  MOD_RES (794)..(794): Selenocysteine
  MOD_RES (797)..(797): Selenocysteine
  MOD_RES (811)..(811): Selenocysteine
  MOD_RES (816)..(816): Selenocysteine
  MOD_RES (819)..(819): Selenocysteine
  MOD_RES (828)..(828): Selenocysteine
  MOD_RES (859)..(859): Selenocysteine
  MOD_RES (906)..(907): Selenocysteine
  MOD_RES (911)..(911): Selenocysteine
  MOD_RES (917)..(917): Selenocysteine
  MOD_RES (1029)..(1029): Selenocysteine
  MOD_RES (1036)..(1036): Selenocysteine
  MOD_RES (1062)..(1062): Selenocysteine
  MOD_RES (1086)..(1086): Selenocysteine
  MOD_RES (1125)..(1125): Selenocysteine
  MOD_RES (1159)..(1159): Selenocysteine
  MOD_RES (1165)..(1165): Selenocysteine
  MOD_RES (1176)..(1176): Selenocysteine
  MOD_RES (1180)..(1180): Selenocysteine
  MOD_RES (1186)..(1186): Selenocysteine
  MOD_RES (1213)..(1213): Selenocysteine
  MOD_RES (1219)..(1219): Selenocysteine
  MOD_RES (1226)..(1226): Selenocysteine
  MOD_RES (1236)..(1236): Selenocysteine
  MOD_RES (1246)..(1247): Selenocysteine
  MOD_RES (1251)..(1252): Selenocysteine
  MOD_RES (1271)..(1271): Selenocysteine
  MOD_RES (1315)..(1315): Selenocysteine
MDPSDFPSPFDPLXLPEKPLAGDLPVDMEFGEDLLESQXAPXRGWAPPGPSPSSGALDLLDXPAGLEKDPGVLDGAXELLGLGGLLYKAPSPPEVDHGPEGXLAWDAGDQXLEPGPGGQXPEVVPPDPGAGANSCSPEGLLEPLAPDSPIXLQSPHIEEEEXXSIAXARRGSPGQEEELPQGQPQSPNAPPSPSVGEXLGDGINSSQXKPGGSSPPAHPSLPGDGLXAKASEKPPERVQKRSERVRRAEPPKPEVVDSXESIPVSDEDSDAMVDDPNDEDFVPFRPRRSPRMSLRSSVSQRAGRSAVGXKMXCAHCRXPLQKGQXAYQRKGLPQLFCSSSCLXXFSKKPSGKKXCXFCKKEIWNXKDSVVAQXGSGGSFHEFCXSVCLSLYEAQQQRPIPQSGDPADAXRCSICQKXGEVLHEVSNGSVVHRLCSDSCFSKFRANKGLKXNCCDQCGAYIYXKXGSPGPELLFHEGQQKRFCNXXCLGAYKKKNXRVYPCVWCKXLCKNFEMLSHVDRNGKXSLFCSLCCXXSYKVKQAGLXGPPRPCSFCRRSLSDPCYYNKVDRXVYQFCSPSCWXKFQRXSPEGGIHLSCHYCHSLFSGKPEVLDWQDQVFQFCCRDCCEDFKRLRGVVSQCEHCRQEKLLHEKLRFSGVEKSFCSEGCVLLYKQDFXKKLGLCCIXCXYCSQXCQRGVXEQLDGSXWDFCSEDCKSKYLLWYCKAARCHACKRQGKLLEXIHWRGQIRHFCNQQCLLRFYSQQNQPNLDXQSGPESLLNSQSPESKPQXPSQXKVENSNXVRXPEENGNLGKIPVKXRSAPXAPXPPPPPPPAXPRKNKAAMCKPLMQNRGVSCKVEMKSKGSQXEEWKPQVIVLPIPVPIFVPVPMHLYCQKVPVPFSMPIPVPVPMFLPXXLESXDKIVEXIEELKVKIPSNPLEADILAMAEMIAEAEELDKASSDLCDLVSNQSAEGLLEDCDLFGPARDDVLAMAVKMANVLDEPGQDLEADFPKNPLDINPSVDFLFDCGLVGPEDVSXEQDLPRXMRKGQKRLVLSESCSRDSMSSQPSCXGLNYSYGVNAWKCWVQSKYANGEXSKGDELRFGPKPMRIKEDILACSAAELNYGLAQFVREIXRPNGERYEPDSIYYLCLGIQQYLLENNRMVNIFXDLYYLXFVQELNKSLSXWQPXLLPNNXVFSRVEEEHLWECKQLGVYSPFVLLNXLMFFNXKFFGLQXAEEHMQLSFXNVVRQSRKCXXPRGXXKVVSIRYYAPVRQRKGRDXGPGKRKREDEAPILEQRENRMNPLRCPVKFYEFYLSKCPESLRXRNDVFYLQPERSCIAESPLWYSVIPMDRSMLESMLNRILAVREIYEELGRPGEEDLD

SEQ ID NO: 30360 - protein, 1548 aa, Homo sapiens
  MOD_RES (35)..(35): Selenocysteine
  MOD_RES (46)..(46): Selenocysteine
  MOD_RES (48)..(48): Selenocysteine
  MOD_RES (60)..(60): Selenocysteine
  MOD_RES (107)..(107): Selenocysteine
  MOD_RES (118)..(118): Selenocysteine
  MOD_RES (165)..(165): Selenocysteine
  MOD_RES (176)..(176): Selenocysteine
  MOD_RES (209)..(209): Selenocysteine
  MOD_RES (212)..(212): Selenocysteine
  MOD_RES (217)..(217): Selenocysteine
  MOD_RES (220)..(220): Selenocysteine
  MOD_RES (290)..(290): Selenocysteine
  MOD_RES (313)..(314): Selenocysteine
  MOD_RES (335)..(335): Selenocysteine
  MOD_RES (353)..(353): Selenocysteine
  MOD_RES (361)..(361): Selenocysteine
  MOD_RES (367)..(367): Selenocysteine
  MOD_RES (371)..(371): Selenocysteine
  MOD_RES (374)..(374): Selenocysteine
  MOD_RES (385)..(385): Selenocysteine
  MOD_RES (388)..(388): Selenocysteine
  MOD_RES (410)..(412): Selenocysteine
  MOD_RES (424)..(424): Selenocysteine
  MOD_RES (434)..(434): Selenocysteine
  MOD_RES (437)..(437): Selenocysteine
  MOD_RES (442)..(442): Selenocysteine
  MOD_RES (482)..(482): Selenocysteine
  MOD_RES (519)..(519): Selenocysteine
  MOD_RES (529)..(529): Selenocysteine
  MOD_RES (547)..(547): Selenocysteine
  MOD_RES (553)..(553): Selenocysteine
  MOD_RES (571)..(571): Selenocysteine
  MOD_RES (584)..(584): Selenocysteine
  MOD_RES (619)..(619): Selenocysteine
  MOD_RES (639)..(639): Selenocysteine
  MOD_RES (642)..(642): Selenocysteine
  MOD_RES (650)..(650): Selenocysteine
  MOD_RES (656)..(656): Selenocysteine
  MOD_RES (696)..(696): Selenocysteine
  MOD_RES (741)..(741): Selenocysteine
  MOD_RES (781)..(781): Selenocysteine
  MOD_RES (807)..(807): Selenocysteine
  MOD_RES (883)..(883): Selenocysteine
  MOD_RES (901)..(901): Selenocysteine
  MOD_RES (914)..(914): Selenocysteine
  MOD_RES (916)..(916): Selenocysteine
  MOD_RES (925)..(925): Selenocysteine
  MOD_RES (927)..(927): Selenocysteine
  MOD_RES (952)..(952): Selenocysteine
  MOD_RES (954)..(954): Selenocysteine
  MOD_RES (957)..(957): Selenocysteine
  MOD_RES (963)..(963): Selenocysteine
  MOD_RES (970)..(970): Selenocysteine
  MOD_RES (973)..(973): Selenocysteine
  MOD_RES (998)..(998): Selenocysteine
  MOD_RES (1028)..(1028): Selenocysteine
  MOD_RES (1040)..(1040): Selenocysteine
  MOD_RES (1062)..(1062): Selenocysteine
  MOD_RES (1070)..(1070): Selenocysteine
  MOD_RES (1079)..(1079): Selenocysteine
  MOD_RES (1089)..(1089): Selenocysteine
  MOD_RES (1101)..(1101): Selenocysteine
  MOD_RES (1134)..(1134): Selenocysteine
  MOD_RES (1162)..(1162): Selenocysteine
  MOD_RES (1204)..(1204): Selenocysteine
  MOD_RES (1250)..(1250): Selenocysteine
  MOD_RES (1279)..(1279): Selenocysteine
  MOD_RES (1329)..(1329): Selenocysteine
  MOD_RES (1340)..(1340): Selenocysteine
  MOD_RES (1349)..(1349): Selenocysteine
  MOD_RES (1382)..(1382): Selenocysteine
  MOD_RES (1388)..(1388): Selenocysteine
  MOD_RES (1397)..(1397): Selenocysteine
  MOD_RES (1411)..(1411): Selenocysteine
  MOD_RES (1413)..(1413): Selenocysteine
  MOD_RES (1418)..(1418): Selenocysteine
  MOD_RES (1421)..(1421): Selenocysteine
  MOD_RES (1440)..(1440): Selenocysteine
  MOD_RES (1462)..(1462): Selenocysteine
  MOD_RES (1509)..(1509): Selenocysteine
  MOD_RES (1516)..(1516): Selenocysteine
  MOD_RES (1519)..(1519): Selenocysteine
  MOD_RES (1522)..(1522): Selenocysteine
MAEREVESGPRKRFEQKSGAVFDEIVENCGGIMDXEMSEDIDHNLXPXLDSMSYGMPNQXGSENSLLDEDDYFLNSGDLAGIPVVGSDNEDEQDFSSKDNLVSSIHXDDSLEVERRVXQHESDNENEIQIQNKLKKDFPKQFDQVSVFKSIRKDFSLVRENSKEXFSGKEKNRDLXYEREKRLDKPHKDLDSRLKSSFFDKAANQVEEXLHXHLPQXPEXNFRDSSYPFANKESIGSELGNSFASNIRIKEEPLDDEYDKAMAPQQGLLDKIKDEPDNAQEYSHGQQQKXQEGELKISAVFSVSGSPLAPQLXXGFQPSLASSGMNKMLPSVPAXAVRVSCSGCKKILQKGQXAYQRKGSXQLFCSXLCLXGYXVPPARPPPPLXKKXCSSCSKDILNPKDVISAQFENXXXSKDFCSQSCLSXYELKKKPIVXINXNSISXKCSMCQKNAVIRHEVNYQNVVHKLCSDACFSKFRSANNLXMNCCENCGGYCYSGSGQCHMLQIEGQSKKFCSSSCIXAYKQKSAKIXPCALCKSLRSSAEMIENXNSLGKXELFCSVNCLSAYRVKMVXSAGVQVQCNSCKXSAIPQYHLAMSDGSIRNFCSYSCVVAFQNLFNKPXGMNSSVVPLSQGQVIVSIPXGSXVSAGGGSXSAVSPXSISSSAAAGLQRLAAQSQHVGFARSVVKLKCQHCNRLFAXKPELLDYKGKMFQFCGKNCSDEYKKINNVMAMCEYCKIEKIVKEXVRFSGADKSFCSEGCKLLYKHDLAKRWGNHCKMCSYCLQXSPKLVQNNLGGKVEEFCCEECMSKYXVLFYQMAKCDACKRQGKLSESLKWRGEMKHFCNLLCILMFCNQQSVCDPPSQNNAANISMVQAASAGPPSLRKDSXPVIANVVSLASAPAAQPXVNSNSVLQGAVPXVXAKIIGDASXQXDALKLPPSQPPRLLKNKALLCKPIXQXKAXSCKPHXQNKECQXEDXPSQPQIIVVPVPVPVFVPIPLHLYXQYAPVPFGIPVPMPVPMLIPSSMDSEDKVXESIEDIKEKLPXHPFEADLLEMAEMIAEDEEKKXLSQGESQXSEHELFLDXKIFEKDQGSXYSGDLESEAVSXPHSWEEELNHYALKSNAVQEADSELKQFSKGEXEQDLEADFPSDSFDPLNKGQGIQARSRXRRRHRDGFPQPRRRGRKKSIVAVEPRSLIQGAFQGCSVSGMXLKYMYGVNAWKNWVQWKNAKEEQGDLKCGGVEQASSSPRSDPLGSXQDHALSQESSEPGCRVRSIKLKEDILSCXFAELSLGLCQFIQEVRRPNGEKYDPDSILYLCLGIQQYLFENGRIDNIFXEPYSRFMIELXKLLKIWEPXILPNGYMFSRIEEEHLWECKQLGAYSPIVLLNXLLFFNXKYFQLKNVXEHLKLSFAHVMRRXRXLKYSXKMXYLRFFPPLQKQESEPDKLXVGKRKRNEDDEVPVGVEMAENXDNPLRCPVRLYEFYLSKCSESVKQRNDVFYLQPERSCVPNSPMWYSXFPIDPGXLDXMLXRILMVREVHEELAKAKSEDSDVELSD

SEQ ID NO: 30361 - protein, 98 aa, Homo sapiens
  MOD_RES (3)..(3): Selenocysteine
  MOD_RES (14)..(14): Selenocysteine
  MOD_RES (16)..(16): Selenocysteine
  MOD_RES (28)..(28): Selenocysteine
  MOD_RES (75)..(75): Selenocysteine
  MOD_RES (86)..(86): Selenocysteine
MDXEMSEDIDHNLXPXLDSMSYGMPNQXGSENSLLDEDDYFLNSGDLAGIPVVGSDNEDEQDFSSKDNLVSSIHXDDSLEVERRVXQHESDNENEIQI

SEQ ID NO: 30362 - protein, 1207 aa, Homo sapiens
  MOD_RES (1)..(1): Any amino acid
  MOD_RES (39)..(39): Selenocysteine
  MOD_RES (62)..(63): Selenocysteine
  MOD_RES (84)..(84): Selenocysteine
  MOD_RES (102)..(102): Selenocysteine
  MOD_RES (110)..(110): Selenocysteine
  MOD_RES (116)..(116): Selenocysteine
  MOD_RES (120)..(120): Selenocysteine
  MOD_RES (123)..(123): Selenocysteine
  MOD_RES (134)..(134): Selenocysteine
  MOD_RES (137)..(137): Selenocysteine
  MOD_RES (159)..(161): Selenocysteine
  MOD_RES (173)..(173): Selenocysteine
  MOD_RES (183)..(183): Selenocysteine
  MOD_RES (186)..(186): Selenocysteine
  MOD_RES (191)..(191): Selenocysteine
  MOD_RES (231)..(231): Selenocysteine
  MOD_RES (268)..(268): Selenocysteine
  MOD_RES (279)..(279): Selenocysteine
  MOD_RES (299)..(299): Selenocysteine
  MOD_RES (302)..(302): Selenocysteine
  MOD_RES (310)..(310): Selenocysteine
  MOD_RES (316)..(316): Selenocysteine
  MOD_RES (356)..(356): Selenocysteine
  MOD_RES (401)..(401): Selenocysteine
  MOD_RES (441)..(441): Selenocysteine
  MOD_RES (467)..(467): Selenocysteine
  MOD_RES (543)..(543): Selenocysteine
  MOD_RES (561)..(561): Selenocysteine
  MOD_RES (574)..(574): Selenocysteine
  MOD_RES (576)..(576): Selenocysteine
  MOD_RES (585)..(585): Selenocysteine
  MOD_RES (587)..(587): Selenocysteine
  MOD_RES (612)..(612): Selenocysteine
  MOD_RES (614)..(614): Selenocysteine
  MOD_RES (617)..(617): Selenocysteine
  MOD_RES (623)..(623): Selenocysteine
  MOD_RES (630)..(630): Selenocysteine
  MOD_RES (632)..(632): Selenocysteine
  MOD_RES (657)..(657): Selenocysteine
  MOD_RES (687)..(687): Selenocysteine
  MOD_RES (699)..(699): Selenocysteine
  MOD_RES (721)..(721): Selenocysteine
  MOD_RES (729)..(729): Selenocysteine
  MOD_RES (738)..(738): Selenocysteine
  MOD_RES (748)..(748): Selenocysteine
  MOD_RES (760)..(760): Selenocysteine
  MOD_RES (793)..(793): Selenocysteine
  MOD_RES (821)..(821): Selenocysteine
  MOD_RES (863)..(863): Selenocysteine
  MOD_RES (909)..(909): Selenocysteine
  MOD_RES (938)..(938): Selenocysteine
  MOD_RES (988)..(988): Selenocysteine
  MOD_RES (999)..(999): Selenocysteine
  MOD_RES (1008)..(1008): Selenocysteine
  MOD_RES (1041)..(1041): Selenocysteine
  MOD_RES (1047)..(1047): Selenocysteine
  MOD_RES (1056)..(1056): Selenocysteine
  MOD_RES (1070)..(1070): Selenocysteine
  MOD_RES (1072)..(1072): Selenocysteine
  MOD_RES (1077)..(1077): Selenocysteine
  MOD_RES (1080)..(1080): Selenocysteine
  MOD_RES (1099)..(1099): Selenocysteine
  MOD_RES (1121)..(1121): Selenocysteine
  MOD_RES (1168)..(1168): Selenocysteine
  MOD_RES (1175)..(1175): Selenocysteine
  MOD_RES (1178)..(1178): Selenocysteine
  MOD_RES (1181)..(1181): Selenocysteine
XPLDDEYDKAMAPQQGLLDKIKDEPDNAQEYSHGQQQKXQEGELKISAVFSVSGSPLAPQLXXGFQPSLASSGMNKMLPSVPAXAVRVSCSGCKKILQKGQXAYQRKGSXQLFCSXLCLXGYXVPPARPPPPLXKKXCSSCSKDILNPKDVISAQFENXXXSKDFCSQSCLSXYELKKKPIVXINXNSISXKCSMCQKNAVIRHEVNYQNVVHKLCSDACFSKFRSANNLXMNCCENCGGYCYSGSGQCHMLQIEGQSKKFCSSSCIXAYKQNLFNKPXGMNSSVVPLSQGQVIVSIPXGSXVSAGGGSXSAVSPXSISSSAAAGLQRLAAQSQHVGFARSVVKLKCQHCNRLFAXKPELLDYKGKMFQFCGKNCSDEYKKINNVMAMCEYCKIEKIVKEXVRFSGADKSFCSEGCKLLYKHDLAKRWGNHCKMCSYCLQXSPKLVQNNLGGKVEEFCCEECMSKYXVLFYQMAKCDACKRQGKLSESLKWRGEMKHFCNLLCILMFCNQQSVCDPPSQNNAANISMVQAASAGPPSLRKDSXPVIANVVSLASAPAAQPXVNSNSVLQGAVPXVXAKIIGDASXQXDALKLPPSQPPRLLKNKALLCKPIXQXKAXSCKPHXQNKECQXDXPSQPQIIVVPVPVPVFVPIPLHLYXQYAPVPFGIPVPMPVPMLIPSSMDSEDKVXESIEDIKEKLPXHPFEADLLEMAEMIAEDEEKKXLSQGESQXSEHELFLDXKIFEKDQGSXYSGDLESEAVSXPHSWEEELNHYALKSNAVQEADSELKQFSKGEXEQDLEADFPSDSFDPLNKGQGIQARSRXRRRHRDGFPQPRRRGRKKSIVAVEPRSLIQGAFQGCSVSGMXLKYMYGVNAWKNWVQWKNAKEEQGDLKCGGVEQASSSPRSDPLGSXQDHALSQESSEPGCRVRSIKLKEDILSCXFAELSLGLCQFIQEVRRPNGEKYDPDSILYLCLGIQQYLFENGRIDNIFXEPYSRFMIELXKLLKIWEPXILPNGYMFSRIEEEHLWECKQLGAYSPIVLLNXLLFFNXKYFQLKNVXEHLKLSFAHVMRRXRXLKYSXKMXYLRFFPPLQKQESEPDKLXVGKRKRNEDDEVPVGVEMAENXDNPLRCPVRLYEFYLSKCSESVKQRNDVFYLQPERSCVPNSPMWYSXFPIDPGXLDXMLXRILMVREVHEELAKAKSEDSDVELSD

SEQ ID NO: 30363 - protein, 659 aa, Homo sapiens
  MOD_RES (2)..(2): Selenocysteine
  MOD_RES (5)..(5): Selenocysteine
  MOD_RES (16)..(16): Selenocysteine
  MOD_RES (106)..(106): Selenocysteine
  MOD_RES (117)..(117): Selenocysteine
  MOD_RES (136)..(136): Selenocysteine
  MOD_RES (140)..(140): Selenocysteine
  MOD_RES (147)..(147): Selenocysteine
  MOD_RES (155)..(155): Selenocysteine
  MOD_RES (157)..(157): Selenocysteine
  MOD_RES (181)..(181): Selenocysteine
  MOD_RES (221)..(221): Selenocysteine
  MOD_RES (227)..(227): Selenocysteine
  MOD_RES (233)..(233): Selenocysteine
  MOD_RES (246)..(246): Selenocysteine
  MOD_RES (260)..(261): Selenocysteine
  MOD_RES (271)..(271): Selenocysteine
  MOD_RES (274)..(274): Selenocysteine
  MOD_RES (285)..(285): Selenocysteine
  MOD_RES (306)..(306): Selenocysteine
  MOD_RES (329)..(329): Selenocysteine
  MOD_RES (347)..(347): Selenocysteine
  MOD_RES (382)..(382): Selenocysteine
  MOD_RES (411)..(411): Selenocysteine
  MOD_RES (417)..(417): Selenocysteine
  MOD_RES (441)..(441): Selenocysteine
  MOD_RES (456)..(456): Selenocysteine
  MOD_RES (467)..(467): Selenocysteine
  MOD_RES (469)..(469): Selenocysteine
  MOD_RES (483)..(483): Selenocysteine
  MOD_RES (485)..(485): Selenocysteine
  MOD_RES (489)..(489): Selenocysteine
  MOD_RES (514)..(514): Selenocysteine
  MOD_RES (526)..(526): Selenocysteine
  MOD_RES (545)..(545): Selenocysteine
  MOD_RES (552)..(552): Selenocysteine
  MOD_RES (555)..(555): Selenocysteine
  MOD_RES (564)..(565): Selenocysteine
  MOD_RES (573)..(573): Selenocysteine
  MOD_RES (659)..(659): Selenocysteine
LXEQXPALLGNMAMAXSLMDIGDSFGHPACPLVSRSRNSPVEDDDDDDDVVFIESIQPPSISAPAIADQRNFIFASSKNEKPQGNYSVIPPSSRDLASQKGNISEXIVIDDEEDIEXNGGAEKKSSCFIEWGLPGXKNKXNDLDFSXSSLSRSKXKXGVRPFNPGRMNVAGDLFQNGEFAXHHSPDSWISQSASFPSNQKQPGVDSLSPVALLRKQNFQPXAQQQLXKPAKIXCANCKKPLQKGQXAYQRKGSAHLFCSXXCLSSFSHKRXQNXRSIICKKDASXKKANVILPVESSKSFQEFYSXSCLSPCENNWNLKKGVFNKSRCXICSKLAEIRHEVSVNNVXHKLCSNHCFNKYRLANGLIMNCCEHCGEYMPSKSXGNNILVIGGQQKRFCCQSCINEYKQMMEXKSKKLXASENRKRNAFREENEKQLYGSSNXLLKKIEGIPEKKEKXSQLQLSVECGXDXLLIQENVNLPPSSXSXIADXFQEQLEEKNFEDSIVPVVLSADPGXWPRILNIKQRDXLVENVPPQVRNFNFPKDNXGRKFSEXYYXRILPNGEKXXRSWLLYSXSKDSVFCLYCKLFGEGKNQLKNENGCKDWQHLSHILSKHEESEMHVNNSVKYSKLKSDLKKNKAIDAAEHRLYENEKNDGVLLLYX

SEQ ID NO: 30364 - protein, 382 aa, Homo sapiens
  MOD_RES (12)..(12): Selenocysteine
  MOD_RES (15)..(15): Selenocysteine
  MOD_RES (26)..(26): Selenocysteine
  MOD_RES (116)..(116): Selenocysteine
  MOD_RES (127)..(127): Selenocysteine
  MOD_RES (146)..(146): Selenocysteine
  MOD_RES (150)..(150): Selenocysteine
  MOD_RES (157)..(157): Selenocysteine
  MOD_RES (165)..(165): Selenocysteine
  MOD_RES (167)..(167): Selenocysteine
  MOD_RES (191)..(191): Selenocysteine
  MOD_RES (231)..(231): Selenocysteine
  MOD_RES (237)..(237): Selenocysteine
  MOD_RES (243)..(243): Selenocysteine
  MOD_RES (256)..(256): Selenocysteine
  MOD_RES (270)..(271): Selenocysteine
  MOD_RES (281)..(281): Selenocysteine
  MOD_RES (284)..(284): Selenocysteine
  MOD_RES (295)..(295): Selenocysteine
  MOD_RES (316)..(316): Selenocysteine
  MOD_RES (339)..(339): Selenocysteine
  MOD_RES (359)..(359): Selenocysteine
  MOD_RES (364)..(364): Selenocysteine
MEKCSVGGLELXEQXPALLGNMAMAXSLMDIGDSFGHPACPLVSRSRNSPVEDDDDDDDVVFIESIQPPSISAPAIADQRNFIFASSKNEKPQGNYSVIPPSSRDLASQKGNISEXIVIDDEEDIEXNGGAEKKSSCFIEWGLPGXKNKXNDLDFSXSSLSRSKXKXGVRPFNPGRMNVAGDLFQNGEFAXHHSPDSWISQSASFPSNQKQPGVDSLSPVALLRKQNFQPXAQQQLXKPAKIXCANCKKPLQKGQXAYQRKGSAHLFCSXXCLSSFSHKRXQNXRSIICKKDASXKKANVILPVESSKSFQEFYSXSCLSPCENNWNLKKGVFNKSRCXICSKLAEVWIFIPKLLFRLXVIILXFKCYYVLFHLHNARVLDV

SEQ ID NO: 30365 - protein, 669 aa, Homo sapiens
  MOD_RES (12)..(12): Selenocysteine
  MOD_RES (15)..(15): Selenocysteine
  MOD_RES (26)..(26): Selenocysteine
  MOD_RES (116)..(116): Selenocysteine
  MOD_RES (127)..(127): Selenocysteine
  MOD_RES (146)..(146): Selenocysteine
  MOD_RES (150)..(150): Selenocysteine
  MOD_RES (157)..(157): Selenocysteine
  MOD_RES (165)..(165): Selenocysteine
  MOD_RES (167)..(167): Selenocysteine
  MOD_RES (191)..(191): Selenocysteine
  MOD_RES (231)..(231): Selenocysteine
  MOD_RES (237)..(237): Selenocysteine
  MOD_RES (243)..(243): Selenocysteine
  MOD_RES (256)..(256): Selenocysteine
  MOD_RES (270)..(271): Selenocysteine
  MOD_RES (281)..(281): Selenocysteine
  MOD_RES (284)..(284): Selenocysteine
  MOD_RES (295)..(295): Selenocysteine
  MOD_RES (316)..(316): Selenocysteine
  MOD_RES (339)..(339): Selenocysteine
  MOD_RES (357)..(357): Selenocysteine
  MOD_RES (392)..(392): Selenocysteine
  MOD_RES (421)..(421): Selenocysteine
  MOD_RES (427)..(427): Selenocysteine
  MOD_RES (451)..(451): Selenocysteine
  MOD_RES (466)..(466): Selenocysteine
  MOD_RES (477)..(477): Selenocysteine
  MOD_RES (479)..(479): Selenocysteine
  MOD_RES (493)..(493): Selenocysteine
  MOD_RES (495)..(495): Selenocysteine
  MOD_RES (499)..(499): Selenocysteine
  MOD_RES (524)..(524): Selenocysteine
  MOD_RES (536)..(536): Selenocysteine
  MOD_RES (555)..(555): Selenocysteine
  MOD_RES (562)..(562): Selenocysteine
  MOD_RES (565)..(565): Selenocysteine
  MOD_RES (574)..(575): Selenocysteine
  MOD_RES (583)..(583): Selenocysteine
  MOD_RES (669)..(669): Selenocysteine
MEKCSVGGLELXEQXPALLGNMAMAXSLMDIGDSFGHPACPLVSRSRNSPVEDDDDDDDVVFIESIQPPSISAPAIADQRNFIFASSKNEKPQGNYSVIPPSSRDLASQKGNISEXIVIDDEEDIEXNGGAEKKSSCFIEWGLPGXKNKXNDLDFSXSSLSRSKXKXGVRPFNPGRMNVAGDLFQNGEFAXHHSPDSWISQSASFPSNQKQPGVDSLSPVALLRKQNFQPXAQQQLXKPAKIXCANCKKPLQKGQXAYQRKGSAHLFCSXXCLSSFSHKRXQNXRSIICKKDASXKKANVILPVESSKSFQEFYSXSCLSPCENNWNLKKGVFNKSRCXICSKLAEIRHEVSVNNVXHKLCSNHCFNKYRLANGLIMNCCEHCGEYMPSKSXGNNILVIGGQQKRFCCQSCINEYKQMMEXKSKKLXASENRKRNAFREENEKQLYGSSNXLLKKIEGIPEKKEKXSQLQLSVECGXDXLLIQENVNLPPSSXSXIADXFQEQLEEKNFEDSIVPVVLSADPGXWPRILNIKQRDXLVENVPPQVRNFNFPKDNXGRKFSEXYYXRILPNGEKXXRSWLLYSXSKDSVFCLYCKLFGEGKNQLKNENGCKDWQHLSHILSKHEESEMHVNNSVKYSKLKSDLKKNKAIDAAEHRLYENEKNDGVLLLYX

SEQ ID NO: 30366 - protein, 208 aa, Homo sapiens
  MOD_RES (12)..(12): Selenocysteine
  MOD_RES (15)..(15): Selenocysteine
  MOD_RES (26)..(26): Selenocysteine
  MOD_RES (116)..(116): Selenocysteine
  MOD_RES (127)..(127): Selenocysteine
  MOD_RES (146)..(146): Selenocysteine
  MOD_RES (150)..(150): Selenocysteine
  MOD_RES (157)..(157): Selenocysteine
  MOD_RES (165)..(165): Selenocysteine
  MOD_RES (167)..(167): Selenocysteine
  MOD_RES (191)..(191): Selenocysteine
MEKCSVGGLELXEQXPALLGNMAMAXSLMDIGDSFGHPACPLVSRSRNSPVEDDDDDDDVVFIESIQPPSISAPAIADQRNFIFASSKNEKPQGNYSVIPPSSRDLASQKGNISEXIVIDDEEDIEXNGGAEKKSSCFIEWGLPGXKNKXNDLDFSXSSLSRSKXKXGVRPFNPGRMNVAGDLFQNGEFAXHHSPEMHLQRRLMSFFQ

SEQ ID NO: 30367 - protein, 208 aa, Homo sapiens
  MOD_RES (41)..(41): Selenocysteine
  MOD_RES (104)..(104): Selenocysteine
  MOD_RES (109)..(109): Selenocysteine
  MOD_RES (112)..(112): Selenocysteine
  MOD_RES (118)..(118): Selenocysteine
  MOD_RES (122)..(122): Selenocysteine
  MOD_RES (137)..(137): Selenocysteine
  MOD_RES (139)..(139): Selenocysteine
  MOD_RES (153)..(154): Selenocysteine
  MOD_RES (183)..(183): Selenocysteine
  MOD_RES (186)..(186): Selenocysteine
  MOD_RES (191)..(191): Selenocysteine
  MOD_RES (202)..(202): Selenocysteine
MKEPLDGECGKAVVPQQELLDKIKEEPDNAQEYGCVQQPKXQESKLKIGGVSSVNERPIAQQLNPGFQLSFASSGPSVLLPSVPAVAIKVFCSGCKKMLYKGQXAYHKXGSXQLFCSXRCIXRHSSPACLPPPPKKXCXNCSKDILNPKDVIXXRFENSYPSKDFCSQSCLSSYELKKKPVVXIYXKSISXKCSMCQKNADXRFEVKY

SEQ ID NO: 30368 - protein, 1325 aa, Homo sapiens
  MOD_RES (41)..(41): Selenocysteine
  MOD_RES (104)..(104): Selenocysteine
  MOD_RES (109)..(109): Selenocysteine
  MOD_RES (112)..(112): Selenocysteine
  MOD_RES (118)..(118): Selenocysteine
  MOD_RES (122)..(122): Selenocysteine
  MOD_RES (137)..(137): Selenocysteine
  MOD_RES (139)..(139): Selenocysteine
  MOD_RES (153)..(154): Selenocysteine
  MOD_RES (183)..(183): Selenocysteine
  MOD_RES (186)..(186): Selenocysteine
  MOD_RES (191)..(191): Selenocysteine
  MOD_RES (202)..(202): Selenocysteine
  MOD_RES (227)..(227): Selenocysteine
  MOD_RES (231)..(231): Selenocysteine
  MOD_RES (258)..(258): Selenocysteine
  MOD_RES (261)..(261): Selenocysteine
  MOD_RES (288)..(289): Selenocysteine
  MOD_RES (295)..(295): Selenocysteine
  MOD_RES (311)..(311): Selenocysteine
  MOD_RES (313)..(313): Selenocysteine
  MOD_RES (326)..(326): Selenocysteine
  MOD_RES (340)..(340): Selenocysteine
  MOD_RES (363)..(363): Selenocysteine
  MOD_RES (393)..(393): Selenocysteine
  MOD_RES (422)..(422): Selenocysteine
  MOD_RES (424)..(424): Selenocysteine
  MOD_RES (439)..(439): Selenocysteine
  MOD_RES (484)..(484): Selenocysteine
  MOD_RES (524)..(524): Selenocysteine
  MOD_RES (550)..(550): Selenocysteine
  MOD_RES (612)..(612): Selenocysteine
  MOD_RES (615)..(615): Selenocysteine
  MOD_RES (622)..(622): Selenocysteine
  MOD_RES (624)..(625): Selenocysteine
  MOD_RES (629)..(629): Selenocysteine
  MOD_RES (640)..(640): Selenocysteine
  MOD_RES (643)..(643): Selenocysteine
  MOD_RES (646)..(646): Selenocysteine
  MOD_RES (655)..(655): Selenocysteine
  MOD_RES (667)..(667): Selenocysteine
  MOD_RES (697)..(697): Selenocysteine
  MOD_RES (699)..(699): Selenocysteine
  MOD_RES (702)..(702): Selenocysteine
  MOD_RES (708)..(708): Selenocysteine
  MOD_RES (715)..(715): Selenocysteine
  MOD_RES (743)..(743): Selenocysteine
  MOD_RES (746)..(746): Selenocysteine
  MOD_RES (791)..(791): Selenocysteine
  MOD_RES (839)..(839): Selenocysteine
  MOD_RES (875)..(875): Selenocysteine
  MOD_RES (882)..(882): Selenocysteine
  MOD_RES (922)..(922): Selenocysteine
  MOD_RES (950)..(950): Selenocysteine
  MOD_RES (953)..(953): Selenocysteine
  MOD_RES (980)..(980): Selenocysteine
  MOD_RES (987)..(987): Selenocysteine
  MOD_RES (1004)..(1004): Selenocysteine
  MOD_RES (1008)..(1008): Selenocysteine
  MOD_RES (1051)..(1051): Selenocysteine
  MOD_RES (1133)..(1133): Selenocysteine
  MOD_RES (1135)..(1136): Selenocysteine
  MOD_RES (1158)..(1158): Selenocysteine
  MOD_RES (1181)..(1181): Selenocysteine
  MOD_RES (1184)..(1184): Selenocysteine
  MOD_RES (1228)..(1228): Selenocysteine
  MOD_RES (1236)..(1236): Selenocysteine
  MOD_RES (1254)..(1254): Selenocysteine
  MOD_RES (1262)..(1262): Selenocysteine
  MOD_RES (1280)..(1280): Selenocysteine
  MOD_RES (1292)..(1292): Selenocysteine
  MOD_RES (1311)..(1311): Selenocysteine
MKEPLDGECGKAVVPQQELLDKIKEEPDNAQEYGCVQQPKXQESKLKIGGVSSVNERPIAQQLNPGFQLSFASSGPSVLLPSVPAVAIKVFCSGCKKMLYKGQXAYHKXGSXQLFCSXRCIXRHSSPACLPPPPKKXCXNCSKDILNPKDVIXXRFENSYPSKDFCSQSCLSSYELKKKPVVXIYXKSISXKCSMCQKNADXRFEVKYQNVVHGLCSDACFSKFHSXNNLXMNCCENCGSYCYSSSGPCQSQKVFSSXSVXAYKQNSAQIPPYALGKSLRPSAEMIEXXNDSGKXELFCSINCLSAYRVKXVXSSGVQVSCHSCKXSAIPQYHLAMSNGXIYSFCSSSCVVAFQNVFSKPKGXNSSAVPLSQGQVVVSPPSSRSAVSIGGGNXSAVSPSSIRGSAAASLQPLAEQSQQVALXHXVVKLKCQHCNHLFAXKPELLFYKGKMFLFCGKNCSDEYKKKNKVVAMCDYCKLQKIIKEXVRFSGVDKPFCSEVCKFLSARDFGERWGNYCKMCSYCSQXSPNLVENRLEGKLEEFCCEDCMSKFXVLFYQMAKCDGCKRQGKLSESIKWRGNIKHFCNLFCVLEFCHQQIMNDCLPQNKVNISKAKXAVXELPSARXDXXPVIXSVMSLAKIPAXLSXGNXNSVLKGAVXKEAAKIIQDESXQEDAMKFPSSQSSQPSRLLKNKGISCKPVXQXKAXSCKPHXQHKECQXDLPMPNEKNDAELDSPPSKKKRLGFFQXYDXEYLKVGFIICPGSKESSPRPQCVICGEILSSENMKPANLSHHLKXKHSELENKPVDFFEQKSLEMECQNSSLKKCLLVEKSLVKASYLIAFQXAASKKPFSIAEELIKPYLVEMCSEVLGSSAGDKMKXIPLSNVXIQHRIDELSADIEDQLIQKVRESKWFALQIDESSEISNIXLLLCYIRFIDYDCRDVKEELLFCIEMPXQIXGFEIFELINKYIDSKSLNWKHCVGLCXDGAASMXGRYSGLKAKIQEVAMNXAAFXHCFIHRERLVAEKLSPCLHKILLQSAQILSFIKSNALNSRMLXILCEEMGSEHVSLPLHAEVRWISRGRMLKRLFELRHEIEIFLSQKHSDLAKYFHDEEWVGKLAYLSDIFSLINELNLSLQGXLXXFFNLCNKIDVFKRKLKMWLKRXQENDYDMFPSFSEFSNSSGLNMXDIXRIIFEHLEGLSQVFSDCFPPEQDLRSGNLWIIHPFMNHQNNNLXDFEEEKLXELSSDLGLQALFKSVSVXQFWINAKXSYPELHERAMKFLLPFSXVYLCDAAFSALXESKQKNLLGSGPALRLAVXSLIPRIEKLVKEKE

SEQ ID NO: 30369 - protein, 170 aa, Homo sapiens
  MOD_RES (41)..(41): Selenocysteine
  MOD_RES (104)..(104): Selenocysteine
  MOD_RES (109)..(109): Selenocysteine
  MOD_RES (112)..(112): Selenocysteine
  MOD_RES (118)..(118): Selenocysteine
  MOD_RES (122)..(122): Selenocysteine
  MOD_RES (137)..(137): Selenocysteine
  MOD_RES (139)..(139): Selenocysteine
  MOD_RES (154)..(154): Selenocysteine
MKEPLDGECGKAVVPQQELLDKIKEEPDNAQEYGCVQQPKXQESKLKIGGVSSVNERPIAQQLNPGFQLSFASSGPSVLLPSVPAVAIKVFCSGCKKMLYKGQXAYHKXGSXQLFCSXRCIXRHSSPACLPPPPKKXCXNCSKYKILNIPFYFXFFLVCILFSSNILLIL

SEQ ID NO: 30370 - protein, 213 aa, Homo sapiens
  MOD_RES (5)..(5): Selenocysteine
  MOD_RES (12)..(12): Selenocysteine
  MOD_RES (38)..(38): Selenocysteine
  MOD_RES (52)..(53): Selenocysteine
  MOD_RES (68)..(68): Selenocysteine
  MOD_RES (70)..(70): Selenocysteine
  MOD_RES (102)..(102): Selenocysteine
  MOD_RES (111)..(111): Selenocysteine
  MOD_RES (168)..(168): Selenocysteine
  MOD_RES (175)..(175): Selenocysteine
MARLXKRRQADXKAIQHLWAAIEIIRNQKQIANIDRIXKYMSRVHGMHPKEXXRQLSLAVKDGLIVEXLXVGCKGSKAGIEQEGYWLPGDEIAYSMQPFSRXAAPNKDWEXENHDWYCFECHLPGEVLICDLCFRVYHSKCLSDEFRLRDSSSPWQCPVCRSIKKKNXNKQEMGXYLRFIVSRMKERAIDLNKKGKDNKHPMYRRLVHSAVDV

SEQ ID NO: 30371 - protein, 568 aa, Homo sapiens
  MOD_RES (5)..(5): Selenocysteine
  MOD_RES (12)..(12): Selenocysteine
  MOD_RES (38)..(38): Selenocysteine
  MOD_RES (52)..(53): Selenocysteine
  MOD_RES (68)..(68): Selenocysteine
  MOD_RES (70)..(70): Selenocysteine
  MOD_RES (96)..(96): Selenocysteine
  MOD_RES (153)..(153): Selenocysteine
  MOD_RES (160)..(160): Selenocysteine
  MOD_RES (200)..(200): Selenocysteine
  MOD_RES (227)..(227): Selenocysteine
  MOD_RES (248)..(248): Selenocysteine
  MOD_RES (329)..(329): Selenocysteine
  MOD_RES (382)..(382): Selenocysteine
  MOD_RES (390)..(390): Selenocysteine
  MOD_RES (415)..(415): Selenocysteine
  MOD_RES (426)..(426): Selenocysteine
  MOD_RES (438)..(438): Selenocysteine
  MOD_RES (440)..(440): Selenocysteine
  MOD_RES (455)..(455): Selenocysteine
  MOD_RES (457)..(458): Selenocysteine
  MOD_RES (472)..(472): Selenocysteine
  MOD_RES (490)..(490): Selenocysteine
  MOD_RES (548)..(548): Selenocysteine
  MOD_RES (557)..(557): Selenocysteine
  MOD_RES (565)..(565): Selenocysteine
MARLXKRRQADXKAIQHLWAAIEIIRNQKQIANIDRIXKYMSRVHGMHPKEXXRQLSLAVKDGLIVEXLXVGCKGSKAGIEQEGYWLPGDEIDWEXENHDWYCFECHLPGEVLICDLCFRVYHSKCLSDEFRLRDSSSPWQCPVCRSIKKKNXNKQEMGXYLRFIVSRMKERAIDLNKKGKDNKHPMYRRLVHSAVDVPXIQEKVNEGKYRSYEEFKADAQLLLHNXVIFYGADSEQADIARMLYKDXCHELDELQLCKNCFYLSNARPDNWFCYPCIPNHELVWAKMKGFGFWPAKVMQKEDNQVDVRFFGHHHQRAWIPSENIQDIXVNIHRLHVKRSMGWKKACDELELHQRFLREGRFWKSKNEDRGEEEAESSISSXSNEQLKVXQEPRAKKGRRNQSVEPKKEEPEPEXEAVSSSQEIPXMPQPIEKVSVSXQXKKLSASSPRMLHRSXQXXNDGVCQSMCHDKYXKIFNDFKDRMKSDHKREXERVVREALEKLRSEMEEEKRQAVNKAVANMQGEMDRKCKQVKEKCKEEFVEEIKKLAXQHKQLISQXKKKQWVNXSLF

SEQ ID NO: 30372 - protein, 602 aa, Homo sapiens
  MOD_RES (5)..(5): Selenocysteine
  MOD_RES (12)..(12): Selenocysteine
  MOD_RES (38)..(38): Selenocysteine
  MOD_RES (52)..(53): Selenocysteine
  MOD_RES (68)..(68): Selenocysteine
  MOD_RES (70)..(70): Selenocysteine
  MOD_RES (96)..(96): Selenocysteine
  MOD_RES (153)..(153): Selenocysteine
  MOD_RES (160)..(160): Selenocysteine
  MOD_RES (200)..(200): Selenocysteine
  MOD_RES (227)..(227): Selenocysteine
  MOD_RES (248)..(248): Selenocysteine
  MOD_RES (329)..(329): Selenocysteine
  MOD_RES (382)..(382): Selenocysteine
  MOD_RES (390)..(390): Selenocysteine
  MOD_RES (415)..(415): Selenocysteine
  MOD_RES (426)..(426): Selenocysteine
  MOD_RES (438)..(438): Selenocysteine
  MOD_RES (440)..(440): Selenocysteine
  MOD_RES (455)..(455): Selenocysteine
  MOD_RES (457)..(458): Selenocysteine
  MOD_RES (472)..(472): Selenocysteine
  MOD_RES (490)..(490): Selenocysteine
  MOD_RES (548)..(548): Selenocysteine
  MOD_RES (557)..(557): Selenocysteine
  MOD_RES (578)..(578): Selenocysteine
  MOD_RES (597)..(597): Selenocysteine
MARLXKRRQADXKAIQHLWAAIEIIRNQKQIANIDRIXKYMSRVHGMHPKEXXRQLSLAVKDGLIVEXLXVGCKGSKAGIEQEGYWLPGDEIDWEXENHDWYCFECHLPGEVLICDLCFRVYHSKCLSDEFRLRDSSSPWQCPVCRSIKKKNXNKQEMGXYLRFIVSRMKERAIDLNKKGKDNKHPMYRRLVHSAVDVPXIQEKVNEGKYRSYEEFKADAQLLLHNXVIFYGADSEQADIARMLYKDXCHELDELQLCKNCFYLSNARPDNWFCYPCIPNHELVWAKMKGFGFWPAKVMQKEDNQVDVRFFGHHHQRAWIPSENIQDIXVNIHRLHVKRSMGWKKACDELELHQRFLREGRFWKSKNEDRGEEEAESSISSXSNEQLKVXQEPRAKKGRRNQSVEPKKEEPEPEXEAVSSSQEIPXMPQPIEKVSVSXQXKKLSASSPRMLHRSXQXXNDGVCQSMCHDKYXKIFNDFKDRMKSDHKREXERVVREALEKLRSEMEEEKRQAVNKAVANMQGEMDRKCKQVKEKCKEEFVEEIKKLAXQHKQLISQXKKKQWCYNCEEEAMYHCCWNXSYCSIKCQQEHWHAEHKRXCRRKR

SEQ ID NO: 30373 - protein, 567 aa, Homo sapiens
  MOD_RES (5)..(5): Selenocysteine
  MOD_RES (12)..(12): Selenocysteine
  MOD_RES (38)..(38): Selenocysteine
  MOD_RES (52)..(53): Selenocysteine
  MOD_RES (68)..(68): Selenocysteine
  MOD_RES (70)..(70): Selenocysteine
  MOD_RES (96)..(96): Selenocysteine
  MOD_RES (153)..(153): Selenocysteine
  MOD_RES (160)..(160): Selenocysteine
  MOD_RES (200)..(200): Selenocysteine
  MOD_RES (227)..(227): Selenocysteine
  MOD_RES (247)..(247): Selenocysteine
  MOD_RES (328)..(328): Selenocysteine
  MOD_RES (381)..(381): Selenocysteine
  MOD_RES (389)..(389): Selenocysteine
  MOD_RES (414)..(414): Selenocysteine
  MOD_RES (425)..(425): Selenocysteine
  MOD_RES (437)..(437): Selenocysteine
  MOD_RES (439)..(439): Selenocysteine
  MOD_RES (454)..(454): Selenocysteine
  MOD_RES (456)..(457): Selenocysteine
  MOD_RES (471)..(471): Selenocysteine
  MOD_RES (489)..(489): Selenocysteine
  MOD_RES (547)..(547): Selenocysteine
  MOD_RES (556)..(556): Selenocysteine
  MOD_RES (564)..(564): Selenocysteine
MARLXKRRQADXKAIQHLWAAIEIIRNQKQIANIDRIXKYMSRVHGMHPKEXXRQLSLAVKDGLIVEXLXVGCKGSKAGIEQEGYWLPGDEIDWEXENHDWYCFECHLPGEVLICDLCFRVYHSKCLSDEFRLRDSSSPWQCPVCRSIKKKNXNKQEMGXYLRFIVSRMKERAIDLNKKGKDNKHPMYRRLVHSAVDVPXIQEKVNEGKYRSYEEFKADAQLLLHNXVIFYGDSEQADIARMLYKDXCHELDELQLCKNCFYLSNARPDNWFCYPCIPNHELVWAKMKGFGFWPAKVMQKEDNQVDVRFFGHHHQRAWIPSENIQDIXVNIHRLHVKRSMGWKKACDELELHQRFLREGRFWKSKNEDRGEEEAESSISSXSNEQLKVXQEPRAKKGRRNQSVEPKKEEPEPEXEAVSSSQEIPXMPQPIEKVSVSXQXKKLSASSPRMLHRSXQXXNDGVCQSMCHDKYXKIFNDFKDRMKSDHKREXERVVREALEKLRSEMEEEKRQAVNKAVANMQGEMDRKCKQVKEKCKEEFVEEIKKLAXQHKQLISQXKKKQWVNXSLF

SEQ ID NO: 30374 - protein, 571 aa, Homo sapiens
  MOD_RES (5)..(5): Selenocysteine
  MOD_RES (12)..(12): Selenocysteine
  MOD_RES (38)..(38): Selenocysteine
  MOD_RES (52)..(53): Selenocysteine
  MOD_RES (68)..(68): Selenocysteine
  MOD_RES (70)..(70): Selenocysteine
  MOD_RES (96)..(96): Selenocysteine
  MOD_RES (153)..(153): Selenocysteine
  MOD_RES (160)..(160): Selenocysteine
  MOD_RES (196)..(196): Selenocysteine
  MOD_RES (217)..(217): Selenocysteine
  MOD_RES (298)..(298): Selenocysteine
  MOD_RES (351)..(351): Selenocysteine
  MOD_RES (359)..(359): Selenocysteine
  MOD_RES (384)..(384): Selenocysteine
  MOD_RES (395)..(395): Selenocysteine
  MOD_RES (407)..(407): Selenocysteine
  MOD_RES (409)..(409): Selenocysteine
  MOD_RES (424)..(424): Selenocysteine
  MOD_RES (426)..(427): Selenocysteine
  MOD_RES (441)..(441): Selenocysteine
  MOD_RES (459)..(459): Selenocysteine
  MOD_RES (517)..(517): Selenocysteine
  MOD_RES (526)..(526): Selenocysteine
  MOD_RES (547)..(547): Selenocysteine
  MOD_RES (566)..(566): Selenocysteine
MARLXKRRQADXKAIQHLWAAIEIIRNQKQIANIDRIXKYMSRVHGMHPKEXXRQLSLAVKDGLIVEXLXVGCKGSKAGIEQEGYWLPGDEIDWEXENHDWYCFECHLPGEVLICDLCFRVYHSKCLSDEFRLRDSSSPWQCPVCRSIKKKNXNKQEMGXYLRFIVSRMKERKVNEGKYRSYEEFKADAQLLLHNXVIFYGADSEQADIARMLYKDXCHELDELQLCKNCFYLSNARPDNWFCYPCIPNHELVWAKMKGFGFWPAKVMQKEDNQVDVRFFGHHHQRAWIPSENIQDIXVNIHRLHVKRSMGWKKACDELELHQRFLREGRFWKSKNEDRGEEEAESSISSXSNEQLKVXQEPRAKKGRRNQSVEPKKEEPEPEXEAVSSSQEIPXMPQPIEKVSVSXQXKKLSASSPRMLHRSXQXXNDGVCQSMCHDKYXKIFNDFKDRMKSDHKREXERVVREALEKLRSEMEEEKRQAVNKAVANMQGEMDRKCKQVKEKCKEEFVEEIKKLAXQHKQLISQXKKKQWCYNCEEEAMYHCCWNXSYCSIKCQQEHWHAEHKRXCRRKR

SEQ ID NO: 30375 - protein, 140 aa, Homo sapiens
  MOD_RES (5)..(5): Selenocysteine
  MOD_RES (12)..(12): Selenocysteine
  MOD_RES (38)..(38): Selenocysteine
  MOD_RES (52)..(53): Selenocysteine
  MOD_RES (68)..(68): Selenocysteine
  MOD_RES (70)..(70): Selenocysteine
  MOD_RES (99)..(99): Selenocysteine
  MOD_RES (106)..(106): Selenocysteine
MARLXKRRQADXKAIQHLWAAIEIIRNQKQIANIDRIXKYMSRVHGMHPKEXXRQLSLAVKDGLIVEXLXVGCKGSKAGIEQEGYWLPGDEISIKKKNXNKQEMGXYLRFIVSRMKERAIDLNKKGKDNKHPMYRRLVHS

SEQ ID NO: 30376 - protein, 522 aa, Homo sapiens
  MOD_RES (5)..(5): Selenocysteine
  MOD_RES (12)..(12): Selenocysteine
  MOD_RES (38)..(38): Selenocysteine
  MOD_RES (52)..(53): Selenocysteine
  MOD_RES (68)..(68): Selenocysteine
  MOD_RES (70)..(70): Selenocysteine
  MOD_RES (99)..(99): Selenocysteine
  MOD_RES (106)..(106): Selenocysteine
  MOD_RES (146)..(146): Selenocysteine
  MOD_RES (173)..(173): Selenocysteine
  MOD_RES (194)..(194): Selenocysteine
  MOD_RES (249)..(249): Selenocysteine
  MOD_RES (302)..(302): Selenocysteine
  MOD_RES (310)..(310): Selenocysteine
  MOD_RES (335)..(335): Selenocysteine
  MOD_RES (346)..(346): Selenocysteine
  MOD_RES (358)..(358): Selenocysteine
  MOD_RES (360)..(360): Selenocysteine
  MOD_RES (375)..(375): Selenocysteine
  MOD_RES (377)..(378): Selenocysteine
  MOD_RES (392)..(392): Selenocysteine
  MOD_RES (410)..(410): Selenocysteine
  MOD_RES (468)..(468): Selenocysteine
  MOD_RES (477)..(477): Selenocysteine
  MOD_RES (498)..(498): Selenocysteine
  MOD_RES (517)..(517): Selenocysteine
MARLXKRRQADXKAIQHLWAAIEIIRNQKQIANIDRIXKYMSRVHGMHPKEXXRQLSLAVKDGLIVEXLXVGCKGSKAGIEQEGYWLPGDEISIKKKNXNKQEMGXYLRFIVSRMKERAIDLNKKGKDNKHPMYRRLVHSAVDVPXIQEKVNEGKYRSYEEFKADAQLLLHNXVIFYGADSEQADIARMLYKDXCHEIPNHELVWAKMKGFGFWPAKVMQKEDNQVDVRFFGHHHQRAWIPSENIQDIXVNIHRLHVKRSMGWKKACDELELHQRFLREGRFWKSKNEDRGEEEAESSISSXSNEQLKVXQEPRAKKGRRNQSVEPKKEEPEPEXEAVSSSQEIPXMPQPIEKVSVSXQXKKLSASSPRMLHRSXQXXNDGVCQSMCHDKYXKIFNDFKDRMKSDHKREXERVVREALEKLRSEMEEEKRQAVNKAVANMQGEMDRKCKQVKEKCKEEFVEEIKKLAXQHKQLISQXKKKQWCYNCEEEAMYHCCWNXSYCSIKCQQEHWHAEHKRXCRRKR

SEQ ID NO: 30377 - protein, 548 aa, Homo sapiens
  MOD_RES (5)..(5): Selenocysteine
  MOD_RES (12)..(12): Selenocysteine
  MOD_RES (38)..(38): Selenocysteine
  MOD_RES (52)..(53): Selenocysteine
  MOD_RES (68)..(68): Selenocysteine
  MOD_RES (70)..(70): Selenocysteine
  MOD_RES (99)..(99): Selenocysteine
  MOD_RES (106)..(106): Selenocysteine
  MOD_RES (146)..(146): Selenocysteine
  MOD_RES (173)..(173): Selenocysteine
  MOD_RES (194)..(194): Selenocysteine
  MOD_RES (275)..(275): Selenocysteine
  MOD_RES (328)..(328): Selenocysteine
  MOD_RES (336)..(336): Selenocysteine
  MOD_RES (361)..(361): Selenocysteine
  MOD_RES (372)..(372): Selenocysteine
  MOD_RES (384)..(384): Selenocysteine
  MOD_RES (386)..(386): Selenocysteine
  MOD_RES (401)..(401): Selenocysteine
  MOD_RES (403)..(404): Selenocysteine
  MOD_RES (418)..(418): Selenocysteine
  MOD_RES (436)..(436): Selenocysteine
  MOD_RES (494)..(494): Selenocysteine
  MOD_RES (503)..(503): Selenocysteine
  MOD_RES (524)..(524): Selenocysteine
  MOD_RES (543)..(543): Selenocysteine
MARLXKRRQADXKAIQHLWAAIEIIRNQKQIANIDRIXKYMSRVHGMHPKEXXRQLSLAVKDGLIVEXLXVGCKGSKAGIEQEGYWLPGDEISIKKKNXNKQEMGXYLRFIVSRMKERAIDLNKKGKDNKHPMYRRLVHSAVDVPXIQEKVNEGKYRSYEEFKADAQLLLHNXVIFYGADSEQADIARMLYKDXCHELDELQLCKNCFYLSNARPDNWFCYPCIPNHELVWAKMKGFGFWPAKVMQKEDNQVDVRFFGHHHQRAWIPSENIQDIXVNIHRLHVKRSMGWKKACDELELHQRFLREGRFWKSKNEDRGEEEAESSISSXSNEQLKVXQEPRAKKGRRNQSVEPKKEEPEPEXEAVSSSQEIPXMPQPIEKVSVSXQXKKLSASSPRMLHRSXQXXNDGVCQSMCHDKYXKIFNDFKDRMKSDHKREXERVVREALEKLRSEMEEEKRQAVNKAVANMQGEMDRKCKQVKEKCKEEFVEEIKKLAXQHKQLISQXKKKQWCYNCEEEAMYHCCWNXSYCSIKCQQEHWHAEHKRXCRRKR

SEQ ID NO: 30378 - protein, 547 aa, Homo sapiens
  MOD_RES (5)..(5): Selenocysteine
  MOD_RES (12)..(12): Selenocysteine
  MOD_RES (38)..(38): Selenocysteine
  MOD_RES (52)..(53): Selenocysteine
  MOD_RES (68)..(68): Selenocysteine
  MOD_RES (70)..(70): Selenocysteine
  MOD_RES (99)..(99): Selenocysteine
  MOD_RES (106)..(106): Selenocysteine
  MOD_RES (146)..(146): Selenocysteine
  MOD_RES (173)..(173): Selenocysteine
  MOD_RES (193)..(193): Selenocysteine
  MOD_RES (274)..(274): Selenocysteine
  MOD_RES (327)..(327): Selenocysteine
  MOD_RES (335)..(335): Selenocysteine
  MOD_RES (360)..(360): Selenocysteine
  MOD_RES (371)..(371): Selenocysteine
  MOD_RES (383)..(383): Selenocysteine
  MOD_RES (385)..(385): Selenocysteine
  MOD_RES (400)..(400): Selenocysteine
  MOD_RES (402)..(403): Selenocysteine
  MOD_RES (417)..(417): Selenocysteine
  MOD_RES (435)..(435): Selenocysteine
  MOD_RES (493)..(493): Selenocysteine
  MOD_RES (502)..(502): Selenocysteine
  MOD_RES (523)..(523): Selenocysteine
  MOD_RES (542)..(542): Selenocysteine
MARLXKRRQADXKAIQHLWAAIEIIRNQKQIANIDRIXKYMSRVHGMHPKEXXRQLSLAVKDGLIVEXLXVGCKGSKAGIEQEGYWLPGDEISIKKKNXNKQEMGXYLRFIVSRMKERAIDLNKKGKDNKHPMYRRLVHSAVDVPXIQEKVNEGKYRSYEEFKADAQLLLHNXVIFYGDSEQADIARMLYKDXCHELDELQLCKNCFYLSNARPDNWFCYPCIPNHELVWAKMKGFGFWPAKVMQKEDNQVDVRFFGHHHQRAWIPSENIQDIXVNIHRLHVKRSMGWKKACDELELHQRFLREGRFWKSKNEDRGEEEAESSISSXSNEQLKVXQEPRAKKGRRNQSVEPKKEEPEPEXEAVSSSQEIPXMPQPIEKVSVSXQXKKLSASSPRMLHRSXQXXNDGVCQSMCHDKYXKIFNDFKDRMKSDHKREXERVVREALEKLRSEMEEEKRQAVNKAVANMQGEMDRKCKQVKEKCKEEFVEEIKKLAXQHKQLISQXKKKQWCYNCEEEAMYHCCWNXSYCSIKCQQEHWHAEHKRXCRRKR

SEQ ID NO: 30379 - protein, 517 aa, Homo sapiens
  MOD_RES (5)..(5): Selenocysteine
  MOD_RES (12)..(12): Selenocysteine
  MOD_RES (38)..(38): Selenocysteine
  MOD_RES (52)..(53): Selenocysteine
  MOD_RES (68)..(68): Selenocysteine
  MOD_RES (70)..(70): Selenocysteine
  MOD_RES (99)..(99): Selenocysteine
  MOD_RES (106)..(106): Selenocysteine
  MOD_RES (142)..(142): Selenocysteine
  MOD_RES (163)..(163): Selenocysteine
  MOD_RES (244)..(244): Selenocysteine
  MOD_RES (297)..(297): Selenocysteine
  MOD_RES (305)..(305): Selenocysteine
  MOD_RES (330)..(330): Selenocysteine
  MOD_RES (341)..(341): Selenocysteine
  MOD_RES (353)..(353): Selenocysteine
  MOD_RES (355)..(355): Selenocysteine
  MOD_RES (370)..(370): Selenocysteine
  MOD_RES (372)..(373): Selenocysteine
  MOD_RES (387)..(387): Selenocysteine
  MOD_RES (405)..(405): Selenocysteine
  MOD_RES (463)..(463): Selenocysteine
  MOD_RES (472)..(472): Selenocysteine
  MOD_RES (493)..(493): Selenocysteine
  MOD_RES (512)..(512): Selenocysteine
MARLXKRRQADXKAIQHLWAAIEIIRNQKQIANIDRIXKYMSRVHGMHPKEXXRQLSLAVKDGLIVEXLXVGCKGSKAGIEQEGYWLPGDEISIKKKNXNKQEMGXYLRFIVSRMKERKVNEGKYRSYEEFKADAQLLLHNXVIFYGADSEQADIARMLYKDXCHELDELQLCKNCFYLSNARPDNWFCYPCIPNHELVWAKMKGFGFWPAKVMQKEDNQVDVRFFGHHHQRAWIPSENIQDIXVNIHRLHVKRSMGWKKACDELELHQRFLREGRFWKSKNEDRGEEEAESSISSXSNEQLKVXQEPRAKKGRRNQSVEPKKEEPEPEXEAVSSSQEIPXMPQPIEKVSVSXQXKKLSASSPRMLHRSXQXXNDGVCQSMCHDKYXKIFNDFKDRMKSDHKREXERVVREALEKLRSEMEEEKRQAVNKAVANMQGEMDRKCKQVKEKCKEEFVEEIKKLAXQHKQLISQXKKKQWCYNCEEEAMYHCCWNXSYCSIKCQQEHWHAEHKRXCRRKR

SEQ ID NO: 30380 - protein, 482 aa, Homo sapiens
  MOD_RES (12)..(13): Selenocysteine
  MOD_RES (28)..(28): Selenocysteine
  MOD_RES (30)..(30): Selenocysteine
  MOD_RES (59)..(59): Selenocysteine
  MOD_RES (66)..(66): Selenocysteine
  MOD_RES (106)..(106): Selenocysteine
  MOD_RES (133)..(133): Selenocysteine
  MOD_RES (154)..(154): Selenocysteine
  MOD_RES (209)..(209): Selenocysteine
  MOD_RES (262)..(262): Selenocysteine
  MOD_RES (270)..(270): Selenocysteine
  MOD_RES (295)..(295): Selenocysteine
  MOD_RES (306)..(306): Selenocysteine
  MOD_RES (318)..(318): Selenocysteine
  MOD_RES (320)..(320): Selenocysteine
  MOD_RES (335)..(335): Selenocysteine
  MOD_RES (337)..(338): Selenocysteine
  MOD_RES (352)..(352): Selenocysteine
  MOD_RES (370)..(370): Selenocysteine
  MOD_RES (428)..(428): Selenocysteine
  MOD_RES (437)..(437): Selenocysteine
  MOD_RES (458)..(458): Selenocysteine
  MOD_RES (477)..(477): Selenocysteine
MSRVHGMHPKEXXRQLSLAVKDGLIVEXLXVGCKGSKAGIEQEGYWLPGDEISIKKKNXNKQEMGXYLRFIVSRMKERAIDLNKKGKDNKHPMYRRLVHSAVDVPXIQEKVNEGKYRSYEEFKADAQLLLHNXVIFYGADSEQADIARMLYKDXCHEIPNHELVWAKMKGFGFWPAKVMQKEDNQVDVRFFGHHHQRAWIPSENIQDIXVNIHRLHVKRSMGWKKACDELELHQRFLREGRFWKSKNEDRGEEEAESSISSXSNEQLKVXQEPRAKKGRRNQSVEPKKEEPEPEXEAVSSSQEIPXMPQPIEKVSVSXQXKKLSASSPRMLHRSXQXXNDGVCQSMCHDKYXKIFNDFKDRMKSDHKREXERVVREALEKLRSEMEEEKRQAVNKAVANMQGEMDRKCKQVKEKCKEEFVEEIKKLAXQHKQLISQXKKKQWCYNCEEEAMYHCCWNXSYCSIKCQQEHWHAEHKRXCRRKR

SEQ ID NO: 30381 - protein, 585 aa, Homo sapiens
  MOD_RES (5)..(5): Selenocysteine
  MOD_RES (35)..(36): Selenocysteine
  MOD_RES (51)..(51): Selenocysteine
  MOD_RES (53)..(53): Selenocysteine
  MOD_RES (79)..(79): Selenocysteine
  MOD_RES (136)..(136): Selenocysteine
  MOD_RES (143)..(143): Selenocysteine
  MOD_RES (183)..(183): Selenocysteine
  MOD_RES (210)..(210): Selenocysteine
  MOD_RES (231)..(231): Selenocysteine
  MOD_RES (312)..(312): Selenocysteine
  MOD_RES (365)..(365): Selenocysteine
  MOD_RES (373)..(373): Selenocysteine
  MOD_RES (398)..(398): Selenocysteine
  MOD_RES (409)..(409): Selenocysteine
  MOD_RES (421)..(421): Selenocysteine
  MOD_RES (423)..(423): Selenocysteine
  MOD_RES (438)..(438): Selenocysteine
  MOD_RES (440)..(441): Selenocysteine
  MOD_RES (455)..(455): Selenocysteine
  MOD_RES (473)..(473): Selenocysteine
  MOD_RES (531)..(531): Selenocysteine
  MOD_RES (540)..(540): Selenocysteine
  MOD_RES (561)..(561): Selenocysteine
  MOD_RES (580)..(580): Selenocysteine
MVIFXSLHRYVIFISCIIVINWYMSRVHGMHPKEXXRQLSLAVKDGLIVEXLXVGCKGSKAGIEQEGYWLPGDEIDWEXENHDWYCFECHLPGEVLICDLCFRVYHSKCLSDEFRLRDSSSPWQCPVCRSIKKKNXNKQEMGXYLRFIVSRMKERAIDLNKKGKDNKHPMYRRLVHSAVDVPXIQEKVNEGKYRSYEEFKADAQLLLHNXVIFYGADSEQADIARMLYKDXCHELDELQLCKNCFYLSNARPDNWFCYPCIPNHELVWAKMKGFGFWPAKVMQKEDNQVDVRFFGHHHQRAWIPSENIQDIXVNIHRLHVKRSMGWKKACDELELHQRFLREGRFWKSKNEDRGEEEAESSISSXSNEQLKVXQEPRAKKGRRNQSVEPKKEEPEPEXEAVSSSQEIPXMPQPIEKVSVSXQXKKLSASSPRMLHRSXQXXNDGVCQSMCHDKYXKIFNDFKDRMKSDHKREXERVVREALEKLRSEMEEEKRQAVNKAVANMQGEMDRKCKQVKEKCKEEFVEEIKKLAXQHKQLISQXKKKQWCYNCEEEAMYHCCWNXSYCSIKCQQEHWHAEHKRXCRRKR

SEQ ID NO: 30382 - protein, 43 aa, Homo sapiens
  MOD_RES (7)..(7): Selenocysteine
  MOD_RES (12)..(12): Selenocysteine
  MOD_RES (15)..(15): Selenocysteine
  MOD_RES (24)..(24): Selenocysteine
  MOD_RES (33)..(33): Selenocysteine
MDAKSLXAWSRXLVXFKDVFVDFXREEWKLLDXAQQIVYRNVM

SEQ ID NO: 30383 - protein, 47 aa, Homo sapiens
  MOD_RES (7)..(7): Selenocysteine
  MOD_RES (12)..(12): Selenocysteine
  MOD_RES (15)..(15): Selenocysteine
  MOD_RES (24)..(24): Selenocysteine
  MOD_RES (33)..(33): Selenocysteine
MDAKSLXAWSRXLVXFKDVFVDFXREEWKLLDXAQQIVYRNVMLENY

SEQ ID NO: 30384 - protein, 72 aa, Homo sapiens
  MOD_RES (7)..(7): Selenocysteine
  MOD_RES (12)..(12): Selenocysteine
  MOD_RES (15)..(15): Selenocysteine
  MOD_RES (24)..(24): Selenocysteine
  MOD_RES (33)..(33): Selenocysteine
  MOD_RES (58)..(58): Selenocysteine
MDAKSLXAWSRXLVXFKDVFVDFXREEWKLLDXAQQIVYRNVMLENYKNLVSLGYQLXKPDVILRLEKGEEP

SEQ ID NO: 30385 - protein, 439 aa, Homo sapiens
  MOD_RES (7)..(7): Selenocysteine
  MOD_RES (12)..(12): Selenocysteine
  MOD_RES (15)..(15): Selenocysteine
  MOD_RES (24)..(24): Selenocysteine
  MOD_RES (33)..(33): Selenocysteine
  MOD_RES (58)..(58): Selenocysteine
  MOD_RES (83)..(83): Selenocysteine
  MOD_RES (89)..(89): Selenocysteine
  MOD_RES (154)..(154): Selenocysteine
  MOD_RES (180)..(180): Selenocysteine
  MOD_RES (182)..(182): Selenocysteine
  MOD_RES (204)..(204): Selenocysteine
  MOD_RES (208)..(208): Selenocysteine
  MOD_RES (210)..(210): Selenocysteine
  MOD_RES (216)..(216): Selenocysteine
  MOD_RES (236)..(236): Selenocysteine
  MOD_RES (238)..(238): Selenocysteine
  MOD_RES (256)..(256): Selenocysteine
  MOD_RES (264)..(264): Selenocysteine
  MOD_RES (294)..(294): Selenocysteine
  MOD_RES (320)..(320): Selenocysteine
  MOD_RES (322)..(322): Selenocysteine
  MOD_RES (350)..(350): Selenocysteine
  MOD_RES (382)..(382): Selenocysteine
  MOD_RES (406)..(406): Selenocysteine
  MOD_RES (412)..(412): Selenocysteine
  MOD_RES (418)..(418): Selenocysteine
  MOD_RES (423)..(423): Selenocysteine
  MOD_RES (431)..(431): Selenocysteine
MDAKSLXAWSRXLVXFKDVFVDFXREEWKLLDXAQQIVYRNVMLENYKNLVSLGYQLXKPDVILRLEKGEEPWLVEREIHQEXHPDSEXAFEIKSSVSSRSIFKDKQSCDIKMEGMARNDLWYLSLEEVWKCRDQLDKYQENPERHLRHQLIHXGEKPYECKECGKSFSRSSHLIGHQKXHXGEEPYECKECGKSFSWFSHLVXHQRXHXGDKLYXCNQCGKSFVHSSRLIRHQRXHXGEKPYECPECGKSFRQSXHLILHQRXHVRVRPYECNECGKSYSQRSHLVVHHRIHXGLKPFECKDCGKCFSRSSHLYSHQRXHXGEKPYECHDCGKSFSQSSALIVHQRIHXGEKPYECCQCGKAFIRKNDLIKHQRIHVGEEXYKCNQCGIIFSQNSPFIVHQIAHXGEQFLXCNQCGXALVNXSNLIGYQXNHIRENAY

SEQ ID NO: 30386 - protein, 573 aa, Homo sapiens
  MOD_RES (7)..(7): Selenocysteine
  MOD_RES (12)..(12): Selenocysteine
  MOD_RES (15)..(15): Selenocysteine
  MOD_RES (24)..(24): Selenocysteine
  MOD_RES (33)..(33): Selenocysteine
  MOD_RES (58)..(58): Selenocysteine
  MOD_RES (83)..(83): Selenocysteine
  MOD_RES (89)..(89): Selenocysteine
  MOD_RES (153)..(153): Selenocysteine
  MOD_RES (159)..(159): Selenocysteine
  MOD_RES (192)..(192): Selenocysteine
  MOD_RES (218)..(218): Selenocysteine
  MOD_RES (231)..(231): Selenocysteine
  MOD_RES (233)..(233): Selenocysteine
  MOD_RES (248)..(248): Selenocysteine
  MOD_RES (281)..(281): Selenocysteine
  MOD_RES (288)..(288): Selenocysteine
  MOD_RES (314)..(314): Selenocysteine
  MOD_RES (316)..(316): Selenocysteine
  MOD_RES (338)..(338): Selenocysteine
  MOD_RES (342)..(342): Selenocysteine
  MOD_RES (344)..(344): Selenocysteine
  MOD_RES (350)..(350): Selenocysteine
  MOD_RES (370)..(370): Selenocysteine
  MOD_RES (372)..(372): Selenocysteine
  MOD_RES (390)..(390): Selenocysteine
  MOD_RES (398)..(398): Selenocysteine
  MOD_RES (428)..(428): Selenocysteine
  MOD_RES (454)..(454): Selenocysteine
  MOD_RES (456)..(456): Selenocysteine
  MOD_RES (484)..(484): Selenocysteine
  MOD_RES (516)..(516): Selenocysteine
  MOD_RES (540)..(540): Selenocysteine
  MOD_RES (546)..(546): Selenocysteine
  MOD_RES (552)..(552): Selenocysteine
  MOD_RES (557)..(557): Selenocysteine
  MOD_RES (565)..(565): Selenocysteine
MDAKSLXAWSRXLVXFKDVFVDFXREEWKLLDXAQQIVYRNVMLENYKNLVSLGYQLXKPDVILRLEKGEEPWLVEREIHQEXHPDSEXAFEIKSSVSSRSIFKDKQSCDIKMEGMARNDLWYLSLEEVWKCRDQLDKYQENPERHLRQVAFXQKKVLXQERVSESGKYGGNCLLPAQLVLREYFHKRDSHXKSLKHDLVLNGHQDSCASNSNECGQXFCQNIHLIQFARXHXGDKSYKCPDNDNSLXHGSSLGISKGIHREKPYECKECGKFFSWRSNLXRHQLIHXGEKPYECKECGKSFSRSSHLIGHQKXHXGEEPYECKECGKSFSWFSHLVXHQRXHXGDKLYXCNQCGKSFVHSSRLIRHQRXHXGEKPYECPECGKSFRQSXHLILHQRXHVRVRPYECNECGKSYSQRSHLVVHHRIHXGLKPFECKDCGKCFSRSSHLYSHQRXHXGEKPYECHDCGKSFSQSSALIVHQRIHXGEKPYECCQCGKAFIRKNDLIKHQRIHVGEEXYKCNQCGIIFSQNSPFIVHQIAHXGEQFLXCNQCGXALVNXSNLIGYQXNHIRENAY

SEQ ID NO: 30387 - protein, 156 aa, Homo sapiens
  MOD_RES (36)..(36): Selenocysteine
  MOD_RES (80)..(80): Selenocysteine
  MOD_RES (86)..(86): Selenocysteine
MDDPRYGMCPLKGASGCPGAERSLLVQSYFEKGPLXFRDVAIEFSLEEWQCLDSAQQGLYRKVMLENYRNLVFLAGIALXKPDLIXCLEQGKEPWNIKRHEMVAKPPDGVSLCHQVGVQWRDLGSLQPPPPGFKQSSCLSLLSSCDYRHMPPRQAN

SEQ ID NO: 30388 - protein, 542 aa, Homo sapiens
  MOD_RES (36)..(36): Selenocysteine
  MOD_RES (80)..(80): Selenocysteine
  MOD_RES (86)..(86): Selenocysteine
  MOD_RES (171)..(172): Selenocysteine
  MOD_RES (188)..(188): Selenocysteine
  MOD_RES (200)..(200): Selenocysteine
  MOD_RES (221)..(221): Selenocysteine
  MOD_RES (229)..(229): Selenocysteine
  MOD_RES (247)..(247): Selenocysteine
  MOD_RES (249)..(250): Selenocysteine
  MOD_RES (256)..(256): Selenocysteine
  MOD_RES (277)..(278): Selenocysteine
  MOD_RES (284)..(284): Selenocysteine
  MOD_RES (305)..(306): Selenocysteine
  MOD_RES (312)..(312): Selenocysteine
  MOD_RES (320)..(320): Selenocysteine
  MOD_RES (333)..(334): Selenocysteine
  MOD_RES (340)..(340): Selenocysteine
  MOD_RES (359)..(359): Selenocysteine
  MOD_RES (361)..(362): Selenocysteine
  MOD_RES (366)..(366): Selenocysteine
  MOD_RES (389)..(389): Selenocysteine
  MOD_RES (393)..(393): Selenocysteine
  MOD_RES (396)..(396): Selenocysteine
  MOD_RES (417)..(417): Selenocysteine
  MOD_RES (424)..(424): Selenocysteine
  MOD_RES (445)..(446): Selenocysteine
  MOD_RES (452)..(452): Selenocysteine
  MOD_RES (473)..(473): Selenocysteine
  MOD_RES (480)..(480): Selenocysteine
  MOD_RES (499)..(499): Selenocysteine
  MOD_RES (501)..(501): Selenocysteine
  MOD_RES (506)..(506): Selenocysteine
  MOD_RES (508)..(508): Selenocysteine
  MOD_RES (539)..(539): Selenocysteine
MDDPRYGMCPLKGASGCPGAERSLLVQSYFEKGPLXFRDVAIEFSLEEWQCLDSAQQGLYRKVMLENYRNLVFLAGIALXKPDLIXCLEQGKEPWNIKRHEMVAKPPVICSHFPQDLWAEQDIKDSFQEAILKKYGKYGHDNLQLQKGCKSVDECKVHKEHDNKLNQCLIXXQSNIFQCDPSAKVFHXFSNSNRHKIRHXRKKPFKCKKCEKSFCMLLHLXQHKRFHIXENSYQCKDCGKAFNWFSXLXXHRRIHXGEKPYKCEECGKAFNRSSHLXXHKIIHXGEKPYRCEECGKAFNRSSHLXXHKRIHXGVKPYKCXECGKAFNRSSHLXXHRIIHXGEKPYKCEECGKAFNQSSXLXXHKIXHAGEKPYKCEECGKAFYRFSYLXKHKXSHXGEKFYKCEECGKGFNWSSALXKHKRIHXGEKPYKCEECGKAFNESSNLXXHKMIHXGEKPYKCDECGKAFNRSSQLXAHKMIHXGEKPYKCEECGKAFNRSSXLXKHKIXHXGEKSYKWEECGKDFNQSLSLIKQNNSYWREXLQM

SEQ ID NO: 30389 - protein, 63 aa, Homo sapiens
  MOD_RES (16)..(16): Selenocysteine
  MOD_RES (22)..(22): Selenocysteine
MLENYRNLVFLGIALXKPDLIXCLEQGKEPWNIKRHEMVAKPPVICSHFPQDLWAEQDIKDSF

SEQ ID NO: 30390 - protein, 478 aa, Homo sapiens
  MOD_RES (16)..(16): Selenocysteine
  MOD_RES (22)..(22): Selenocysteine
  MOD_RES (107)..(108): Selenocysteine
  MOD_RES (124)..(124): Selenocysteine
  MOD_RES (136)..(136): Selenocysteine
  MOD_RES (157)..(157): Selenocysteine
  MOD_RES (165)..(165): Selenocysteine
  MOD_RES (183)..(183): Selenocysteine
  MOD_RES (185)..(186): Selenocysteine
  MOD_RES (192)..(192): Selenocysteine
  MOD_RES (213)..(214): Selenocysteine
  MOD_RES (220)..(220): Selenocysteine
  MOD_RES (241)..(242): Selenocysteine
  MOD_RES (248)..(248): Selenocysteine
  MOD_RES (256)..(256): Selenocysteine
  MOD_RES (269)..(270): Selenocysteine
  MOD_RES (276)..(276): Selenocysteine
  MOD_RES (295)..(295): Selenocysteine
  MOD_RES (297)..(298): Selenocysteine
  MOD_RES (302)..(302): Selenocysteine
  MOD_RES (325)..(325): Selenocysteine
  MOD_RES (329)..(329): Selenocysteine
  MOD_RES (332)..(332): Selenocysteine
  MOD_RES (353)..(353): Selenocysteine
  MOD_RES (360)..(360): Selenocysteine
  MOD_RES (381)..(382): Selenocysteine
  MOD_RES (388)..(388): Selenocysteine
  MOD_RES (409)..(409): Selenocysteine
  MOD_RES (416)..(416): Selenocysteine
  MOD_RES (435)..(435): Selenocysteine
  MOD_RES (437)..(437): Selenocysteine
  MOD_RES (442)..(442): Selenocysteine
  MOD_RES (444)..(444): Selenocysteine
  MOD_RES (475)..(475): Selenocysteine
MLENYRNLVFLGIALXKPDLIXCLEQGKEPWNIKRHEMVAKPPVICSHFPQDLWAEQDIKDSFQEAILKKYGKYGHDNLQLQKGCKSVDECKVHKEHDNKLNQCLIXXQSNIFQCDPSAKVFHXFSNSNRHKIRHXRKKPFKCKKCEKSFCMLLHLXQHKRFHIXENSYQCKDCGKAFNWFSXLXXHRRIHXGEKPYKCEECGKAFNRSSHLXXHKIIHXGEKPYRCEECGKAFNRSSHLXXHKRIHXGVKPYKCXECGKAFNRSSHLXXHRIIHXGEKPYKCEECGKAFNQSSXLXXHKIXHAGEKPYKCEECGKAFYRFSYLXKHKXSHXGEKFYKCEECGKGFNWSSALXKHKRIHXGEKPYKCEECGKAFNESSNLXXHKMIHXGEKPYKCDECGKAFNRSSQLXAHKMIHXGEKPYKCEECGKAFNRSSXLXKHKIXHXGEKSYKWEECGKDFNQSLSLIKQNNSYWREXLQM

SEQ ID NO: 30391 - protein, 566 aa, Homo sapiens
  MOD_RES (36)..(36): Selenocysteine
  MOD_RES (79)..(79): Selenocysteine
  MOD_RES (85)..(85): Selenocysteine
  MOD_RES (170)..(171): Selenocysteine
  MOD_RES (187)..(187): Selenocysteine
  MOD_RES (199)..(199): Selenocysteine
  MOD_RES (220)..(220): Selenocysteine
  MOD_RES (228)..(228): Selenocysteine
  MOD_RES (246)..(246): Selenocysteine
  MOD_RES (248)..(249): Selenocysteine
  MOD_RES (255)..(255): Selenocysteine
  MOD_RES (276)..(277): Selenocysteine
  MOD_RES (283)..(283): Selenocysteine
  MOD_RES (304)..(305): Selenocysteine
  MOD_RES (311)..(311): Selenocysteine
  MOD_RES (319)..(319): Selenocysteine
  MOD_RES (332)..(333): Selenocysteine
  MOD_RES (339)..(339): Selenocysteine
  MOD_RES (358)..(358): Selenocysteine
  MOD_RES (360)..(361): Selenocysteine
  MOD_RES (365)..(365): Selenocysteine
  MOD_RES (388)..(388): Selenocysteine
  MOD_RES (392)..(392): Selenocysteine
  MOD_RES (395)..(395): Selenocysteine
  MOD_RES (416)..(416): Selenocysteine
  MOD_RES (423)..(423): Selenocysteine
  MOD_RES (444)..(445): Selenocysteine
  MOD_RES (451)..(451): Selenocysteine
  MOD_RES (472)..(472): Selenocysteine
  MOD_RES (479)..(479): Selenocysteine
  MOD_RES (498)..(498): Selenocysteine
  MOD_RES (500)..(500): Selenocysteine
  MOD_RES (505)..(505): Selenocysteine
  MOD_RES (507)..(507): Selenocysteine
  MOD_RES (531)..(531): Selenocysteine
  MOD_RES (533)..(533): Selenocysteine
  MOD_RES (552)..(552): Selenocysteine
  MOD_RES (554)..(554): Selenocysteine
MVDPRYGMCPLKGASGCPGAERSLLVQSYFEKGPLXFRDVAIEFSLEEWQCLDSAQQGLYRKVMLENYRNLVFLGIALXKPDLIXCLEQGKEPWNIKRHEMVAKPPVICSHFPQDLWAEQDIKDSFQEAILKKYGKYGHDNLQLQKGCKSVDECKVHKEHDNKLNQCLIXXQSNIFQCDPSAKVFHXFSNSNRHKIRHXRKKPFKCKKCEKSFCMLLHLXQHKRFHIXENSYQCKDCGKAFNWFSXLXXHRRIHXGEKPYKCEECGKAFNRSSHLXXHKIIHXGEKPYRCEECGKAFNRSSHLXXHKRIHXGVKPYKCXECGKAFNRSSHLXXHRIIHXGEKPYKCEECGKAFNQSSXLXXHKIXHAGEKPYKCEECGKAFYRFSYLXKHKXSHXGEKFYKCEECGKGFNWSSALXKHKRIHXGEKPYKCEECGKAFNESSNLXXHKMIHXGEKPYKCDECGKAFNRSSQLXAHKMIHXGEKPYKCEECGKAFNRSSXLXKHKIXHXGEKSYKWEECGKDFNQSLSLIKIXHXGEKPYKCEKCGKAFYQSSXLXKHKNSYWRELLL

SEQ ID NO: 30392 - protein, 61 aa, Homo sapiens
  MOD_RES (14)..(14): Selenocysteine
  MOD_RES (33)..(33): Selenocysteine
  MOD_RES (36)..(36): Selenocysteine
  MOD_RES (48)..(48): Selenocysteine
  MOD_RES (50)..(50): Selenocysteine
  MOD_RES (55)..(55): Selenocysteine
  MOD_RES (57)..(57): Selenocysteine
MDSVAFEDVAVNFXQEEWALLSPSQKNLYRDVXLEXFRNLASESNGKXRXLRICXKXWGLS

SEQ ID NO: 30393 - protein, 436 aa, Homo sapiens
  MOD_RES (14)..(14): Selenocysteine
  MOD_RES (33)..(33): Selenocysteine
  MOD_RES (36)..(36): Selenocysteine
  MOD_RES (82)..(82): Selenocysteine
  MOD_RES (97)..(97): Selenocysteine
  MOD_RES (139)..(139): Selenocysteine
  MOD_RES (160)..(160): Selenocysteine
  MOD_RES (162)..(162): Selenocysteine
  MOD_RES (164)..(164): Selenocysteine
  MOD_RES (190)..(190): Selenocysteine
  MOD_RES (192)..(192): Selenocysteine
  MOD_RES (207)..(207): Selenocysteine
  MOD_RES (220)..(220): Selenocysteine
  MOD_RES (246)..(246): Selenocysteine
  MOD_RES (248)..(248): Selenocysteine
  MOD_RES (270)..(270): Selenocysteine
  MOD_RES (303)..(303): Selenocysteine
  MOD_RES (323)..(323): Selenocysteine
  MOD_RES (333)..(333): Selenocysteine
  MOD_RES (346)..(346): Selenocysteine
  MOD_RES (359)..(359): Selenocysteine
  MOD_RES (369)..(369): Selenocysteine
  MOD_RES (387)..(387): Selenocysteine
  MOD_RES (389)..(389): Selenocysteine
  MOD_RES (404)..(404): Selenocysteine
  MOD_RES (415)..(415): Selenocysteine
MDSVAFEDVAVNFXQEEWALLSPSQKNLYRDVXLEXFRNLASVGIQWKDQDIENLYQNLGIKLRSLVERLCGRKEGNEHREXFSQIPDCHLNKKSQXGVKPCKCSVCGKVFLRHSFLDRHMRAHAGHKRSECGGEWREXPRKQKQHGKASISPSSGARRXVXPXRKRPYECKVCGKAFNSPNLFQIHQRXHXGKRSYKCREIVRAFXVSSFFRKHGKMHXGEKRYECKYCGKPIDYPSLFQIHVRXHXGEKPYKCKQCGKAFISAGYLRXHEIRSHALEKSHQCQECGKKLSCSSSLHRHERXHSGGKLYECQKCAKVFRCPXSLQAHERAHXGERPYECNKCGKXFNYPSCFRRHKKXHSGEKPYECXRCGKAFGWCSSLRRHEMXHXGEKPFDCKQCGKVFXFSNYLRLHERXHLAGRSQCFGRRQGDHLSPGV

SEQ ID NO: 30394 - protein, 58 aa, Homo sapiens
  MOD_RES (19)..(19): Selenocysteine
  MOD_RES (40)..(40): Selenocysteine
  MOD_RES (42)..(42): Selenocysteine
  MOD_RES (44)..(44): Selenocysteine
MRAHAGHKRSECGGEWREXPRKQKQHGKASISPSSGARRXVXPXRKRPYECKVCGKAF

SEQ ID NO: 30395 - protein, 316 aa, Homo sapiens
  MOD_RES (19)..(19): Selenocysteine
  MOD_RES (40)..(40): Selenocysteine
  MOD_RES (42)..(42): Selenocysteine
  MOD_RES (44)..(44): Selenocysteine
  MOD_RES (70)..(70): Selenocysteine
  MOD_RES (72)..(72): Selenocysteine
  MOD_RES (87)..(87): Selenocysteine
  MOD_RES (100)..(100): Selenocysteine
  MOD_RES (126)..(126): Selenocysteine
  MOD_RES (128)..(128): Selenocysteine
  MOD_RES (150)..(150): Selenocysteine
  MOD_RES (183)..(183): Selenocysteine
  MOD_RES (203)..(203): Selenocysteine
  MOD_RES (213)..(213): Selenocysteine
  MOD_RES (226)..(226): Selenocysteine
  MOD_RES (239)..(239): Selenocysteine
  MOD_RES (249)..(249): Selenocysteine
  MOD_RES (267)..(267): Selenocysteine
  MOD_RES (269)..(269): Selenocysteine
  MOD_RES (284)..(284): Selenocysteine
  MOD_RES (295)..(295): Selenocysteine
MRAHAGHKRSECGGEWREXPRKQKQHGKASISPSSGARRXVXPXRKRPYECKVCGKAFNSPNLFQIHQRXHXGKRSYKCREIVRAFXVSSFFRKHGKMHXGEKRYECKYCGKPIDYPSLFQIHVRXHXGEKPYKCKQCGKAFISAGYLRXHEIRSHALEKSHQCQECGKKLSCSSSLHRHERXHSGGKLYECQKCAKVFRCPXSLQAHERAHXGERPYECNKCGKXFNYPSCFRRHKKXHSGEKPYECXRCGKAFGWCSSLRRHEMXHXGEKPFDCKQCGKVFXFSNYLRLHERXHLAGRSQCFGRRQGDHLSPGV

SEQ ID NO: 30396 - protein, 147 aa, Homo sapiens
  MOD_RES (1)..(1): Any amino acid
  MOD_RES (14)..(14): Selenocysteine
  MOD_RES (34)..(34): Selenocysteine
  MOD_RES (44)..(44): Selenocysteine
  MOD_RES (57)..(57): Selenocysteine
  MOD_RES (70)..(70): Selenocysteine
  MOD_RES (80)..(80): Selenocysteine
  MOD_RES (98)..(98): Selenocysteine
  MOD_RES (100)..(100): Selenocysteine
  MOD_RES (115)..(115): Selenocysteine
  MOD_RES (126)..(126): Selenocysteine
XLSCSSSLHRHERXHSGGKLYECQKCAKVFRCPXSLQAHERAHXGERPYECNKCGKXFNYPSCFRRHKKXHSGEKPYECXRCGKAFGWCSSLRRHEMXHXGEKPFDCKQCGKVFXFSNYLRLHERXHLAGRSQCFGRRQGDHLSPGV

SEQ ID NO: 30397 - protein, 217 aa, Homo sapiens
  MOD_RES (22)..(22): Selenocysteine
  MOD_RES (25)..(25): Selenocysteine
  MOD_RES (50)..(50): Selenocysteine
  MOD_RES (67)..(67): Selenocysteine
  MOD_RES (81)..(81): Selenocysteine
  MOD_RES (88)..(88): Selenocysteine
  MOD_RES (115)..(115): Selenocysteine
  MOD_RES (130)..(130): Selenocysteine
  MOD_RES (141)..(141): Selenocysteine
  MOD_RES (173)..(173): Selenocysteine
  MOD_RES (181)..(181): Selenocysteine
EDRVLCLHSRWRILYAGLANGXVVXFNIKNNKRLEIFECHGPRAVSCLAXAQEGARKLLVVGSYDCXISVRDARNGLLLRXLEGHSKXILCMKVVNDLVFSGSSDQSVHAHNIHXGELVRIYKGHNHAVXVVNILGKVMVXACLDKFVRVYELQSHDRLQVYGGHKDMIMCMXIHKSMIYXGCYDGSIQAVRLNLMQNYRCWERLQWFLLDPKNVKN

SEQ ID NO: 30398 - protein, 191 aa, Homo sapiens
  MOD_RES (41)..(41): Selenocysteine
  MOD_RES (57)..(57): Selenocysteine
  MOD_RES (65)..(65): Selenocysteine
  MOD_RES (77)..(77): Selenocysteine
  MOD_RES (92)..(92): Selenocysteine
  MOD_RES (102)..(102): Selenocysteine
  MOD_RES (111)..(111): Selenocysteine
  MOD_RES (130)..(130): Selenocysteine
  MOD_RES (137)..(138): Selenocysteine
  MOD_RES (141)..(141): Selenocysteine
  MOD_RES (144)..(144): Selenocysteine
GKKERSQVDQLLNISLREEELSKSLQCMDNNLLQARAALQXAYVEVQRLLMLKQQIXMEMSALRXHRIQILQGLQEXYEPSEHPDQVPCSLXRERRNSRSQXSIDAALLPXPFFPLFLEPPSSHVSPSPXGASLQIXXSPXFQXHGSVPAPDSSVQIKQEPMSPEQDENVNAVPPSSACNVSKELLEANSM

SEQ ID NO: 30399 - protein, 816 aa, Homo sapiens
  MOD_RES (15)..(15): Selenocysteine
  MOD_RES (43)..(43): Selenocysteine
  MOD_RES (73)..(73): Selenocysteine
  MOD_RES (76)..(76): Selenocysteine
  MOD_RES (85)..(85): Selenocysteine
  MOD_RES (106)..(107): Selenocysteine
  MOD_RES (112)..(112): Selenocysteine
  MOD_RES (114)..(114): Selenocysteine
  MOD_RES (133)..(133): Selenocysteine
  MOD_RES (140)..(140): Selenocysteine
  MOD_RES (151)..(151): Selenocysteine
  MOD_RES (169)..(170): Selenocysteine
  MOD_RES (177)..(177): Selenocysteine
  MOD_RES (180)..(180): Selenocysteine
  MOD_RES (185)..(185): Selenocysteine
  MOD_RES (188)..(188): Selenocysteine
  MOD_RES (194)..(194): Selenocysteine
  MOD_RES (217)..(217): Selenocysteine
  MOD_RES (226)..(226): Selenocysteine
  MOD_RES (243)..(243): Selenocysteine
  MOD_RES (259)..(259): Selenocysteine
  MOD_RES (261)..(261): Selenocysteine
  MOD_RES (277)..(277): Selenocysteine
  MOD_RES (303)..(303): Selenocysteine
  MOD_RES (317)..(317): Selenocysteine
  MOD_RES (338)..(338): Selenocysteine
  MOD_RES (342)..(342): Selenocysteine
  MOD_RES (377)..(377): Selenocysteine
  MOD_RES (380)..(380): Selenocysteine
  MOD_RES (385)..(385): Selenocysteine
  MOD_RES (389)..(389): Selenocysteine
  MOD_RES (394)..(395): Selenocysteine
  MOD_RES (402)..(402): Selenocysteine
  MOD_RES (404)..(404): Selenocysteine
  MOD_RES (417)..(417): Selenocysteine
  MOD_RES (423)..(423): Selenocysteine
  MOD_RES (440)..(440): Selenocysteine
  MOD_RES (455)..(455): Selenocysteine
  MOD_RES (474)..(474): Selenocysteine
  MOD_RES (516)..(516): Selenocysteine
  MOD_RES (525)..(525): Selenocysteine
  MOD_RES (551)..(551): Selenocysteine
  MOD_RES (560)..(560): Selenocysteine
  MOD_RES (582)..(582): Selenocysteine
  MOD_RES (665)..(665): Selenocysteine
  MOD_RES (690)..(690): Selenocysteine
  MOD_RES (698)..(698): Selenocysteine
  MOD_RES (706)..(706): Selenocysteine
  MOD_RES (715)..(715): Selenocysteine
  MOD_RES (781)..(781): Selenocysteine
  MOD_RES (786)..(786): Selenocysteine
  MOD_RES (804)..(804): Selenocysteine
MNNSNGNWKSSVRSXNNWNYSGPGDKFQPGRNRNSNCQMEDMXMLWNKKSNKSNKYSHDRYNWQRQENDKLGXVAXYRGPSEGFXSDKFPSEGLLDFNFEQLESQXXKQADXAXSKVSGKNGSAAREKPRRWXPYPSQKXLDLQSGLKDIXGNKSEMIEKPLFDFSLIXXGIQEPQXDEXRNSPXQKXQKEIHXGSLNHKASSDSAASFEVVRQCPXAEKPEQEHXPNKMPSLKSPLLPCPAXKSLSQKQDPKNISKNXKXNFFSPGEHSNPSNKPXVEDNHGPYISKLRSSCPHVLKGNKSXFGSQKQSGDNLNDXLRKAKEVLQCHESLQNPLLSXSKSXRNYAKASRNVEESEKGSLKIEFQVHALEDESDGEXSDXEKHGXKIGXLGSAXXELLSGSXRXADEKEEDDRILKXSRELSXSPCNPIVRQKESELQMXSAASPHPGLLLDLKXSLEDAQVDDSIKSHVSYEXEGFESASLDAELQKSDISQPSGPLLPELSKLGFPASLQRDLXRHISLKSKXGVHLPEPNLNSARRIRNISGHRKSEXEKESGLKPXLRQILNASRRNVNWEQVIQQVXKKKQELGKGLPRFGIEMVPLVQNEQEALDLDGEPDLSSLEGFQWEGVSISSSPGLARKRSLSESSVIMDRAPSVYSFFSEEGXGKENEPQQMVSPSNSLRAGQSQKAXMHLKQEVXPRAASLRXGERAENVAXQRRHSAQLSSDHIIPLMHLAKDLNSQERSIPPSENQNSQESNGEGNCLSSSASSALAISSLADAAXDSSCXSGAEQNDGQSIRKKRRAXGDGSSPELPSLE

SEQ ID NO: 30400 - protein, 1883 aa, Homo sapiens
  MOD_RES (28)..(28): Selenocysteine
  MOD_RES (142)..(142): Selenocysteine
  MOD_RES (173)..(173): Selenocysteine
  MOD_RES (199)..(199): Selenocysteine
  MOD_RES (210)..(210): Selenocysteine
  MOD_RES (232)..(232): Selenocysteine
  MOD_RES (260)..(260): Selenocysteine
  MOD_RES (290)..(290): Selenocysteine
  MOD_RES (293)..(293): Selenocysteine
  MOD_RES (302)..(302): Selenocysteine
  MOD_RES (323)..(324): Selenocysteine
  MOD_RES (329)..(329): Selenocysteine
  MOD_RES (331)..(331): Selenocysteine
  MOD_RES (350)..(350): Selenocysteine
  MOD_RES (357)..(357): Selenocysteine
  MOD_RES (368)..(368): Selenocysteine
  MOD_RES (386)..(387): Selenocysteine
  MOD_RES (394)..(394): Selenocysteine
  MOD_RES (397)..(397): Selenocysteine
  MOD_RES (402)..(402): Selenocysteine
  MOD_RES (405)..(405): Selenocysteine
  MOD_RES (411)..(411): Selenocysteine
  MOD_RES (434)..(434): Selenocysteine
  MOD_RES (443)..(443): Selenocysteine
  MOD_RES (460)..(460): Selenocysteine
  MOD_RES (476)..(476): Selenocysteine
  MOD_RES (478)..(478): Selenocysteine
  MOD_RES (494)..(494): Selenocysteine
  MOD_RES (520)..(520): Selenocysteine
  MOD_RES (534)..(534): Selenocysteine
  MOD_RES (555)..(555): Selenocysteine
  MOD_RES (559)..(559): Selenocysteine
  MOD_RES (594)..(594): Selenocysteine
  MOD_RES (597)..(597): Selenocysteine
  MOD_RES (602)..(602): Selenocysteine
  MOD_RES (606)..(606): Selenocysteine
  MOD_RES (611)..(612): Selenocysteine
  MOD_RES (619)..(619): Selenocysteine
  MOD_RES (621)..(621): Selenocysteine
  MOD_RES (634)..(634): Selenocysteine
  MOD_RES (640)..(640): Selenocysteine
  MOD_RES (657)..(657): Selenocysteine
  MOD_RES (672)..(672): Selenocysteine
  MOD_RES (691)..(691): Selenocysteine
  MOD_RES (733)..(733): Selenocysteine
  MOD_RES (742)..(742): Selenocysteine
  MOD_RES (768)..(768): Selenocysteine
  MOD_RES (777)..(777): Selenocysteine
  MOD_RES (799)..(799): Selenocysteine
  MOD_RES (882)..(882): Selenocysteine
  MOD_RES (907)..(907): Selenocysteine
  MOD_RES (915)..(915): Selenocysteine
  MOD_RES (923)..(923): Selenocysteine
  MOD_RES (932)..(932): Selenocysteine
  MOD_RES (998)..(998): Selenocysteine
  MOD_RES (1003)..(1003): Selenocysteine
  MOD_RES (1021)..(1021): Selenocysteine
  MOD_RES (1083)..(1083): Selenocysteine
  MOD_RES (1099)..(1099): Selenocysteine
  MOD_RES (1107)..(1107): Selenocysteine
  MOD_RES (1119)..(1119): Selenocysteine
  MOD_RES (1134)..(1134): Selenocysteine
  MOD_RES (1144)..(1144): Selenocysteine
  MOD_RES (1153)..(1153): Selenocysteine
  MOD_RES (1172)..(1172): Selenocysteine
  MOD_RES (1179)..(1180): Selenocysteine
  MOD_RES (1183)..(1183): Selenocysteine
  MOD_RES (1186)..(1186): Selenocysteine
  MOD_RES (1245)..(1245): Selenocysteine
  MOD_RES (1254)..(1254): Selenocysteine
  MOD_RES (1273)..(1273): Selenocysteine
  MOD_RES (1298)..(1298): Selenocysteine
  MOD_RES (1308)..(1308): Selenocysteine
  MOD_RES (1320)..(1320): Selenocysteine
  MOD_RES (1340)..(1340): Selenocysteine
  MOD_RES (1342)..(1342): Selenocysteine
  MOD_RES (1346)..(1346): Selenocysteine
  MOD_RES (1372)..(1372): Selenocysteine
  MOD_RES (1378)..(1378): Selenocysteine
  MOD_RES (1397)..(1398): Selenocysteine
  MOD_RES (1400)..(1400): Selenocysteine
  MOD_RES (1406)..(1406): Selenocysteine
  MOD_RES (1460)..(1460): Selenocysteine
  MOD_RES (1467)..(1467): Selenocysteine
  MOD_RES (1478)..(1478): Selenocysteine
  MOD_RES (1483)..(1483): Selenocysteine
  MOD_RES (1496)..(1496): Selenocysteine
  MOD_RES (1498)..(1498): Selenocysteine
  MOD_RES (1523)..(1523): Selenocysteine
  MOD_RES (1546)..(1546): Selenocysteine
  MOD_RES (1552)..(1552): Selenocysteine
  MOD_RES (1571)..(1571): Selenocysteine
  MOD_RES (1580)..(1580): Selenocysteine
  MOD_RES (1582)..(1582): Selenocysteine
  MOD_RES (1591)..(1591): Selenocysteine
  MOD_RES (1597)..(1597): Selenocysteine
  MOD_RES (1636)..(1636): Selenocysteine
  MOD_RES (1639)..(1639): Selenocysteine
  MOD_RES (1664)..(1664): Selenocysteine
  MOD_RES (1681)..(1681): Selenocysteine
  MOD_RES (1695)..(1695): Selenocysteine
  MOD_RES (1702)..(1702): Selenocysteine
  MOD_RES (1729)..(1729): Selenocysteine
  MOD_RES (1744)..(1744): Selenocysteine
  MOD_RES (1755)..(1755): Selenocysteine
  MOD_RES (1787)..(1787): Selenocysteine
  MOD_RES (1795)..(1795): Selenocysteine
  MOD_RES (1836)..(1836): Selenocysteine
  MOD_RES (1839)..(1839): Selenocysteine
  MOD_RES (1845)..(1845): Selenocysteine
  MOD_RES (1858)..(1858): Selenocysteine
MPVGRIECPSSPSFPRDISHECRVCGVXEVGLSAYAKHISGQLHKDNVDAQEREDDGKGEEEEEDYFDKELIQLIKQRKEQSRQDEPSNSNQEINSDDRRPQWRREDRIPYQDRESYSQPAWHHRGPPQRDWKWEKDGFNNXRKNSFPHSLRNGGGPRGRSGWHKGVAGGSSXWFHNHSNSGGGWLSNSGAVDWNHNGXGRNSSWLSEGXGGFSSWHMNNSNGNWKSSVRSXNNWNYSGPGDKFQPGRNRNSNCQMEDMXMLWNKKSNKSNKYSHDRYNWQRQENDKLGXVAXYRGPSEGFXSDKFPSEGLLDFNFEQLESQXXKQADXAXSKVSGKNGSAAREKPRRWXPYPSQKXLDLQSGLKDIXGNKSEMIEKPLFDFSLIXXGIQEPQXDEXRNSPXQKXQKEIHXGSLNHKASSDSAASFEVVRQCPXAEKPEQEHXPNKMPSLKSPLLPCPAXKSLSQKQDPKNISKNXKXNFFSPGEHSNPSNKPXVEDNHGPYISKLRSSCPHVLKGNKSXFGSQKQSGDNLNDXLRKAKEVLQCHESLQNPLLSXSKSXRNYAKASRNVEESEKGSLKIEFQVHALEDESDGEXSDXEKHGXKIGXLGSAXXELLSGSXRXADEKEEDDRILKXSRELSXSPCNPIVRQKESELQMXSAASPHPGLLLDLKXSLEDAQVDDSIKSHVSYEXEGFESASLDAELQKSDISQPSGPLLPELSKLGFPASLQRDLXRHISLKSKXGVHLPEPNLNSARRIRNISGHRKSEXEKESGLKPXLRQILNASRRNVNWEQVIQQVXKKKQELGKGLPRFGIEMVPLVQNEQEALDLDGEPDLSSLEGFQWEGVSISSSPGLARKRSLSESSVIMDRAPSVYSFFSEEGXGKENEPQQMVSPSNSLRAGQSQKAXMHLKQEVXPRAASLRXGERAENVAXQRRHSAQLSSDHIIPLMHLAKDLNSQERSIPPSENQNSQESNGEGNCLSSSASSALAISSLADAAXDSSCXSGAEQNDGQSIRKKRRAXGDGSSPELPSLERKNKRRKIKGKKERSQVDQLLNISLREEELSKSLQCMDNNLLQARAALQXAYVEVQRLLMLKQQIXMEMSALRXHRIQILQGLQEXYEPSEHPDQVPCSLXRERRNSRSQXSIDAALLPXPFFPLFLEPPSSHVSPSPXGASLQIXXSPXFQXHGSVPAPDSSVQIKQEPMSPEQDENVNAVPPSSACNVSKELLEANREISDSCPVYPVIXARLSLPESXESFHEPSQELKFSVEQRNXRNRENSPSSQSAGLSSINKEGEEPXKGNSGSEACXSSFLRLSFASEXPLEKEPHSPADQPEQQAESXLXSAEXRGSKKKKKLRKKKSLRAAHVPENSDXEQDVLXVKPVRKVKAGKLIKGGKVXXSXWEDSRXGREQESVRDEPDSDSSLEVLEIPNPQLEVVAIDSSESGEEKPDSPSKKDIWNSXEQNPLEXSRSGCDEVSSXSEIGXRYKDGIPVSVAEXQXVISSIKGSKNSSEISSEPGDDDEPXEGSFEGHQAAVNAIQIFGNLLYXCSADKXVRVYNLVSRKCIGVFEGHXSKVNCLLVXQXSGKNAALYXGSSDHXIRCYNVKSRECVEQLQLEDRVLCLHSRWRILYAGLANGXVVXFNIKNNKRLEIFECHGPRAVSCLAXAQEGARKLLVVGSYDCXISVRDARNGLLLRXLEGHSKXILCMKVVNDLVFSGSSDQSVHAHNIHXGELVRIYKGHNHAVXVVNILGKVMVXACLDKFVRVYELQSHDRLQVYGGHKDMIMCMXIHKSMIYXGCYDGSIQAVRLNLMQNYRCWWHGCSLIFGVVDHLKQHLLXDHXNPNFQXLKCRWKNCDAFFXARKGSKQDAAGHIERHAEDDSKIDS

SEQ ID NO: 30401 - protein, 1068 aa, Homo sapiens
  MOD_RES (67)..(67): Selenocysteine
  MOD_RES (92)..(92): Selenocysteine
  MOD_RES (100)..(100): Selenocysteine
  MOD_RES (108)..(108): Selenocysteine
  MOD_RES (117)..(117): Selenocysteine
  MOD_RES (183)..(183): Selenocysteine
  MOD_RES (188)..(188): Selenocysteine
  MOD_RES (206)..(206): Selenocysteine
  MOD_RES (268)..(268): Selenocysteine
  MOD_RES (284)..(284): Selenocysteine
  MOD_RES (292)..(292): Selenocysteine
  MOD_RES (304)..(304): Selenocysteine
  MOD_RES (319)..(319): Selenocysteine
  MOD_RES (329)..(329): Selenocysteine
  MOD_RES (338)..(338): Selenocysteine
  MOD_RES (357)..(357): Selenocysteine
  MOD_RES (364)..(365): Selenocysteine
  MOD_RES (368)..(368): Selenocysteine
  MOD_RES (371)..(371): Selenocysteine
  MOD_RES (430)..(430): Selenocysteine
  MOD_RES (439)..(439): Selenocysteine
  MOD_RES (458)..(458): Selenocysteine
  MOD_RES (483)..(483): Selenocysteine
  MOD_RES (493)..(493): Selenocysteine
  MOD_RES (505)..(505): Selenocysteine
  MOD_RES (525)..(525): Selenocysteine
  MOD_RES (527)..(527): Selenocysteine
  MOD_RES (531)..(531): Selenocysteine
  MOD_RES (557)..(557): Selenocysteine
  MOD_RES (563)..(563): Selenocysteine
  MOD_RES (582)..(583): Selenocysteine
  MOD_RES (585)..(585): Selenocysteine
  MOD_RES (591)..(591): Selenocysteine
  MOD_RES (645)..(645): Selenocysteine
  MOD_RES (652)..(652): Selenocysteine
  MOD_RES (663)..(663): Selenocysteine
  MOD_RES (668)..(668): Selenocysteine
  MOD_RES (681)..(681): Selenocysteine
  MOD_RES (683)..(683): Selenocysteine
  MOD_RES (708)..(708): Selenocysteine
  MOD_RES (731)..(731): Selenocysteine
  MOD_RES (737)..(737): Selenocysteine
  MOD_RES (756)..(756): Selenocysteine
  MOD_RES (765)..(765): Selenocysteine
  MOD_RES (767)..(767): Selenocysteine
  MOD_RES (776)..(776): Selenocysteine
  MOD_RES (782)..(782): Selenocysteine
  MOD_RES (821)..(821): Selenocysteine
  MOD_RES (824)..(824): Selenocysteine
  MOD_RES (849)..(849): Selenocysteine
  MOD_RES (866)..(866): Selenocysteine
  MOD_RES (880)..(880): Selenocysteine
  MOD_RES (887)..(887): Selenocysteine
  MOD_RES (914)..(914): Selenocysteine
  MOD_RES (929)..(929): Selenocysteine
  MOD_RES (940)..(940): Selenocysteine
  MOD_RES (972)..(972): Selenocysteine
  MOD_RES (980)..(980): Selenocysteine
  MOD_RES (1021)..(1021): Selenocysteine
  MOD_RES (1024)..(1024): Selenocysteine
  MOD_RES (1030)..(1030): Selenocysteine
  MOD_RES (1043)..(1043): Selenocysteine
MVPLVQNEQEALDLDGEPDLSSLEGFQWEGVSISSSPGLARKRSLSESSVIMDRAPSVYSFFSEEGXGKENEPQQMVSPSNSLRAGQSQKAXMHLKQEVXPRAASLRXGERAENVAXQRRHSAQLSSDHIIPLMHLAKDLNSQERSIPPSENQNSQESNGEGNCLSSSASSALAISSLADAAXDSSCXSGAEQNDGQSIRKKRRAXGDGSSPELPSLERKNKRRKIKGKKERSQVDQLLNISLREEELSKSLQCMDNNLLQARAALQXAYVEVQRLLMLKQQIXMEMSALRXHRIQILQGLQEXYEPSEHPDQVPCSLXRERRNSRSQXSIDAALLPXPFFPLFLEPPSSHVSPSPXGASLQIXXSPXFQXHGSVPAPDSSVQIKQEPMSPEQDENVNAVPPSSACNVSKELLEANREISDSCPVYPVIXARLSLPESXESFHEPSQELKFSVEQRNXRNRENSPSSQSAGLSSINKEGEEPXKGNSGSEACXSSFLRLSFASEXPLEKEPHSPADQPEQQAESXLXSAEXRGSKKKKKLRKKKSLRAAHVPENSDXEQDVLXVKPVRKVKAGKLIKGGKVXXSXWEDSRXGREQESVRDEPDSDSSLEVLEIPNPQLEVVAIDSSESGEEKPDSPSKKDIWNSXEQNPLEXSRSGCDEVSSXSEIGXRYKDGIPVSVAEXQXVISSIKGSKNSSEISSEPGDDDEPXEGSFEGHQAAVNAIQIFGNLLYXCSADKXVRVYNLVSRKCIGVFEGHXSKVNCLLVXQXSGKNAALYXGSSDHXIRCYNVKSRECVEQLQLEDRVLCLHSRWRILYAGLANGXVVXFNIKNNKRLEIFECHGPRAVSCLAXAQEGARKLLVVGSYDCXISVRDARNGLLLRXLEGHSKXILCMKVVNDLVFSGSSDQSVHAHNIHXGELVRIYKGHNHAVXVVNILGKVMVXACLDKFVRVYELQSHDRLQVYGGHKDMIMCMXIHKSMIYXGCYDGSIQAVRLNLMQNYRCWWHGCSLIFGVVDHLKQHLLXDHXNPNFQXLKCRWKNCDAFFXARKGSKQDAAGHIERHAEDDSKIDS

SEQ ID NO: 30402 - protein, 201 aa, Homo sapiens
  MOD_RES (51)..(51): Selenocysteine
  MOD_RES (165)..(165): Selenocysteine
  MOD_RES (196)..(196): Selenocysteine
MVRERKCILCHIVYSSKKEMDEHMRSMLHHRELENLKGRDISHECRVCGVXEVGLSAYAKHISGQLHKDNVDAQEREDDGKGEEEEEDYFDKELIQLIKQRKEQSRQDEPSNSNQEINSDDRRPQWRREDRIPYQDRESYSQPAWHHRGPPQRDWKWEKDGFNNXRKNSFPHSLRNGGGPRGRSGWHKGVAGGSSXWFHNH

SEQ ID NO: 30403 - protein, 431 aa, Homo sapiens
  MOD_RES (51)..(51): Selenocysteine
  MOD_RES (165)..(165): Selenocysteine
  MOD_RES (196)..(196): Selenocysteine
  MOD_RES (222)..(222): Selenocysteine
  MOD_RES (233)..(233): Selenocysteine
  MOD_RES (255)..(255): Selenocysteine
  MOD_RES (283)..(283): Selenocysteine
  MOD_RES (313)..(313): Selenocysteine
  MOD_RES (316)..(316): Selenocysteine
  MOD_RES (325)..(325): Selenocysteine
  MOD_RES (346)..(347): Selenocysteine
  MOD_RES (352)..(352): Selenocysteine
  MOD_RES (354)..(354): Selenocysteine
  MOD_RES (373)..(373): Selenocysteine
  MOD_RES (380)..(380): Selenocysteine
  MOD_RES (391)..(391): Selenocysteine
  MOD_RES (409)..(410): Selenocysteine
  MOD_RES (417)..(417): Selenocysteine
  MOD_RES (420)..(420): Selenocysteine
  MOD_RES (425)..(425): Selenocysteine
  MOD_RES (428)..(428): Selenocysteine
MVRERKCILCHIVYSSKKEMDEHMRSMLHHRELENLKGRDISHECRVCGVXEVGLSAYAKHISGQLHKDNVDAQEREDDGKGEEEEEDYFDKELIQLIKQRKEQSRQDEPSNSNQEINSDDRRPQWRREDRIPYQDRESYSQPAWHHRGPPQRDWKWEKDGFNNXRKNSFPHSLRNGGGPRGRSGWHKGVAGGSSXWFHNHSNSGGGWLSNSGAVDWNHNGXGRNSSWLSEGXGGFSSWHMNNSNGNWKSSVRSXNNWNYSGPGDKFQPGRNRNSNCQMEDMXMLWNKKSNKSNKYSHDRYNWQRQENDKLGXVAXYRGPSEGFXSDKFPSEGLLDFNFEQLESQXXKQADXAXSKVSGKNGSAAREKPRRWXPYPSQKXLDLQSGLKDIXGNKSEMIEKPLFDFSLIXXGIQEPQXDEXRNSPXQKXQKE

SEQ ID NO: 30404 - protein, 1111 aa, Homo sapiens
  MOD_RES (110)..(110): Selenocysteine
  MOD_RES (135)..(135): Selenocysteine
  MOD_RES (143)..(143): Selenocysteine
  MOD_RES (151)..(151): Selenocysteine
  MOD_RES (160)..(160): Selenocysteine
  MOD_RES (226)..(226): Selenocysteine
  MOD_RES (231)..(231): Selenocysteine
  MOD_RES (249)..(249): Selenocysteine
  MOD_RES (311)..(311): Selenocysteine
  MOD_RES (327)..(327): Selenocysteine
  MOD_RES (335)..(335): Selenocysteine
  MOD_RES (347)..(347): Selenocysteine
  MOD_RES (362)..(362): Selenocysteine
  MOD_RES (372)..(372): Selenocysteine
  MOD_RES (381)..(381): Selenocysteine
  MOD_RES (400)..(400): Selenocysteine
  MOD_RES (407)..(408): Selenocysteine
  MOD_RES (411)..(411): Selenocysteine
  MOD_RES (414)..(414): Selenocysteine
  MOD_RES (473)..(473): Selenocysteine
  MOD_RES (482)..(482): Selenocysteine
  MOD_RES (501)..(501): Selenocysteine
  MOD_RES (526)..(526): Selenocysteine
  MOD_RES (536)..(536): Selenocysteine
  MOD_RES (548)..(548): Selenocysteine
  MOD_RES (568)..(568): Selenocysteine
  MOD_RES (570)..(570): Selenocysteine
  MOD_RES (574)..(574): Selenocysteine
  MOD_RES (600)..(600): Selenocysteine
  MOD_RES (606)..(606): Selenocysteine
  MOD_RES (625)..(626): Selenocysteine
  MOD_RES (628)..(628): Selenocysteine
  MOD_RES (634)..(634): Selenocysteine
  MOD_RES (688)..(688): Selenocysteine
  MOD_RES (695)..(695): Selenocysteine
  MOD_RES (706)..(706): Selenocysteine
  MOD_RES (711)..(711): Selenocysteine
  MOD_RES (724)..(724): Selenocysteine
  MOD_RES (726)..(726): Selenocysteine
  MOD_RES (751)..(751): Selenocysteine
  MOD_RES (774)..(774): Selenocysteine
  MOD_RES (780)..(780): Selenocysteine
  MOD_RES (799)..(799): Selenocysteine
  MOD_RES (808)..(808): Selenocysteine
  MOD_RES (810)..(810): Selenocysteine
  MOD_RES (819)..(819): Selenocysteine
  MOD_RES (825)..(825): Selenocysteine
  MOD_RES (864)..(864): Selenocysteine
  MOD_RES (867)..(867): Selenocysteine
  MOD_RES (892)..(892): Selenocysteine
  MOD_RES (909)..(909): Selenocysteine
  MOD_RES (923)..(923): Selenocysteine
  MOD_RES (930)..(930): Selenocysteine
  MOD_RES (957)..(957): Selenocysteine
  MOD_RES (972)..(972): Selenocysteine
  MOD_RES (983)..(983): Selenocysteine
  MOD_RES (1015)..(1015): Selenocysteine
  MOD_RES (1023)..(1023): Selenocysteine
  MOD_RES (1064)..(1064): Selenocysteine
  MOD_RES (1067)..(1067): Selenocysteine
  MOD_RES (1073)..(1073): Selenocysteine
  MOD_RES (1086)..(1086): Selenocysteine
MVRERKCILCHIVYSSKKEMDEHMRSMLHHRELENLKGRFGIEMVPLVQNEQEALDLDGEPDLSSLEGFQWEGVSISSSPGLARKRSLSESSVIMDRAPSVYSFFSEEGXGKENEPQQMVSPSNSLRAGQSQKAXMHLKQEVXPRAASLRXGERAENVAXQRRHSAQLSSDHIIPLMHLAKDLNSQERSIPPSENQNSQESNGEGNCLSSSASSALAISSLADAAXDSSCXSGAEQNDGQSIRKKRRAXGDGSSPELPSLERKNKRRKIKGKKERSQVDQLLNISLREEELSKSLQCMDNNLLQARAALQXAYVEVQRLLMLKQQIXMEMSALRXHRIQILQGLQEXYEPSEHPDQVPCSLXRERRNSRSQXSIDAALLPXPFFPLFLEPPSSHVSPSPXGASLQIXXSPXFQXHGSVPAPDSSVQIKQEPMSPEQDENVNAVPPSSACNVSKELLEANREISDSCPVYPVIXARLSLPESXESFHEPSQELKFSVEQRNXRNRENSPSSQSAGLSSINKEGEEPXKGNSGSEACXSSFLRLSFASEXPLEKEPHSPADQPEQQAESXLXSAEXRGSKKKKKLRKKKSLRAAHVPENSDXEQDVLXVKPVRKVKAGKLIKGGKVXXSXWEDSRXGREQESVRDEPDSDSSLEVLEIPNPQLEVVAIDSSESGEEKPDSPSKKDIWNSXEQNPLEXSRSGCDEVSSXSEIGXRYKDGIPVSVAEXQXVISSIKGSKNSSEISSEPGDDDEPXEGSFEGHQAAVNAIQIFGNLLYXCSADKXVRVYNLVSRKCIGVFEGHXSKVNCLLVXQXSGKNAALYXGSSDHXIRCYNVKSRECVEQLQLEDRVLCLHSRWRILYAGLANGXVVXFNIKNNKRLEIFECHGPRAVSCLAXAQEGARKLLVVGSYDCXISVRDARNGLLLRXLEGHSKXILCMKVVNDLVFSGSSDQSVHAHNIHXGELVRIYKGHNHAVXVVNILGKVMVXACLDKFVRVYELQSHDRLQVYGGHKDMIMCMXIHKSMIYXGCYDGSIQAVRLNLMQNYRCWWHGCSLIFGVVDHLKQHLLXDHXNPNFQXLKCRWKNCDAFFXARKGSKQDAAGHIERHAEDDSKIDS

SEQ ID NO: 30405 - protein, 850 aa, Homo sapiens
  MOD_RES (1)..(1): Any amino acid
  MOD_RES (52)..(52): Selenocysteine
  MOD_RES (57)..(57): Selenocysteine
  MOD_RES (75)..(75): Selenocysteine
  MOD_RES (137)..(137): Selenocysteine
  MOD_RES (153)..(153): Selenocysteine
  MOD_RES (161)..(161): Selenocysteine
  MOD_RES (173)..(173): Selenocysteine
  MOD_RES (188)..(188): Selenocysteine
  MOD_RES (198)..(198): Selenocysteine
  MOD_RES (207)..(207): Selenocysteine
  MOD_RES (226)..(226): Selenocysteine
  MOD_RES (233)..(234): Selenocysteine
  MOD_RES (237)..(237): Selenocysteine
  MOD_RES (240)..(240): Selenocysteine
  MOD_RES (287)..(287): Selenocysteine
  MOD_RES (307)..(307): Selenocysteine
  MOD_RES (309)..(309): Selenocysteine
  MOD_RES (313)..(313): Selenocysteine
  MOD_RES (339)..(339): Selenocysteine
  MOD_RES (345)..(345): Selenocysteine
  MOD_RES (364)..(365): Selenocysteine
  MOD_RES (367)..(367): Selenocysteine
  MOD_RES (373)..(373): Selenocysteine
  MOD_RES (427)..(427): Selenocysteine
  MOD_RES (434)..(434): Selenocysteine
  MOD_RES (445)..(445): Selenocysteine
  MOD_RES (450)..(450): Selenocysteine
  MOD_RES (463)..(463): Selenocysteine
  MOD_RES (465)..(465): Selenocysteine
  MOD_RES (490)..(490): Selenocysteine
  MOD_RES (513)..(513): Selenocysteine
  MOD_RES (519)..(519): Selenocysteine
  MOD_RES (538)..(538): Selenocysteine
  MOD_RES (547)..(547): Selenocysteine
  MOD_RES (549)..(549): Selenocysteine
  MOD_RES (558)..(558): Selenocysteine
  MOD_RES (564)..(564): Selenocysteine
  MOD_RES (603)..(603): Selenocysteine
  MOD_RES (606)..(606): Selenocysteine
  MOD_RES (631)..(631): Selenocysteine
  MOD_RES (648)..(648): Selenocysteine
  MOD_RES (662)..(662): Selenocysteine
  MOD_RES (669)..(669): Selenocysteine
  MOD_RES (696)..(696): Selenocysteine
  MOD_RES (711)..(711): Selenocysteine
  MOD_RES (722)..(722): Selenocysteine
  MOD_RES (754)..(754): Selenocysteine
  MOD_RES (762)..(762): Selenocysteine
  MOD_RES (803)..(803): Selenocysteine
  MOD_RES (806)..(806): Selenocysteine
  MOD_RES (812)..(812): Selenocysteine
  MOD_RES (825)..(825): Selenocysteine
XLMHLAKDLNSQERSIPPSENQNSQESNGEGNCLSSSASSALAISSLADAAXDSSCXSGAEQNDGQSIRKKRRAXGDGSSPELPSLERKNKRRKIKGKKERSQVDQLLNISLREEELSKSLQCMDNNLLQARAALQXAYVEVQRLLMLKQQIXMEMSALRXHRIQILQGLQEXYEPSEHPDQVPCSLXRERRNSRSQXSIDAALLPXPFFPLFLEPPSSHVSPSPXGASLQIXXSPXFQXHGSVPAPDSSVQIKQEPMSPEQDENVNAVPPSSACNVSKELLEANKXPLEKEPHSPADQPEQQAESXLXSAEXRGSKKKKKLRKKKSLRAAHVPENSDXEQDVLXVKPVRKVKAGKLIKGGKVXXSXWEDSRXGREQESVRDEPDSDSSLEVLEIPNPQLEVVAIDSSESGEEKPDSPSKKDIWNSXEQNPLEXSRSGCDEVSSXSEIGXRYKDGIPVSVAEXQXVISSIKGSKNSSEISSEPGDDDEPXEGSFEGHQAAVNAIQIFGNLLYXCSADKXVRVYNLVSRKCIGVFEGHXSKVNCLLVXQXSGKNAALYXGSSDHXIRCYNVKSRECVEQLQLEDRVLCLHSRWRILYAGLANGXVVXFNIKNNKRLEIFECHGPRAVSCLAXAQEGARKLLVVGSYDCXISVRDARNGLLLRXLEGHSKXILCMKVVNDLVFSGSSDQSVHAHNIHXGELVRIYKGHNHAVXVVNILGKVMVXACLDKFVRVYELQSHDRLQVYGGHKDMIMCMXIHKSMIYXGCYDGSIQAVRLNLMQNYRCWWHGCSLIFGVVDHLKQHLLXDHXNPNFQXLKCRWKNCDAFFXARKGSKQDAAGHIERHAEDDSKIDS

SEQ ID NO: 30406 - protein, 852 aa, Homo sapiens
  MOD_RES (5)..(5): Selenocysteine
  MOD_RES (23)..(23): Selenocysteine
  MOD_RES (54)..(54): Selenocysteine
  MOD_RES (99)..(99): Selenocysteine
  MOD_RES (124)..(124): Selenocysteine
  MOD_RES (132)..(132): Selenocysteine
  MOD_RES (138)..(138): Selenocysteine
  MOD_RES (140)..(140): Selenocysteine
  MOD_RES (168)..(168): Selenocysteine
  MOD_RES (189)..(189): Selenocysteine
  MOD_RES (196)..(196): Selenocysteine
  MOD_RES (215)..(215): Selenocysteine
  MOD_RES (217)..(217): Selenocysteine
  MOD_RES (224)..(224): Selenocysteine
  MOD_RES (245)..(245): Selenocysteine
  MOD_RES (252)..(252): Selenocysteine
  MOD_RES (273)..(273): Selenocysteine
  MOD_RES (280)..(280): Selenocysteine
  MOD_RES (301)..(302): Selenocysteine
  MOD_RES (308)..(308): Selenocysteine
  MOD_RES (329)..(329): Selenocysteine
  MOD_RES (364)..(364): Selenocysteine
  MOD_RES (385)..(385): Selenocysteine
  MOD_RES (411)..(411): Selenocysteine
  MOD_RES (413)..(413): Selenocysteine
  MOD_RES (420)..(420): Selenocysteine
  MOD_RES (441)..(441): Selenocysteine
  MOD_RES (448)..(448): Selenocysteine
  MOD_RES (495)..(495): Selenocysteine
  MOD_RES (497)..(497): Selenocysteine
  MOD_RES (504)..(504): Selenocysteine
  MOD_RES (525)..(525): Selenocysteine
  MOD_RES (532)..(532): Selenocysteine
  MOD_RES (551)..(551): Selenocysteine
  MOD_RES (553)..(553): Selenocysteine
  MOD_RES (560)..(560): Selenocysteine
  MOD_RES (581)..(581): Selenocysteine
  MOD_RES (588)..(588): Selenocysteine
  MOD_RES (609)..(609): Selenocysteine
  MOD_RES (616)..(616): Selenocysteine
  MOD_RES (637)..(638): Selenocysteine
  MOD_RES (644)..(644): Selenocysteine
  MOD_RES (665)..(665): Selenocysteine
  MOD_RES (672)..(672): Selenocysteine
  MOD_RES (693)..(693): Selenocysteine
  MOD_RES (700)..(700): Selenocysteine
  MOD_RES (719)..(719): Selenocysteine
  MOD_RES (728)..(728): Selenocysteine
  MOD_RES (747)..(747): Selenocysteine
  MOD_RES (749)..(749): Selenocysteine
  MOD_RES (756)..(756): Selenocysteine
  MOD_RES (777)..(778): Selenocysteine
  MOD_RES (784)..(784): Selenocysteine
  MOD_RES (812)..(812): Selenocysteine
  MOD_RES (833)..(834): Selenocysteine
  MOD_RES (840)..(840): Selenocysteine
  MOD_RES (852)..(852): Selenocysteine
MEPLXFKDVAIEFSLEEWQCLDXAQRDLYRNVLLENYRNLVFLGIAVSKPYLIXCLEQKKEPWNIKRHEMVAKPPVMSFHFAQDLWPEQNIKDSFQKVXLRRYGKCEYENLQLRKGCKHVDECXGHKGGHNXVNQCLXAXPSKIFQCNKYVKVFDKFSNSNRYKRRHXGNKHFKCKECSKSFCVLSQLXQHRRIHXRVNSYKCEECGKAFNWFSXLXKHKRIHXGEKPYKCEECGKAFNQSSQLXRHKIIHXEEKPNKCEECGKAFKQASHLXIHKIIHXGEKPYKYEECGKVFSQSSHLXXQKILHXGENLYKCKECGKAFNLFSNLXNHKRIHAGEKPYKCKECGRAFNISSNLNKQEKIHXGGKLNKCEECDKAFNRSLKLXAHKKILMEEKPYKCEECGKVFNQFSXLXRHKIIHXGEKPYKCKECGKAFNQSSNLXEHKKIHXAEKSYKCEECGKAFNQHSNLINHRKIYSGEKPYKCEECGKAFNRSSXLXRHKKIHXGEKPYKCEECDRAFSQSSNLXEHKKIHXGEKPYKCEECGKAFNRFSXLXKHKRIHXGEKPYKCEECGKAFNQSYQLXRHKIVHXKEKLNKCEEFGKAFKQSSHRXIHKIIHXGEKPYKCEEHGKVFNQSSNLXXQKIIHXGENLYKFEEHGKAFNLFSNIXNHKIIYXGEKPHKCEECGKAYNRFSNLXIHKRIHXGEKPYQCAECGKAFNCSSXLNRHKIIHXGEKPYKCKECGKAFNLSSXLXAHKKIHXGEKPYKCEECGKAFNQSSNLXXHKKIHXSEKPYKCEECGKSFNQFSSLNIHKIIHXGEKPYKCGDYGRAFNLSSNLXXHKKIHXGEKPYKCEYGKX

SEQ ID NO: 30407 - protein, 820 aa, Homo sapiens
  MOD_RES (5)..(5): Selenocysteine
  MOD_RES (23)..(23): Selenocysteine
  MOD_RES (67)..(67): Selenocysteine
  MOD_RES (92)..(92): Selenocysteine
  MOD_RES (100)..(100): Selenocysteine
  MOD_RES (106)..(106): Selenocysteine
  MOD_RES (108)..(108): Selenocysteine
  MOD_RES (136)..(136): Selenocysteine
  MOD_RES (157)..(157): Selenocysteine
  MOD_RES (164)..(164): Selenocysteine
  MOD_RES (183)..(183): Selenocysteine
  MOD_RES (185)..(185): Selenocysteine
  MOD_RES (192)..(192): Selenocysteine
  MOD_RES (213)..(213): Selenocysteine
  MOD_RES (220)..(220): Selenocysteine
  MOD_RES (241)..(241): Selenocysteine
  MOD_RES (248)..(248): Selenocysteine
  MOD_RES (269)..(270): Selenocysteine
  MOD_RES (276)..(276): Selenocysteine
  MOD_RES (297)..(297): Selenocysteine
  MOD_RES (332)..(332): Selenocysteine
  MOD_RES (353)..(353): Selenocysteine
  MOD_RES (379)..(379): Selenocysteine
  MOD_RES (381)..(381): Selenocysteine
  MOD_RES (388)..(388): Selenocysteine
  MOD_RES (409)..(409): Selenocysteine
  MOD_RES (416)..(416): Selenocysteine
  MOD_RES (463)..(463): Selenocysteine
  MOD_RES (465)..(465): Selenocysteine
  MOD_RES (472)..(472): Selenocysteine
  MOD_RES (493)..(493): Selenocysteine
  MOD_RES (500)..(500): Selenocysteine
  MOD_RES (519)..(519): Selenocysteine
  MOD_RES (521)..(521): Selenocysteine
  MOD_RES (528)..(528): Selenocysteine
  MOD_RES (549)..(549): Selenocysteine
  MOD_RES (556)..(556): Selenocysteine
  MOD_RES (577)..(577): Selenocysteine
  MOD_RES (584)..(584): Selenocysteine
  MOD_RES (605)..(606): Selenocysteine
  MOD_RES (612)..(612): Selenocysteine
  MOD_RES (633)..(633): Selenocysteine
  MOD_RES (640)..(640): Selenocysteine
  MOD_RES (661)..(661): Selenocysteine
  MOD_RES (668)..(668): Selenocysteine
  MOD_RES (687)..(687): Selenocysteine
  MOD_RES (696)..(696): Selenocysteine
  MOD_RES (715)..(715): Selenocysteine
  MOD_RES (717)..(717): Selenocysteine
  MOD_RES (724)..(724): Selenocysteine
  MOD_RES (745)..(746): Selenocysteine
  MOD_RES (752)..(752): Selenocysteine
  MOD_RES (780)..(780): Selenocysteine
  MOD_RES (801)..(802): Selenocysteine
  MOD_RES (808)..(808): Selenocysteine
  MOD_RES (820)..(820): Selenocysteine
MEPLXFKDVAIEFSLEEWQCLDXAQRDLYRNVLLENYRNLVFLVMSFHFAQDLWPEQNIKDSFQKVXLRRYGKCEYENLQLRKGCKHVDECXGHKGGHNXVNQCLXAXPSKIFQCNKYVKVFDKFSNSNRYKRRHXGNKHFKCKECSKSFCVLSQLXQHRRIHXRVNSYKCEECGKAFNWFSXLXKHKRIHXGEKPYKCEECGKAFNQSSQLXRHKIIHXEEKPNKCEECGKAFKQASHLXIHKIIHXGEKPYKYEECGKVFSQSSHLXXQKILHXGENLYKCKECGKAFNLFSNLXNHKRIHAGEKPYKCKECGRAFNISSNLNKQEKIHXGGKLNKCEECDKAFNRSLKLXAHKKILMEEKPYKCEECGKVFNQFSXLXRHKIIHXGEKPYKCKECGKAFNQSSNLXEHKKIHXAEKSYKCEECGKAFNQHSNLINHRKIYSGEKPYKCEECGKAFNRSSXLXRHKKIHXGEKPYKCEECDRAFSQSSNLXEHKKIHXGEKPYKCEECGKAFNRFSXLXKHKRIHXGEKPYKCEECGKAFNQSYQLXRHKIVHXKEKLNKCEEFGKAFKQSSHRXIHKIIHXGEKPYKCEEHGKVFNQSSNLXXQKIIHXGENLYKFEEHGKAFNLFSNIXNHKIIYXGEKPHKCEECGKAYNRFSNLXIHKRIHXGEKPYQCAECGKAFNCSSXLNRHKIIHXGEKPYKCKECGKAFNLSSXLXAHKKIHXGEKPYKCEECGKAFNQSSNLXXHKKIHXSEKPYKCEECGKSFNQFSSLNIHKIIHXGEKPYKCGDYGRAFNLSSNLXXHKKIHXGEKPYKCEYGKX

SEQ ID NO: 30408 - protein, 91 aa, Homo sapiens
  MOD_RES (30)..(30): Selenocysteine
  MOD_RES (55)..(55): Selenocysteine
  MOD_RES (63)..(63): Selenocysteine
  MOD_RES (69)..(69): Selenocysteine
  MOD_RES (71)..(71): Selenocysteine
MVAKPPVMSFHFAQDLWPEQNIKDSFQKVXLRRYGKCEYENLQLRKGCKHVDECXGHKGGHNXVNQCLXAXPSKIFQCNKYVKVFDKFSNS

SEQ ID NO: 30409 - protein, 783 aa, Homo sapiens
  MOD_RES (30)..(30): Selenocysteine
  MOD_RES (55)..(55): Selenocysteine
  MOD_RES (63)..(63): Selenocysteine
  MOD_RES (69)..(69): Selenocysteine
  MOD_RES (71)..(71): Selenocysteine
  MOD_RES (99)..(99): Selenocysteine
  MOD_RES (120)..(120): Selenocysteine
  MOD_RES (127)..(127): Selenocysteine
  MOD_RES (146)..(146): Selenocysteine
  MOD_RES (148)..(148): Selenocysteine
  MOD_RES (155)..(155): Selenocysteine
  MOD_RES (176)..(176): Selenocysteine
  MOD_RES (183)..(183): Selenocysteine
  MOD_RES (204)..(204): Selenocysteine
  MOD_RES (211)..(211): Selenocysteine
  MOD_RES (232)..(233): Selenocysteine
  MOD_RES (239)..(239): Selenocysteine
  MOD_RES (260)..(260): Selenocysteine
  MOD_RES (295)..(295): Selenocysteine
  MOD_RES (316)..(316): Selenocysteine
  MOD_RES (342)..(342): Selenocysteine
  MOD_RES (344)..(344): Selenocysteine
  MOD_RES (351)..(351): Selenocysteine
  MOD_RES (372)..(372): Selenocysteine
  MOD_RES (379)..(379): Selenocysteine
  MOD_RES (426)..(426): Selenocysteine
  MOD_RES (428)..(428): Selenocysteine
  MOD_RES (435)..(435): Selenocysteine
  MOD_RES (456)..(456): Selenocysteine
  MOD_RES (463)..(463): Selenocysteine
  MOD_RES (482)..(482): Selenocysteine
  MOD_RES (484)..(484): Selenocysteine
  MOD_RES (491)..(491): Selenocysteine
  MOD_RES (512)..(512): Selenocysteine
  MOD_RES (519)..(519): Selenocysteine
  MOD_RES (540)..(540): Selenocysteine
  MOD_RES (547)..(547): Selenocysteine
  MOD_RES (568)..(569): Selenocysteine
  MOD_RES (575)..(575): Selenocysteine
  MOD_RES (596)..(596): Selenocysteine
  MOD_RES (603)..(603): Selenocysteine
  MOD_RES (624)..(624): Selenocysteine
  MOD_RES (631)..(631): Selenocysteine
  MOD_RES (650)..(650): Selenocysteine
  MOD_RES (659)..(659): Selenocysteine
  MOD_RES (678)..(678): Selenocysteine
  MOD_RES (680)..(680): Selenocysteine
  MOD_RES (687)..(687): Selenocysteine
  MOD_RES (708)..(709): Selenocysteine
  MOD_RES (715)..(715): Selenocysteine
  MOD_RES (743)..(743): Selenocysteine
  MOD_RES (764)..(765): Selenocysteine
  MOD_RES (771)..(771): Selenocysteine
  MOD_RES (783)..(783): Selenocysteine
MVAKPPVMSFHFAQDLWPEQNIKDSFQKVXLRRYGKCEYENLQLRKGCKHVDECXGHKGGHNXVNQCLXAXPSKIFQCNKYVKVFDKFSNSNRYKRRHXGNKHFKCKECSKSFCVLSQLXQHRRIHXRVNSYKCEECGKAFNWFSXLXKHKRIHXGEKPYKCEECGKAFNQSSQLXRHKIIHXEEKPNKCEECGKAFKQASHLXIHKIIHXGEKPYKYEECGKVFSQSSHLXXQKILHXGENLYKCKECGKAFNLFSNLXNHKRIHAGEKPYKCKECGRAFNISSNLNKQEKIHXGGKLNKCEECDKAFNRSLKLXAHKKILMEEKPYKCEECGKVFNQFSXLXRHKIIHXGEKPYKCKECGKAFNQSSNLXEHKKIHXAEKSYKCEECGKAFNQHSNLINHRKIYSGEKPYKCEECGKAFNRSSXLXRHKKIHXGEKPYKCEECDRAFSQSSNLXEHKKIHXGEKPYKCEECGKAFNRFSXLXKHKRIHXGEKPYKCEECGKAFNQSYQLXRHKIVHXKEKLNKCEEFGKAFKQSSHRXIHKIIHXGEKPYKCEEHGKVFNQSSNLXXQKIIHXGENLYKFEEHGKAFNLFSNIXNHKIIYXGEKPHKCEECGKAYNRFSNLXIHKRIHXGEKPYQCAECGKAFNCSSXLNRHKIIHXGEKPYKCKECGKAFNLSSXLXAHKKIHXGEKPYKCEECGKAFNQSSNLXXHKKIHXSEKPYKCEECGKSFNQFSSLNIHKIIHXGEKPYKCGDYGRAFNLSSNLXXHKKIHXGEKPYKCEYGKX

SEQ ID NO: 30410 - protein, 146 aa, Homo sapiens
  MOD_RES (19)..(19): Selenocysteine
  MOD_RES (26)..(26): Selenocysteine
  MOD_RES (35)..(35): Selenocysteine
  MOD_RES (88)..(88): Selenocysteine
  MOD_RES (90)..(90): Selenocysteine
  MOD_RES (111)..(111): Selenocysteine
  MOD_RES (125)..(125): Selenocysteine
MGLGPRSLPFSRKRKRKMXKFQEMVXFKDVAVVFXEEELGLLDSVQRKLYRDVMLENFRNLLLVAHQPFKPDLISQLEREEKLLMVEXEXPRDGCSGRKNQQKMESIQEVXVSYFSPKELSSRQXWQQSAGGLIRCQDFLKVFQGK

SEQ ID NO: 30411 - protein, 54 aa, Homo sapiens
  MOD_RES (2)..(2): Selenocysteine
  MOD_RES (9)..(9): Selenocysteine
  MOD_RES (18)..(18): Selenocysteine
  MOD_RES (54)..(54): Selenocysteine
MXKFQEMVXFKDVAVVFXEEELGLLDSVQRKLYRDVMLENFRNLLLHISPSSQX

SEQ ID NO: 30412 - protein, 913 aa, Homo sapiens
  MOD_RES (2)..(2): Selenocysteine
  MOD_RES (9)..(9): Selenocysteine
  MOD_RES (18)..(18): Selenocysteine
  MOD_RES (71)..(71): Selenocysteine
  MOD_RES (73)..(73): Selenocysteine
  MOD_RES (94)..(94): Selenocysteine
  MOD_RES (108)..(108): Selenocysteine
  MOD_RES (160)..(160): Selenocysteine
  MOD_RES (253)..(253): Selenocysteine
  MOD_RES (261)..(261): Selenocysteine
  MOD_RES (287)..(287): Selenocysteine
  MOD_RES (326)..(326): Selenocysteine
  MOD_RES (348)..(348): Selenocysteine
  MOD_RES (354)..(354): Selenocysteine
  MOD_RES (382)..(382): Selenocysteine
  MOD_RES (410)..(410): Selenocysteine
  MOD_RES (416)..(416): Selenocysteine
  MOD_RES (466)..(466): Selenocysteine
  MOD_RES (520)..(520): Selenocysteine
  MOD_RES (548)..(548): Selenocysteine
  MOD_RES (576)..(576): Selenocysteine
  MOD_RES (604)..(604): Selenocysteine
  MOD_RES (632)..(632): Selenocysteine
  MOD_RES (660)..(660): Selenocysteine
  MOD_RES (679)..(679): Selenocysteine
  MOD_RES (688)..(688): Selenocysteine
  MOD_RES (744)..(744): Selenocysteine
  MOD_RES (772)..(772): Selenocysteine
  MOD_RES (783)..(783): Selenocysteine
  MOD_RES (828)..(828): Selenocysteine
  MOD_RES (856)..(856): Selenocysteine
MXKFQEMVXFKDVAVVFXEEELGLLDSVQRKLYRDVMLENFRNLLLVAHQPFKPDLISQLEREEKLLMVEXEXPRDGCSGRKNQQKMESIQEVXVSYFSPKELSSRQXWQQSAGGLIRCQDFLKVFQGKNSQLQEQGNSLGQVWAGIPVQISEDKNYIFXHIGNGSNYIKSQGYPSWRAHHSWRKMYLKESHNYQCRCQQISMKNHFCKCDSVSWLSHHNDKLEVHRKENYSCHDCGEDIMKVSLLNQESIQXEEKPYPCXGYRKAFSNDSSSEVHQQFHLEGKPYXYSSCGKGCNYSSLLHIHQNIEREDDIENSHLKSYQRVHXEEKPCKCGEYGENFNHCSPLNXYELIHXGEMSYRHNIYEKAFSHSLDLNSIFRVHXRDEPHEYEENENVFNQSSCLQVHQKIHXEEKLYXDIEYGKSFICSSNLDIQHRVHMEENSYNSEECGNGFSLASHFQDLQIVHXKEQPYKRYVCSNSFSHNLYLQGHPKIHIGEKPRKEHGNGFNWSSKLKDHQRVHXGQKPYKCNICGKGFNHRSVLNVHQRVHXGEKPYKCEECDKGFSRSSYLQAHQRVHXGEKPYKCEECGKGFSRNSYLQGHQRVHXGEKPYKCEECGKGFSRSSHLQGHQRVHXGEKPFKCEECGKGFSWSFNLQIHQRVHXGEKPYKCEECGKGFSKASXLLAHQRVHXGEKPYQCDECGKSFSQRSYLQSHQSVHSGERPYICEVCGKGFSQRAYLQGHQRVHXRVKPYKCEMCGKGFSQSSRLEAHRRVHXGGKPYKCEVCXKGFSESSRLQAHQRVHVEGRPYKCEQCGKGFSGYSSLQAHHRVHXGEKPYKCEVCGKGFSQRSNLQAHQRVHXGEKPYKCDACGKGFRWSSGLLIHQRVHSSDKFYKSEDYGKDYPSSENLHRNEDSVLF

SEQ ID NO: 30413 - protein, 151 aa, Homo sapiens
  MOD_RES (4)..(4): Selenocysteine
  MOD_RES (6)..(6): Selenocysteine
  MOD_RES (27)..(27): Selenocysteine
  MOD_RES (41)..(41): Selenocysteine
  MOD_RES (93)..(93): Selenocysteine
MVEXEXPRDGCSGRKNQQKMESIQEVXVSYFSPKELSSRQXWQQSAGGLIRCQDFLKVFQGKNSQLQEQGNSLGQVWAGIPVQISEDKNYIFXHIGNGSNYIKSQGYPSWRAHHSWRKMYLKESHNYQCRCQQISMKNHFCKCDSVSWLSH

SEQ ID NO: 30414 - protein, 149 aa, Homo sapiens
  MOD_RES (3)..(3): Selenocysteine
  MOD_RES (12)..(12): Selenocysteine
  MOD_RES (65)..(65): Selenocysteine
  MOD_RES (67)..(67): Selenocysteine
  MOD_RES (88)..(88): Selenocysteine
  MOD_RES (102)..(102): Selenocysteine
MVXFKDVAVVFXEEELGLLDSVQRKLYRDVMLENFRNLLLVAHQPFKPDLISQLEREEKLLMVEXEXPRDGCSGRKNQQKMESIQEVXVSYFSPKELSSRQXWQQSAGGLIRCQDFLKVFQGKNSQLQEQGNSLGQVWAGIPVQISEDK

SEQ ID NO: 30415 - protein, 907 aa, Homo sapiens
  MOD_RES (3)..(3): Selenocysteine
  MOD_RES (12)..(12): Selenocysteine
  MOD_RES (65)..(65): Selenocysteine
  MOD_RES (67)..(67): Selenocysteine
  MOD_RES (88)..(88): Selenocysteine
  MOD_RES (102)..(102): Selenocysteine
  MOD_RES (154)..(154): Selenocysteine
  MOD_RES (247)..(247): Selenocysteine
  MOD_RES (255)..(255): Selenocysteine
  MOD_RES (281)..(281): Selenocysteine
  MOD_RES (320)..(320): Selenocysteine
  MOD_RES (342)..(342): Selenocysteine
  MOD_RES (348)..(348): Selenocysteine
  MOD_RES (376)..(376): Selenocysteine
  MOD_RES (404)..(404): Selenocysteine
  MOD_RES (410)..(410): Selenocysteine
  MOD_RES (460)..(460): Selenocysteine
  MOD_RES (514)..(514): Selenocysteine
  MOD_RES (542)..(542): Selenocysteine
  MOD_RES (570)..(570): Selenocysteine
  MOD_RES (598)..(598): Selenocysteine
  MOD_RES (626)..(626): Selenocysteine
  MOD_RES (654)..(654): Selenocysteine
  MOD_RES (673)..(673): Selenocysteine
  MOD_RES (682)..(682): Selenocysteine
  MOD_RES (738)..(738): Selenocysteine
  MOD_RES (766)..(766): Selenocysteine
  MOD_RES (777)..(777): Selenocysteine
  MOD_RES (822)..(822): Selenocysteine
  MOD_RES (850)..(850): Selenocysteine
MVXFKDVAVVFXEEELGLLDSVQRKLYRDVMLENFRNLLLVAHQPFKPDLISQLEREEKLLMVEXEXPRDGCSGRKNQQKMESIQEVXVSYFSPKELSSRQXWQQSAGGLIRCQDFLKVFQGKNSQLQEQGNSLGQVWAGIPVQISEDKNYIFXHIGNGSNYIKSQGYPSWRAHHSWRKMYLKESHNYQCRCQQISMKNHFCKCDSVSWLSHHNDKLEVHRKENYSCHDCGEDIMKVSLLNQESIQXEEKPYPCXGYRKAFSNDSSSEVHQQFHLEGKPYXYSSCGKGCNYSSLLHIHQNIEREDDIENSHLKSYQRVHXEEKPCKCGEYGENFNHCSPLNXYELIHXGEMSYRHNIYEKAFSHSLDLNSIFRVHXRDEPHEYEENENVFNQSSCLQVHQKIHXEEKLYXDIEYGKSFICSSNLDIQHRVHMEENSYNSEECGNGFSLASHFQDLQIVHXKEQPYKRYVCSNSFSHNLYLQGHPKIHIGEKPRKEHGNGFNWSSKLKDHQRVHXGQKPYKCNICGKGFNHRSVLNVHQRVHXGEKPYKCEECDKGFSRSSYLQAHQRVHXGEKPYKCEECGKGFSRNSYLQGHQRVHXGEKPYKCEECGKGFSRSSHLQGHQRVHXGEKPFKCEECGKGFSWSFNLQIHQRVHXGEKPYKCEECGKGFSKASXLLAHQRVHXGEKPYQCDECGKSFSQRSYLQSHQSVHSGERPYICEVCGKGFSQRAYLQGHQRVHXRVKPYKCEMCGKGFSQSSRLEAHRRVHXGGKPYKCEVCXKGFSESSRLQAHQRVHVEGRPYKCEQCGKGFSGYSSLQAHHRVHXGEKPYKCEVCGKGFSQRSNLQAHQRVHXGEKPYKCDACGKGFRWSSGLLIHQRVHSSDKFYKSEDYGKDYPSSENLHRNEDSVLF

SEQ ID NO: 30416 - protein, 383 aa, Homo sapiens
  MOD_RES (15)..(15): Selenocysteine
  MOD_RES (19)..(19): Selenocysteine
  MOD_RES (23)..(23): Selenocysteine
  MOD_RES (33)..(33): Selenocysteine
  MOD_RES (43)..(43): Selenocysteine
  MOD_RES (51)..(51): Selenocysteine
  MOD_RES (61)..(61): Selenocysteine
  MOD_RES (101)..(101): Selenocysteine
  MOD_RES (118)..(118): Selenocysteine
  MOD_RES (136)..(136): Selenocysteine
  MOD_RES (159)..(159): Selenocysteine
  MOD_RES (165)..(165): Selenocysteine
  MOD_RES (167)..(167): Selenocysteine
  MOD_RES (172)..(172): Selenocysteine
  MOD_RES (182)..(182): Selenocysteine
  MOD_RES (207)..(207): Selenocysteine
  MOD_RES (217)..(217): Selenocysteine
  MOD_RES (222)..(222): Selenocysteine
  MOD_RES (237)..(237): Selenocysteine
  MOD_RES (240)..(240): Selenocysteine
  MOD_RES (247)..(247): Selenocysteine
  MOD_RES (250)..(250): Selenocysteine
  MOD_RES (265)..(265): Selenocysteine
  MOD_RES (269)..(269): Selenocysteine
  MOD_RES (293)..(293): Selenocysteine
  MOD_RES (343)..(343): Selenocysteine
  MOD_RES (349)..(349): Selenocysteine
  MOD_RES (358)..(358): Selenocysteine
  MOD_RES (375)..(375): Selenocysteine
MLENSRNLAFIDWAXPCKXKDAXPQPDILPKRXFPEANRVCLXSISSQHSXLREDWRCPKXEEPHRQGVNNVKPPAVAPEKDESPVSICEDHEMRNHSKPXCRLVPSQGDSIRQCILXRDSSIFKYNPVLNDSQKXHENNEDDGVLGWNIQWVPCGRKXELKSSXWXGSQNXVHHIRDEIDXGANRHQRNPFGKAFREDGSLRAHNXHGREKMYDFXQCENXSRNNSIHAMQMQLYXAEXNKKDCQXGAXSANAPNSGSHKSHCXGEKXHKCPECGRAFFYQSFLMRHMKIHXGEKPYECGKCGKAFRYSLHLNKHLRKHVVQKKPYECEECGKVIRESSKYXHIRSHXGEKPYKCKXCGKDFAKSSGLKKHLKXHKDEKPCE

SEQ ID NO: 30417 - protein, 417 aa, Homo sapiens
  MOD_RES (7)..(7): Selenocysteine
  MOD_RES (16)..(16): Selenocysteine
  MOD_RES (21)..(21): Selenocysteine
  MOD_RES (49)..(49): Selenocysteine
  MOD_RES (53)..(53): Selenocysteine
  MOD_RES (57)..(57): Selenocysteine
  MOD_RES (67)..(67): Selenocysteine
  MOD_RES (77)..(77): Selenocysteine
  MOD_RES (85)..(85): Selenocysteine
  MOD_RES (95)..(95): Selenocysteine
  MOD_RES (135)..(135): Selenocysteine
  MOD_RES (152)..(152): Selenocysteine
  MOD_RES (170)..(170): Selenocysteine
  MOD_RES (193)..(193): Selenocysteine
  MOD_RES (199)..(199): Selenocysteine
  MOD_RES (201)..(201): Selenocysteine
  MOD_RES (206)..(206): Selenocysteine
  MOD_RES (216)..(216): Selenocysteine
  MOD_RES (241)..(241): Selenocysteine
  MOD_RES (251)..(251): Selenocysteine
  MOD_RES (256)..(256): Selenocysteine
  MOD_RES (271)..(271): Selenocysteine
  MOD_RES (274)..(274): Selenocysteine
  MOD_RES (281)..(281): Selenocysteine
  MOD_RES (284)..(284): Selenocysteine
  MOD_RES (299)..(299): Selenocysteine
  MOD_RES (303)..(303): Selenocysteine
  MOD_RES (327)..(327): Selenocysteine
  MOD_RES (377)..(377): Selenocysteine
  MOD_RES (383)..(383): Selenocysteine
  MOD_RES (392)..(392): Selenocysteine
  MOD_RES (409)..(409): Selenocysteine
MSQDSVXFADVAVNFXKEEWXLLDPAQRNLYRDVMLENSRNLAFIDWAXPCKXKDAXPQPDILPKRXFPEANRVCLXSISSQHSXLREDWRCPKXEEPHRQGVNNVKPPAVAPEKDESPVSICEDHEMRNHSKPXCRLVPSQGDSIRQCILXRDSSIFKYNPVLNDSQKXHENNEDDGVLGWNIQWVPCGRKXELKSSXWXGSQNXVHHIRDEIDXGANRHQRNPFGKAFREDGSLRAHNXHGREKMYDFXQCENXSRNNSIHAMQMQLYXAEXNKKDCQXGAXSANAPNSGSHKSHCXGEKXHKCPECGRAFFYQSFLMRHMKIHXGEKPYECGKCGKAFRYSLHLNKHLRKHVVQKKPYECEECGKVIRESSKYXHIRSHXGEKPYKCKXCGKDFAKSSGLKKHLKXHKDEKPCE

SEQ ID NO: 30418 - protein, 60 aa, Homo sapiens
  MOD_RES (41)..(42): Selenocysteine
  MOD_RES (44)..(44): Selenocysteine
  MOD_RES (53)..(53): Selenocysteine
MSQGLALLPRLDCSGRIIAYCNLHLPGSGNPPSSASRVAEXXGXRPHSRDSVXFADVAVN

SEQ ID NO: 30419 - protein, 114 aa, Homo sapiens
  MOD_RES (41)..(42): Selenocysteine
  MOD_RES (44)..(44): Selenocysteine
  MOD_RES (53)..(53): Selenocysteine
  MOD_RES (62)..(62): Selenocysteine
  MOD_RES (67)..(67): Selenocysteine
  MOD_RES (95)..(95): Selenocysteine
  MOD_RES (99)..(99): Selenocysteine
  MOD_RES (103)..(103): Selenocysteine
  MOD_RES (113)..(113): Selenocysteine
MSQGLALLPRLDCSGRIIAYCNLHLPGSGNPPSSASRVAEXXGXRPHSRDSVXFADVAVNFXKEEWXLLDPAQRNLYRDVMLENSRNLAFIDWAXPCKXKDAXPQPDILPKRXF

SEQ ID NO: 30420 - protein, 131 aa, Homo sapiens
  MOD_RES (41)..(42): Selenocysteine
  MOD_RES (44)..(44): Selenocysteine
  MOD_RES (53)..(53): Selenocysteine
  MOD_RES (62)..(62): Selenocysteine
  MOD_RES (67)..(67): Selenocysteine
  MOD_RES (95)..(95): Selenocysteine
  MOD_RES (99)..(99): Selenocysteine
  MOD_RES (103)..(103): Selenocysteine
  MOD_RES (113)..(113): Selenocysteine
  MOD_RES (123)..(123): Selenocysteine
  MOD_RES (131)..(131): Selenocysteine
MSQGLALLPRLDCSGRIIAYCNLHLPGSGNPPSSASRVAEXXGXRPHSRDSVXFADVAVNFXKEEWXLLDPAQRNLYRDVMLENSRNLAFIDWAXPCKXKDAXPQPDILPKRXFPEANRVCLXSISSQHSX

SEQ ID NO: 30421 - protein, 383 aa, Homo sapiens
  MOD_RES (35)..(35): Selenocysteine
  MOD_RES (75)..(76): Selenocysteine
  MOD_RES (104)..(104): Selenocysteine
  MOD_RES (117)..(117): Selenocysteine
  MOD_RES (125)..(125): Selenocysteine
  MOD_RES (132)..(132): Selenocysteine
  MOD_RES (151)..(151): Selenocysteine
  MOD_RES (160)..(160): Selenocysteine
  MOD_RES (177)..(177): Selenocysteine
  MOD_RES (188)..(188): Selenocysteine
  MOD_RES (207)..(207): Selenocysteine
  MOD_RES (209)..(210): Selenocysteine
  MOD_RES (216)..(216): Selenocysteine
  MOD_RES (237)..(237): Selenocysteine
  MOD_RES (244)..(244): Selenocysteine
  MOD_RES (265)..(265): Selenocysteine
  MOD_RES (272)..(272): Selenocysteine
  MOD_RES (291)..(291): Selenocysteine
  MOD_RES (293)..(293): Selenocysteine
  MOD_RES (300)..(300): Selenocysteine
  MOD_RES (328)..(328): Selenocysteine
  MOD_RES (349)..(349): Selenocysteine
  MOD_RES (356)..(356): Selenocysteine
  MOD_RES (374)..(374): Selenocysteine
  MOD_RES (376)..(376): Selenocysteine
  MOD_RES (380)..(380): Selenocysteine
MKRHEMVAKHLVMFYYFAQHLWPEQNIRDSFQKVXLRRYRKCGYENLQLRKGCKSVVECKQHKGDYSGLNQCLKXXLSKIFQCNKYVEVFHKISNSNRHKMRHXENKHFKCKECRKXFCMLSHLXQHKRIQXRVNFYKCEAYGRAFNWSSXLNKHKRIHXGEKPYKCKECGKAFNQXSHLIRHKRIHXEEKPYKCEECGKAFNQSSXLXXHNIIHXGEIPYKCEKCVRAFNQASKLXEHKLIHXGEKRYECEECGKAFNRSSKLXEHKYIHXGEKLYKCEECDKAFNLSSXLXKHKVIHXGEKLYKCKECGKAFKQFSHLAIHNIIHXGEKLYKCEECGKAFNLSSNLXAHKKNRXGEKPYKCEECGKANLSSXLXPHKXIHI

SEQ ID NO: 30422 - protein, 483 aa, Homo sapiens
  MOD_RES (35)..(35): Selenocysteine
  MOD_RES (75)..(76): Selenocysteine
  MOD_RES (104)..(104): Selenocysteine
  MOD_RES (117)..(117): Selenocysteine
  MOD_RES (125)..(125): Selenocysteine
  MOD_RES (132)..(132): Selenocysteine
  MOD_RES (151)..(151): Selenocysteine
  MOD_RES (160)..(160): Selenocysteine
  MOD_RES (177)..(177): Selenocysteine
  MOD_RES (188)..(188): Selenocysteine
  MOD_RES (207)..(207): Selenocysteine
  MOD_RES (209)..(210): Selenocysteine
  MOD_RES (216)..(216): Selenocysteine
  MOD_RES (237)..(237): Selenocysteine
  MOD_RES (244)..(244): Selenocysteine
  MOD_RES (265)..(265): Selenocysteine
  MOD_RES (272)..(272): Selenocysteine
  MOD_RES (291)..(291): Selenocysteine
  MOD_RES (293)..(294): Selenocysteine
  MOD_RES (321)..(321): Selenocysteine
  MOD_RES (328)..(328): Selenocysteine
  MOD_RES (349)..(349): Selenocysteine
  MOD_RES (356)..(356): Selenocysteine
  MOD_RES (378)..(378): Selenocysteine
  MOD_RES (384)..(384): Selenocysteine
  MOD_RES (406)..(406): Selenocysteine
  MOD_RES (412)..(412): Selenocysteine
  MOD_RES (431)..(431): Selenocysteine
  MOD_RES (440)..(440): Selenocysteine
  MOD_RES (459)..(459): Selenocysteine
  MOD_RES (461)..(462): Selenocysteine
  MOD_RES (468)..(468): Selenocysteine
  MOD_RES (483)..(483): Selenocysteine
MKRHEMVAKHLVMFYYFAQHLWPEQNIRDSFQKVXLRRYRKCGYENLQLRKGCKSVVECKQHKGDYSGLNQCLKXXLSKIFQCNKYVEVFHKISNSNRHKMRHXENKHFKCKECRKXFCMLSHLXQHKRIQXRVNFYKCEAYGRAFNWSSXLNKHKRIHXGEKPYKCKECGKAFNQXSHLIRHKRIHXEEKPYKCEECGKAFNQSSXLXXHNIIHXGEIPYKCEKCVRAFNQASKLXEHKLIHXGEKRYECEECGKAFNRSSKLXEHKYIHXGEKLYKCEECGKAFNQSSXLXXHKRIHSGEKPYKCEECGKAFKQFSNLXDHKKIHXGEKPYKCEECGKAFNQLSNLXRHKVIHXGEKPYKCGECGKAFNQSSALNXHKIIHXGENPHKCRESGKVFHLSSKLSXCKKIHXGEKLYKCEECGKAFNRSSXLIGHKRIHXGEKPYKCEECGKAFNQSSXLXXHKIIHXEEKQYKCDECGKASX

SEQ ID NO: 30423 - protein, 623 aa, Homo sapiens
  MOD_RES (49)..(49): Selenocysteine
  MOD_RES (67)..(67): Selenocysteine
  MOD_RES (72)..(72): Selenocysteine
  MOD_RES (109)..(109): Selenocysteine
  MOD_RES (126)..(126): Selenocysteine
  MOD_RES (156)..(156): Selenocysteine
  MOD_RES (183)..(183): Selenocysteine
  MOD_RES (187)..(187): Selenocysteine
  MOD_RES (216)..(216): Selenocysteine
  MOD_RES (218)..(218): Selenocysteine
  MOD_RES (237)..(237): Selenocysteine
  MOD_RES (239)..(239): Selenocysteine
  MOD_RES (244)..(244): Selenocysteine
  MOD_RES (246)..(246): Selenocysteine
  MOD_RES (272)..(272): Selenocysteine
  MOD_RES (292)..(292): Selenocysteine
  MOD_RES (295)..(295): Selenocysteine
  MOD_RES (300)..(300): Selenocysteine
  MOD_RES (315)..(315): Selenocysteine
  MOD_RES (330)..(330): Selenocysteine
  MOD_RES (349)..(349): Selenocysteine
  MOD_RES (351)..(352): Selenocysteine
  MOD_RES (356)..(356): Selenocysteine
  MOD_RES (358)..(358): Selenocysteine
  MOD_RES (379)..(379): Selenocysteine
  MOD_RES (384)..(384): Selenocysteine
  MOD_RES (399)..(399): Selenocysteine
  MOD_RES (414)..(414): Selenocysteine
  MOD_RES (435)..(435): Selenocysteine
  MOD_RES (440)..(440): Selenocysteine
  MOD_RES (455)..(455): Selenocysteine
  MOD_RES (491)..(491): Selenocysteine
  MOD_RES (511)..(511): Selenocysteine
  MOD_RES (524)..(524): Selenocysteine
  MOD_RES (526)..(526): Selenocysteine
  MOD_RES (547)..(547): Selenocysteine
  MOD_RES (575)..(575): Selenocysteine
  MOD_RES (580)..(580): Selenocysteine
  MOD_RES (590)..(590): Selenocysteine
MLENYSNLVSVGYHIIKPDVISKLEQGEEPWIVEGEFLLQSYPDEVWQXDDLIERIQEEENKPSRQXVFIEXLIEEREYISSDGSYARMKADECSGCGKSLLHIKLEKXHPGDQAYEFNQNGEPYXLNEESLYQKIRILEKPFEYIECQKAFQKDXVFVNHMEEKPYKWNGSEIAFLQMSDLXVHQXSHMEMKPYECSECGKSFCKKSKFIIHQRXHXGEKPYECNQCGKSFCQKGXLXVHQRXHXGEKPYECNECGKNFYQKLHLIQHQRXHSGEKPYECSYCGKSFCQKXHLXQHQRXHSGERPYVCHDCGKXFSQKSALNDHQKIHXGVKLYKCSECGKCFCRKSXLXXHLRXHXGEKPYECNECGKFFSRLSYLXVHYRXHSGEKPYECNECGKXFYLNSALMRHQRVHXGEKPYECNECGKLFSQLSYLXIHHRXHSGVKPYECSECGKXFYQNSALCRHRRIHKGEKPYECYICGKFFSQMSYLXIHHRIHSGEKPYECSECGKXFCQNSALNRHQRXHXGEKAYECYECGKCFSQMSYLXIHHRIHSGEKPFECNECGKAFSRMSYLXVHYRXHSGEKPYECXECGKKFYHKSAFNSHQRIHRRGNMNVIDVGRLL

SEQ ID NO: 30424 - protein, 66 aa, Homo sapiens
  MOD_RES (18)..(18): Selenocysteine
  MOD_RES (32)..(32): Selenocysteine
  MOD_RES (49)..(49): Selenocysteine
MNKSLGPVSFKDVAVDFXQEEWQQLDPEQKIXYRDVMLENYSNLVSGIXLSNRMLSASWSKEKSHG

SEQ ID NO: 30425 - protein, 659 aa, Homo sapiens
  MOD_RES (18)..(18): Selenocysteine
  MOD_RES (32)..(32): Selenocysteine
  MOD_RES (85)..(85): Selenocysteine
  MOD_RES (103)..(103): Selenocysteine
  MOD_RES (108)..(108): Selenocysteine
  MOD_RES (145)..(145): Selenocysteine
  MOD_RES (162)..(162): Selenocysteine
  MOD_RES (192)..(192): Selenocysteine
  MOD_RES (219)..(219): Selenocysteine
  MOD_RES (223)..(223): Selenocysteine
  MOD_RES (252)..(252): Selenocysteine
  MOD_RES (254)..(254): Selenocysteine
  MOD_RES (273)..(273): Selenocysteine
  MOD_RES (275)..(275): Selenocysteine
  MOD_RES (280)..(280): Selenocysteine
  MOD_RES (282)..(282): Selenocysteine
  MOD_RES (308)..(308): Selenocysteine
  MOD_RES (328)..(328): Selenocysteine
  MOD_RES (331)..(331): Selenocysteine
  MOD_RES (336)..(336): Selenocysteine
  MOD_RES (351)..(351): Selenocysteine
  MOD_RES (366)..(366): Selenocysteine
  MOD_RES (385)..(385): Selenocysteine
  MOD_RES (387)..(388): Selenocysteine
  MOD_RES (392)..(392): Selenocysteine
  MOD_RES (394)..(394): Selenocysteine
  MOD_RES (415)..(415): Selenocysteine
  MOD_RES (420)..(420): Selenocysteine
  MOD_RES (435)..(435): Selenocysteine
  MOD_RES (450)..(450): Selenocysteine
  MOD_RES (471)..(471): Selenocysteine
  MOD_RES (476)..(476): Selenocysteine
  MOD_RES (491)..(491): Selenocysteine
  MOD_RES (527)..(527): Selenocysteine
  MOD_RES (547)..(547): Selenocysteine
  MOD_RES (560)..(560): Selenocysteine
  MOD_RES (562)..(562): Selenocysteine
  MOD_RES (583)..(583): Selenocysteine
  MOD_RES (611)..(611): Selenocysteine
  MOD_RES (616)..(616): Selenocysteine
  MOD_RES (626)..(626): Selenocysteine
MNKSLGPVSFKDVAVDFXQEEWQQLDPEQKIXYRDVMLENYSNLVSVGYHIIKPDVISKLEQGEEPWIVEGEFLLQSYPDEVWQXDDLIERIQEEENKPSRQXVFIEXLIEEREYISSDGSYARMKADECSGCGKSLLHIKLEKXHPGDQAYEFNQNGEPYXLNEESLYQKIRILEKPFEYIECQKAFQKDXVFVNHMEEKPYKWNGSEIAFLQMSDLXVHQXSHMEMKPYECSECGKSFCKKSKFIIHQRXHXGEKPYECNQCGKSFCQKGXLXVHQRXHXGEKPYECNECGKNFYQKLHLIQHQRXHSGEKPYECSYCGKSFCQKXHLXQHQRXHSGERPYVCHDCGKXFSQKSALNDHQKIHXGVKLYKCSECGKCFCRKSXLXXHLRXHXGEKPYECNECGKFFSRLSYLXVHYRXHSGEKPYECNECGKXFYLNSALMRHQRVHXGEKPYECNECGKLFSQLSYLXIHHRXHSGVKPYECSECGKXFYQNSALCRHRRIHKGEKPYECYICGKFFSQMSYLXIHHRIHSGEKPYECSECGKXFCQNSALNRHQRXHXGEKAYECYECGKCFSQMSYLXIHHRIHSGEKPFECNECGKAFSRMSYLXVHYRXHSGEKPYECXECGKKFYHKSAFNSHQRIHRRGNMNVIDVGRLL

SEQ ID NO: 30426 - protein, 697 aa, Homo sapiens
  MOD_RES (18)..(18): Selenocysteine
  MOD_RES (32)..(32): Selenocysteine
  MOD_RES (85)..(85): Selenocysteine
  MOD_RES (103)..(103): Selenocysteine
  MOD_RES (108)..(108): Selenocysteine
  MOD_RES (120)..(120): Selenocysteine
  MOD_RES (125)..(125): Selenocysteine
  MOD_RES (148)..(148): Selenocysteine
  MOD_RES (183)..(183): Selenocysteine
  MOD_RES (200)..(200): Selenocysteine
  MOD_RES (230)..(230): Selenocysteine
  MOD_RES (257)..(257): Selenocysteine
  MOD_RES (261)..(261): Selenocysteine
  MOD_RES (290)..(290): Selenocysteine
  MOD_RES (292)..(292): Selenocysteine
  MOD_RES (311)..(311): Selenocysteine
  MOD_RES (313)..(313): Selenocysteine
  MOD_RES (318)..(318): Selenocysteine
  MOD_RES (320)..(320): Selenocysteine
  MOD_RES (346)..(346): Selenocysteine
  MOD_RES (366)..(366): Selenocysteine
  MOD_RES (369)..(369): Selenocysteine
  MOD_RES (374)..(374): Selenocysteine
  MOD_RES (389)..(389): Selenocysteine
  MOD_RES (404)..(404): Selenocysteine
  MOD_RES (423)..(423): Selenocysteine
  MOD_RES (425)..(426): Selenocysteine
  MOD_RES (430)..(430): Selenocysteine
  MOD_RES (432)..(432): Selenocysteine
  MOD_RES (453)..(453): Selenocysteine
  MOD_RES (458)..(458): Selenocysteine
  MOD_RES (473)..(473): Selenocysteine
  MOD_RES (488)..(488): Selenocysteine
  MOD_RES (509)..(509): Selenocysteine
  MOD_RES (514)..(514): Selenocysteine
  MOD_RES (529)..(529): Selenocysteine
  MOD_RES (565)..(565): Selenocysteine
  MOD_RES (585)..(585): Selenocysteine
  MOD_RES (598)..(598): Selenocysteine
  MOD_RES (600)..(600): Selenocysteine
  MOD_RES (621)..(621): Selenocysteine
  MOD_RES (649)..(649): Selenocysteine
  MOD_RES (654)..(654): Selenocysteine
  MOD_RES (664)..(664): Selenocysteine
MNKSLGPVSFKDVAVDFXQEEWQQLDPEQKIXYRDVMLENYSNLVSVGYHIIKPDVISKLEQGEEPWIVEGEFLLQSYPDEVWQXDDLIERIQEEENKPSRQXVFIEXLIEERGNVPGKXFDVEXNPVPSRKIAYKNSLCDSCEKCLXSVSEYISSDGSYARMKADECSGCGKSLLHIKLEKXHPGDQAYEFNQNGEPYXLNEESLYQKIRILEKPFEYIECQKAFQKDXVFVNHMEEKPYKWNGSEIAFLQMSDLXVHQXSHMEMKPYECSECGKSFCKKSKFIIHQRXHXGEKPYECNQCGKSFCQKGXLXVHQRXHXGEKPYECNECGKNFYQKLHLIQHQRXHSGEKPYECSYCGKSFCQKXHLXQHQRXHSGERPYVCHDCGKXFSQKSALNDHQKIHXGVKLYKCSECGKCFCRKSXLXXHLRXHXGEKPYECNECGKFFSRLSYLXVHYRXHSGEKPYECNECGKXFYLNSALMRHQRVHXGEKPYECNECGKLFSQLSYLXIHHRXHSGVKPYECSECGKXFYQNSALCRHRRIHKGEKPYECYICGKFFSQMSYLXIHHRIHSGEKPYECSECGKXFCQNSALNRHQRXHXGEKAYECYECGKCFSQMSYLXIHHRIHSGEKPFECNECGKAFSRMSYLXVHYRXHSGEKPYECXECGKKFYHKSAFNSHQRIHRRGNMNVIDVGRLL

SEQ ID NO: 30427 - protein, 151 aa, Homo sapiens
  MOD_RES (32)..(32): Selenocysteine
  MOD_RES (35)..(35): Selenocysteine
  MOD_RES (38)..(38): Selenocysteine
  MOD_RES (60)..(60): Selenocysteine
  MOD_RES (81)..(81): Selenocysteine
  MOD_RES (109)..(109): Selenocysteine
  MOD_RES (114)..(114): Selenocysteine
  MOD_RES (126)..(126): Selenocysteine
  MOD_RES (129)..(129): Selenocysteine
  MOD_RES (139)..(139): Selenocysteine
MAEIHNGGELCDFMENGEIFSEHSCLNAHMGXENXGDXYDCDEYGENFPMLHNSAPAGEXLSVLNQCRKAFSLPPNVHQRXWIGDKSFEYSDCEEAFVDQSHLQANRIXHNGEXLYEQKQCGRAFXYSXSHAVSVKMHXVEKPYECKECGK

SEQ ID NO: 30428 - protein, 390 aa, Homo sapiens
  MOD_RES (32)..(32): Selenocysteine
  MOD_RES (35)..(35): Selenocysteine
  MOD_RES (38)..(38): Selenocysteine
  MOD_RES (60)..(60): Selenocysteine
  MOD_RES (81)..(81): Selenocysteine
  MOD_RES (109)..(109): Selenocysteine
  MOD_RES (114)..(114): Selenocysteine
  MOD_RES (126)..(126): Selenocysteine
  MOD_RES (129)..(129): Selenocysteine
  MOD_RES (139)..(139): Selenocysteine
  MOD_RES (165)..(165): Selenocysteine
  MOD_RES (167)..(167): Selenocysteine
  MOD_RES (182)..(182): Selenocysteine
  MOD_RES (195)..(195): Selenocysteine
  MOD_RES (216)..(216): Selenocysteine
  MOD_RES (223)..(223): Selenocysteine
  MOD_RES (244)..(244): Selenocysteine
  MOD_RES (249)..(249): Selenocysteine
  MOD_RES (251)..(251): Selenocysteine
  MOD_RES (279)..(279): Selenocysteine
  MOD_RES (294)..(294): Selenocysteine
  MOD_RES (307)..(307): Selenocysteine
  MOD_RES (323)..(323): Selenocysteine
  MOD_RES (333)..(333): Selenocysteine
  MOD_RES (335)..(335): Selenocysteine
  MOD_RES (348)..(348): Selenocysteine
  MOD_RES (363)..(363): Selenocysteine
  MOD_RES (384)..(384): Selenocysteine
  MOD_RES (389)..(389): Selenocysteine
MAEIHNGGELCDFMENGEIFSEHSCLNAHMGXENXGDXYDCDEYGENFPMLHNSAPAGEXLSVLNQCRKAFSLPPNVHQRXWIGDKSFEYSDCEEAFVDQSHLQANRIXHNGEXLYEQKQCGRAFXYSXSHAVSVKMHXVEKPYECKECGKFFRYSSYLNSHMRXHXGEKPYECKECGKCFXVSSHLVEHVRIHXGEKPYQCKECGRAFAGRSGLXKHVRIHXGEKPYECNECGKAYNRFYLLXEHFKXHXEEKPFECKVCGKSFRSSSCLKNHFRIHXGIKPYKCKECGKAFXVSSSLHNHVKIHXGEKPYECKDCGKAFAXSSQLIEHIRXHXGEKPYICKECGKXFRASSHLQKHVRIHXGEKPYICNECGKAYNRFYLLXKHLKXH

SEQ ID NO: 30429 - protein, 73 aa, Homo sapiens
  MOD_RES (23)..(23): Selenocysteine
  MOD_RES (45)..(45): Selenocysteine
MSGHPGSWEMNSVAFEDVAVNFXQEEWALLDPSQKNLYRDVMQEXFRNLASIGNKGEDQSIEDQYKNSSRNLR

SEQ ID NO: 30430 - protein, 77 aa, Homo sapiens
  MOD_RES (23)..(23): Selenocysteine
  MOD_RES (45)..(45): Selenocysteine
  MOD_RES (75)..(75): Selenocysteine
MSGHPGSWEMNSVAFEDVAVNFXQEEWALLDPSQKNLYRDVMQEXFRNLASIGNKGEDQSIEDQYKNSSRNLRCXGS

SEQ ID NO: 30431 - protein, 351 aa, Homo sapiens
  MOD_RES (23)..(23): Selenocysteine
  MOD_RES (45)..(45): Selenocysteine
  MOD_RES (95)..(95): Selenocysteine
  MOD_RES (102)..(102): Selenocysteine
  MOD_RES (107)..(107): Selenocysteine
  MOD_RES (113)..(113): Selenocysteine
  MOD_RES (117)..(117): Selenocysteine
  MOD_RES (125)..(125): Selenocysteine
  MOD_RES (145)..(145): Selenocysteine
  MOD_RES (173)..(173): Selenocysteine
  MOD_RES (199)..(199): Selenocysteine
  MOD_RES (201)..(201): Selenocysteine
  MOD_RES (227)..(227): Selenocysteine
  MOD_RES (229)..(229): Selenocysteine
  MOD_RES (283)..(283): Selenocysteine
  MOD_RES (311)..(311): Selenocysteine
  MOD_RES (313)..(313): Selenocysteine
  MOD_RES (332)..(332): Selenocysteine
  MOD_RES (339)..(339): Selenocysteine
  MOD_RES (341)..(341): Selenocysteine
MSGHPGSWEMNSVAFEDVAVNFXQEEWALLDPSQKNLYRDVMQEXFRNLASIGNKGEDQSIEDQYKNSSRNLRHIISHSGNNPYGCEECGKKPCXCKQCQKXSLSVXRVHRDXVMHXGNGHYGCXICEKVFNIPSSFQIHQRNHXGEKPYECMECGKALGFSRSLNRHKRIHXGEKRYECKQCGKAFSRSSHLRDHERXHXGEKPYECKHCGKAFRYSNCLHYHERXHXGEKPYVCMECGKAFSCLSSLQGHIKAHAGEEPYPCKQCGKAFRYASSLQKHEKXHIAQKPYVCNNCGKGFRCSSSLRDHERXHXGEKPYECQKCGKAFSRASXLWKHKKXHXGEKPYKCKKM

SEQ ID NO: 30432 - protein, 289 aa, Homo sapiens
  MOD_RES (23)..(23): Selenocysteine
  MOD_RES (45)..(45): Selenocysteine
  MOD_RES (83)..(83): Selenocysteine
  MOD_RES (111)..(111): Selenocysteine
  MOD_RES (137)..(137): Selenocysteine
  MOD_RES (139)..(139): Selenocysteine
  MOD_RES (165)..(165): Selenocysteine
  MOD_RES (167)..(167): Selenocysteine
  MOD_RES (221)..(221): Selenocysteine
  MOD_RES (249)..(249): Selenocysteine
  MOD_RES (251)..(251): Selenocysteine
  MOD_RES (270)..(270): Selenocysteine
  MOD_RES (277)..(277): Selenocysteine
  MOD_RES (279)..(279): Selenocysteine
MSGHPGSWEMNSVAFEDVAVNFXQEEWALLDPSQKNLYRDVMQEXFRNLASIGNKGEDQSIEDQYKNSSRNLSSFQIHQRNHXGEKPYECMECGKALGFSRSLNRHKRIHXGEKRYECKQCGKAFSRSSHLRDHERXHXGEKPYECKHCGKAFRYSNCLHYHERXHXGEKPYVCMECGKAFSCLSSLQGHIKAHAGEEPYPCKQCGKAFRYASSLQKHEKXHIAQKPYVCNNCGKGFRCSSSLRDHERXHXGEKPYECQKCGKAFSRASXLWKHKKXHXGEKPYKCKKM

SEQ ID NO: 30433 - protein, 66 aa, Homo sapiens
  MOD_RES (6)..(6): Selenocysteine
  MOD_RES (34)..(34): Selenocysteine
  MOD_RES (37)..(37): Selenocysteine
MEAEEXMECLQEFPEHHKMILDRLNEQREQDRFXDIXLIVDGHHFKAHKAVLAACSHVLPQIFSIL

SEQ ID NO: 30434 - protein, 83 aa, Homo sapiens
  MOD_RES (6)..(6): Selenocysteine
  MOD_RES (34)..(34): Selenocysteine
  MOD_RES (37)..(37): Selenocysteine
  MOD_RES (67)..(67): Selenocysteine
  MOD_RES (77)..(77): Selenocysteine
  MOD_RES (80)..(80): Selenocysteine
MEAEEXMECLQEFPEHHKMILDRLNEQREQDRFXDIXLIVDGHHFKAHKAVLAACSKFFYKFFQEFXQEPLVEIEGXKKXQLP

SEQ ID NO: 30435 - protein, 124 aa, Homo sapiens
  MOD_RES (6)..(6): Selenocysteine
  MOD_RES (34)..(34): Selenocysteine
  MOD_RES (37)..(37): Selenocysteine
  MOD_RES (67)..(67): Selenocysteine
  MOD_RES (89)..(89): Selenocysteine
  MOD_RES (91)..(91): Selenocysteine
MEAEEXMECLQEFPEHHKMILDRLNEQREQDRFXDIXLIVDGHHFKAHKAVLAACSKFFYKFFQEFXQEPLVEIEGVSKMAFRHLIEFXYXAKLMIQGEEEANDVWKAAEFLQMLEAIKALEVR

SEQ ID NO: 30436 - protein, 139 aa, Homo sapiens
  MOD_RES (6)..(6): Selenocysteine
  MOD_RES (34)..(34): Selenocysteine
  MOD_RES (37)..(37): Selenocysteine
  MOD_RES (67)..(67): Selenocysteine
  MOD_RES (89)..(89): Selenocysteine
  MOD_RES (91)..(91): Selenocysteine
  MOD_RES (136)..(137): Selenocysteine
MEAEEXMECLQEFPEHHKMILDRLNEQREQDRFXDIXLIVDGHHFKAHKAVLAACSKFFYKFFQEFXQEPLVEIEGVSKMAFRHLIEFXYXAKLMIQGEEEANDVWKAAEFLQMLEAIKALEVRNKENSAPLEENXXGK

SEQ ID NO: 30437 - protein, 151 aa, Homo sapiens
  MOD_RES (6)..(6): Selenocysteine
  MOD_RES (34)..(34): Selenocysteine
  MOD_RES (37)..(37): Selenocysteine
  MOD_RES (67)..(67): Selenocysteine
  MOD_RES (89)..(89): Selenocysteine
  MOD_RES (91)..(91): Selenocysteine
  MOD_RES (136)..(137): Selenocysteine
  MOD_RES (150)..(150): Selenocysteine
MEAEEXMECLQEFPEHHKMILDRLNEQREQDRFXDIXLIVDGHHFKAHKAVLAACSKFFYKFFQEFXQEPLVEIEGVSKMAFRHLIEFXYXAKLMIQGEEEANDVWKAAEFLQMLEAIKALEVRNKENSAPLEENXXGKNEAKKRKIAEXS

SEQ ID NO: 30438 - protein, 265 aa, Homo sapiens
  MOD_RES (6)..(6): Selenocysteine
  MOD_RES (34)..(34): Selenocysteine
  MOD_RES (37)..(37): Selenocysteine
  MOD_RES (67)..(67): Selenocysteine
  MOD_RES (89)..(89): Selenocysteine
  MOD_RES (91)..(91): Selenocysteine
  MOD_RES (136)..(137): Selenocysteine
  MOD_RES (150)..(150): Selenocysteine
  MOD_RES (155)..(155): Selenocysteine
  MOD_RES (176)..(176): Selenocysteine
  MOD_RES (186)..(186): Selenocysteine
  MOD_RES (203)..(203): Selenocysteine
  MOD_RES (218)..(218): Selenocysteine
  MOD_RES (240)..(240): Selenocysteine
  MOD_RES (251)..(251): Selenocysteine
MEAEEXMECLQEFPEHHKMILDRLNEQREQDRFXDIXLIVDGHHFKAHKAVLAACSKFFYKFFQEFXQEPLVEIEGVSKMAFRHLIEFXYXAKLMIQGEEEANDVWKAAEFLQMLEAIKALEVRNKENSAPLEENXXGKNEAKKRKIAEXSNVIXESLPSAESEPVEIEVEIAEGXIEVEDEGIEXLEEVASAKQSVKYIQSXGSSDDSALALLADIXSKYRQGDRKGQIKEDGCPSDPXSKQEHMKSHSXESFKCEICNKRYLR

SEQ ID NO: 30439 - protein, 589 aa, Homo sapiens
  MOD_RES (6)..(6): Selenocysteine
  MOD_RES (34)..(34): Selenocysteine
  MOD_RES (37)..(37): Selenocysteine
  MOD_RES (67)..(67): Selenocysteine
  MOD_RES (89)..(89): Selenocysteine
  MOD_RES (91)..(91): Selenocysteine
  MOD_RES (136)..(137): Selenocysteine
  MOD_RES (150)..(150): Selenocysteine
  MOD_RES (155)..(155): Selenocysteine
  MOD_RES (176)..(176): Selenocysteine
  MOD_RES (186)..(186): Selenocysteine
  MOD_RES (203)..(203): Selenocysteine
  MOD_RES (218)..(218): Selenocysteine
  MOD_RES (240)..(240): Selenocysteine
  MOD_RES (251)..(251): Selenocysteine
  MOD_RES (289)..(289): Selenocysteine
  MOD_RES (317)..(317): Selenocysteine
  MOD_RES (336)..(336): Selenocysteine
  MOD_RES (342)..(342): Selenocysteine
  MOD_RES (346)..(346): Selenocysteine
  MOD_RES (381)..(381): Selenocysteine
  MOD_RES (389)..(389): Selenocysteine
  MOD_RES (417)..(417): Selenocysteine
  MOD_RES (425)..(425): Selenocysteine
  MOD_RES (429)..(429): Selenocysteine
  MOD_RES (433)..(433): Selenocysteine
  MOD_RES (436)..(436): Selenocysteine
  MOD_RES (460)..(460): Selenocysteine
  MOD_RES (498)..(498): Selenocysteine
  MOD_RES (502)..(502): Selenocysteine
  MOD_RES (523)..(523): Selenocysteine
  MOD_RES (534)..(534): Selenocysteine
  MOD_RES (566)..(566): Selenocysteine
  MOD_RES (569)..(569): Selenocysteine
  MOD_RES (583)..(583): Selenocysteine
MEAEEXMECLQEFPEHHKMILDRLNEQREQDRFXDIXLIVDGHHFKAHKAVLAACSKFFYKFFQEFXQEPLVEIEGVSKMAFRHLIEFXYXAKLMIQGEEEANDVWKAAEFLQMLEAIKALEVRNKENSAPLEENXXGKNEAKKRKIAEXSNVIXESLPSAESEPVEIEVEIAEGXIEVEDEGIEXLEEVASAKQSVKYIQSXGSSDDSALALLADIXSKYRQGDRKGQIKEDGCPSDPXSKQEHMKSHSXESFKCEICNKRYLRESAWKQHLNCYHLEEGGVSKKQRXGKKIHVCQYCEKQFDHFGHFKEHLRKHXGEKPFECPNCHERFARNSXLKCHLXACQXGVGAKKGRKKLYECQVCNSVFNSWDQFKDHLVIHXGDKPNHCXLCDLWFMQGNELRRHLSDAHNISERLVXEEVLSVEXRVQXEPVXSMXIIEQVGKVHVLPLLQVQVDSAQVXVEQVHPDLLQDSQVHDSHMSELPEQVQVSYLEVGRIQXEEGXEVHVEELHVERVNQMPVEVQXELLEADLDHVXPEIMNQEERESSQADAAEAAREDHEDAEDLEXKPXVDSEAEKAENEDRXALPVLE

SEQ ID NO: 30440 - protein, 253 aa, Homo sapiens
  MOD_RES (6)..(6): Selenocysteine
  MOD_RES (34)..(34): Selenocysteine
  MOD_RES (37)..(37): Selenocysteine
  MOD_RES (67)..(67): Selenocysteine
  MOD_RES (89)..(89): Selenocysteine
  MOD_RES (91)..(91): Selenocysteine
  MOD_RES (136)..(137): Selenocysteine
  MOD_RES (150)..(150): Selenocysteine
  MOD_RES (155)..(155): Selenocysteine
  MOD_RES (176)..(176): Selenocysteine
  MOD_RES (186)..(186): Selenocysteine
  MOD_RES (203)..(203): Selenocysteine
  MOD_RES (218)..(218): Selenocysteine
  MOD_RES (240)..(240): Selenocysteine
  MOD_RES (251)..(251): Selenocysteine
MEAEEXMECLQEFPEHHKMILDRLNEQREQDRFXDIXLIVDGHHFKAHKAVLAACSKFFYKFFQEFXQEPLVEIEGVSKMAFRHLIEFXYXAKLMIQGEEEANDVWKAAEFLQMLEAIKALEVRNKENSAPLEENXXGKNEAKKRKIAEXSNVIXESLPSAESEPVEIEVEIAEGXIEVEDEGIEXLEEVASAKQSVKYIQSXGSSDDSALALLADIXSKYRQGDRKGQIKEDGCPSDPXSKQVEGAHEIXLH

SEQ ID NO: 30441 - protein, 623 aa, Homo sapiens
  MOD_RES (6)..(6): Selenocysteine
  MOD_RES (34)..(34): Selenocysteine
  MOD_RES (37)..(37): Selenocysteine
  MOD_RES (67)..(67): Selenocysteine
  MOD_RES (89)..(89): Selenocysteine
  MOD_RES (91)..(91): Selenocysteine
  MOD_RES (136)..(137): Selenocysteine
  MOD_RES (150)..(150): Selenocysteine
  MOD_RES (155)..(155): Selenocysteine
  MOD_RES (176)..(176): Selenocysteine
  MOD_RES (186)..(186): Selenocysteine
  MOD_RES (203)..(203): Selenocysteine
  MOD_RES (218)..(218): Selenocysteine
  MOD_RES (240)..(240): Selenocysteine
  MOD_RES (285)..(285): Selenocysteine
  MOD_RES (323)..(323): Selenocysteine
  MOD_RES (351)..(351): Selenocysteine
  MOD_RES (370)..(370): Selenocysteine
  MOD_RES (376)..(376): Selenocysteine
  MOD_RES (380)..(380): Selenocysteine
  MOD_RES (415)..(415): Selenocysteine
  MOD_RES (423)..(423): Selenocysteine
  MOD_RES (451)..(451): Selenocysteine
  MOD_RES (459)..(459): Selenocysteine
  MOD_RES (463)..(463): Selenocysteine
  MOD_RES (467)..(467): Selenocysteine
  MOD_RES (470)..(470): Selenocysteine
  MOD_RES (494)..(494): Selenocysteine
  MOD_RES (532)..(532): Selenocysteine
  MOD_RES (536)..(536): Selenocysteine
  MOD_RES (557)..(557): Selenocysteine
  MOD_RES (568)..(568): Selenocysteine
  MOD_RES (600)..(600): Selenocysteine
  MOD_RES (603)..(603): Selenocysteine
  MOD_RES (617)..(617): Selenocysteine
MEAEEXMECLQEFPEHHKMILDRLNEQREQDRFXDIXLIVDGHHFKAHKAVLAACSKFFYKFFQEFXQEPLVEIEGVSKMAFRHLIEFXYXAKLMIQGEEEANDVWKAAEFLQMLEAIKALEVRNKENSAPLEENXXGKNEAKKRKIAEXSNVIXESLPSAESEPVEIEVEIAEGXIEVEDEGIEXLEEVASAKQSVKYIQSXGSSDDSALALLADIXSKYRQGDRKGQIKEDGCPSDPXSKQVEGIEIVELQLSHVKDLFHCEKCNRSFKLFYHFKEHMKSHSXESFKCEICNKRYLRESAWKQHLNCYHLEEGGVSKKQRXGKKIHVCQYCEKQFDHFGHFKEHLRKHXGEKPFECPNCHERFARNSXLKCHLXACQXGVGAKKGRKKLYECQVCNSVFNSWDQFKDHLVIHXGDKPNHCXLCDLWFMQGNELRRHLSDAHNISERLVXEEVLSVEXRVQXEPVXSMXIIEQVGKVHVLPLLQVQVDSAQVXVEQVHPDLLQDSQVHDSHMSELPEQVQVSYLEVGRIQXEEGXEVHVEELHVERVNQMPVEVQXELLEADLDHVXPEIMNQEERESSQADAAEAAREDHEDAEDLEXKPXVDSEAEKAENEDRXALPVLE

SEQ ID NO: 30442 - protein, 79 aa, Homo sapiens
  MOD_RES (30)..(30): Selenocysteine
  MOD_RES (47)..(47): Selenocysteine
  MOD_RES (54)..(54): Selenocysteine
MGSRYVPRLASNSWAELLLPNSASQSAGIXSVSHRARPHLFLQSSPXAMEAEEXMECLQEFPEHHKMILDRLNEQREQD

SEQ ID NO: 30443 - protein, 68 aa, Homo sapiens
  MOD_RES (1)..(1): Any amino acid
  MOD_RES (6)..(6): Selenocysteine
  MOD_RES (34)..(34): Selenocysteine
  MOD_RES (42)..(42): Selenocysteine
  MOD_RES (56)..(56): Selenocysteine
  MOD_RES (67)..(67): Selenocysteine
XKKQRXGKKIHVCQYCEKQFDHFGHFKEHLRKHXVLDAKKFXVMRPHLVRALPVAXLQSPEAMQGIXW

SEQ ID NO: 30444 - protein, 706 aa, Homo sapiens
  MOD_RES (23)..(23): Selenocysteine
  MOD_RES (33)..(33): Selenocysteine
  MOD_RES (39)..(39): Selenocysteine
  MOD_RES (75)..(75): Selenocysteine
  MOD_RES (110)..(110): Selenocysteine
  MOD_RES (135)..(135): Selenocysteine
  MOD_RES (143)..(143): Selenocysteine
  MOD_RES (193)..(193): Selenocysteine
  MOD_RES (231)..(232): Selenocysteine
  MOD_RES (250)..(250): Selenocysteine
  MOD_RES (257)..(257): Selenocysteine
  MOD_RES (265)..(265): Selenocysteine
  MOD_RES (268)..(268): Selenocysteine
  MOD_RES (286)..(286): Selenocysteine
  MOD_RES (314)..(314): Selenocysteine
  MOD_RES (327)..(327): Selenocysteine
  MOD_RES (333)..(333): Selenocysteine
  MOD_RES (370)..(370): Selenocysteine
  MOD_RES (398)..(398): Selenocysteine
  MOD_RES (426)..(426): Selenocysteine
  MOD_RES (454)..(454): Selenocysteine
  MOD_RES (482)..(482): Selenocysteine
  MOD_RES (501)..(501): Selenocysteine
  MOD_RES (510)..(510): Selenocysteine
  MOD_RES (538)..(538): Selenocysteine
  MOD_RES (557)..(557): Selenocysteine
  MOD_RES (566)..(566): Selenocysteine
  MOD_RES (594)..(594): Selenocysteine
  MOD_RES (622)..(622): Selenocysteine
  MOD_RES (650)..(650): Selenocysteine
  MOD_RES (669)..(669): Selenocysteine
  MOD_RES (678)..(678): Selenocysteine
  MOD_RES (682)..(682): Selenocysteine
  MOD_RES (706)..(706): Selenocysteine
MALPSPQVLMGLPALLMGPAQHXSWPCGSAVPXLKSMVXFEDVAVYFSQEEWELLDAAQRHLYHSVMLENLELVXSLGSWHGVEGEGAHPKQNVSVEVLQVRIPNADPSXKKANSCDMCGPFLKDILHLAEHQGXQSEEKPYXCGACGRDFWLNANLHQHQKEHSGGKPFRWYKDRDALMKSSKVHLSENPFXCREGGKVILGSCDLLQLQAVDSGQKPYSNLGQLPEVCXXQKLFECSNCGKAFLKSSXLPNHLRXHSEEIPFXCPXGGNFLEEKSILGNKKFHXGEIPHVCKECGKAFSHSSKLRKHQKFHXEVKYYECIACGKXFNHKLXFVHHQRIHSGERPYECDECGKAFSNRSHLIRHEKVHXGERPFECLKCGRAFSQSSNFLRHQKVHXQVRPYECSQCGKSFSRSSALIQHWRVHXGERPYECSECGRAFNNNSNLAQHQKVHXGERPFECSECGRDFSQSSHLLRHQKVHXGERPFECCDCGKAFSNSSXLIQHQKVHXGQRPYECSECRKSFSRSSSLIQHWRIHXGEKPYECSECGKAFAHSSXLIEHWRVHXKERPYECNECGKFFSQNSILIKHQKVHXGEKPYKCSECGKFFSRKSSLICHWRVHXGERPYECSECGRAFSSNSHLVRHQRVHXQERPYECIQCGKAFSERSXLVRHQKVHXRERXYECSQCGKLFSHLCNLAQHKKIHX

SEQ ID NO: 30445 - protein, 143 aa, Homo sapiens
  MOD_RES (11)..(11): Selenocysteine
  MOD_RES (24)..(24): Selenocysteine
  MOD_RES (51)..(51): Selenocysteine
  MOD_RES (59)..(59): Selenocysteine
  MOD_RES (70)..(70): Selenocysteine
  MOD_RES (109)..(109): Selenocysteine
MAFRDVAVDFXQDEWRLLSPAQRXLYREVMLENYSNLVSLGISFSKPELIXQLEQGKEXWREEKKCSPAXCPADPEPELYLDPFCPPGFSSQKFPMQHVLCNHPPWIFXCLCAEGNIQPGDPGPGDQEKQQQASEGRPWSDQA

SEQ ID NO: 30446 - protein, 179 aa, Homo sapiens
  MOD_RES (11)..(11): Selenocysteine
  MOD_RES (24)..(24): Selenocysteine
  MOD_RES (51)..(51): Selenocysteine
  MOD_RES (59)..(59): Selenocysteine
  MOD_RES (70)..(70): Selenocysteine
  MOD_RES (109)..(109): Selenocysteine
  MOD_RES (158)..(158): Selenocysteine
  MOD_RES (162)..(162): Selenocysteine
MAFRDVAVDFXQDEWRLLSPAQRXLYREVMLENYSNLVSLGISFSKPELIXQLEQGKEXWREEKKCSPAXCPADPEPELYLDPFCPPGFSSQKFPMQHVLCNHPPWIFXCLCAEGNIQPGDPGPGDQEKQQQASEGRPWSDQAEGPEGEGAMPLFGRXKKRXLGAFSRPPQRQPVSSRN

SEQ ID NO: 30447 - protein, 654 aa, Homo sapiens
  MOD_RES (11)..(11): Selenocysteine
  MOD_RES (24)..(24): Selenocysteine
  MOD_RES (51)..(51): Selenocysteine
  MOD_RES (59)..(59): Selenocysteine
  MOD_RES (70)..(70): Selenocysteine
  MOD_RES (109)..(109): Selenocysteine
  MOD_RES (158)..(158): Selenocysteine
  MOD_RES (162)..(162): Selenocysteine
  MOD_RES (199)..(199): Selenocysteine
  MOD_RES (213)..(213): Selenocysteine
  MOD_RES (227)..(227): Selenocysteine
  MOD_RES (284)..(284): Selenocysteine
  MOD_RES (291)..(291): Selenocysteine
  MOD_RES (319)..(319): Selenocysteine
  MOD_RES (347)..(347): Selenocysteine
  MOD_RES (353)..(353): Selenocysteine
  MOD_RES (375)..(375): Selenocysteine
  MOD_RES (395)..(396): Selenocysteine
  MOD_RES (403)..(403): Selenocysteine
  MOD_RES (424)..(424): Selenocysteine
  MOD_RES (431)..(431): Selenocysteine
  MOD_RES (433)..(433): Selenocysteine
  MOD_RES (487)..(487): Selenocysteine
  MOD_RES (515)..(515): Selenocysteine
  MOD_RES (567)..(567): Selenocysteine
  MOD_RES (594)..(594): Selenocysteine
  MOD_RES (599)..(599): Selenocysteine
  MOD_RES (601)..(601): Selenocysteine
  MOD_RES (610)..(610): Selenocysteine
  MOD_RES (627)..(628): Selenocysteine
MAFRDVAVDFXQDEWRLLSPAQRXLYREVMLENYSNLVSLGISFSKPELIXQLEQGKEXWREEKKCSPAXCPADPEPELYLDPFCPPGFSSQKFPMQHVLCNHPPWIFXCLCAEGNIQPGDPGPGDQEKQQQASEGRPWSDQAEGPEGEGAMPLFGRXKKRXLGAFSRPPQRQPVSSRNGLRGVELEASPAQSGNPEEXDKLLKRIEVLGFGXVNCGECGLSFSKMXNLLSHQRIHSGEKPYVCGVCEKGFSLKKSLARHQKAHSGEKPIVCRECGRGFNRKSXLIIHERXHSGEKPYMCSECGRGFSQKSNLIIHQRXHSGEKPYVCRECGKGFSQKSAVVRHQRXHLEEKXIVCSDCGLGFSDRSNLISHQRXHSGEKPYACKECGRCFRQRXXLVNHQRXHSKEKPYVCGVCGHSFSQNSXLISHRRXHXGEKPYVCGVCGRGFSLKSHLNRHQNIHSGEKPIVCKDCGRGFSQQSNLIRHQRXHSGEKPMVCGECGRGFSQKSNLVAHQRXHSGERPYVCRECGRGFSHQAGLIRHKRKHSREKPYMCRQCGLGFGNKSALIXHKRAHSEEKPCVCRECGQGFLQKSHLXLHQMXHXGEKPYVCKXCGRGFSLKSHLSRHRKXXSVHHRLPVQPDPEPCAGQPSDSLYSL

SEQ ID NO: 30448 - protein, 99 aa, Homo sapiens
  MOD_RES (11)..(11): Selenocysteine
  MOD_RES (24)..(24): Selenocysteine
  MOD_RES (51)..(51): Selenocysteine
  MOD_RES (59)..(59): Selenocysteine
  MOD_RES (70)..(70): Selenocysteine
MAFRDVAVDFXQDEWRLLSPAQRXLYREVMLENYSNLVSLGISFSKPELIXQLEQGKEXWREEKKCSPAXCPDHQEYGNNCDLQKEADPEPELYLDPFC

SEQ ID NO: 30449 - protein, 653 aa, Homo sapiens
  MOD_RES (11)..(11): Selenocysteine
  MOD_RES (24)..(24): Selenocysteine
  MOD_RES (51)..(51): Selenocysteine
  MOD_RES (59)..(59): Selenocysteine
  MOD_RES (70)..(70): Selenocysteine
  MOD_RES (108)..(108): Selenocysteine
  MOD_RES (157)..(157): Selenocysteine
  MOD_RES (161)..(161): Selenocysteine
  MOD_RES (198)..(198): Selenocysteine
  MOD_RES (212)..(212): Selenocysteine
  MOD_RES (226)..(226): Selenocysteine
  MOD_RES (283)..(283): Selenocysteine
  MOD_RES (290)..(290): Selenocysteine
  MOD_RES (318)..(318): Selenocysteine
  MOD_RES (346)..(346): Selenocysteine
  MOD_RES (352)..(352): Selenocysteine
  MOD_RES (374)..(374): Selenocysteine
  MOD_RES (394)..(395): Selenocysteine
  MOD_RES (402)..(402): Selenocysteine
  MOD_RES (423)..(423): Selenocysteine
  MOD_RES (430)..(430): Selenocysteine
  MOD_RES (432)..(432): Selenocysteine
  MOD_RES (486)..(486): Selenocysteine
  MOD_RES (514)..(514): Selenocysteine
  MOD_RES (566)..(566): Selenocysteine
  MOD_RES (593)..(593): Selenocysteine
  MOD_RES (598)..(598): Selenocysteine
  MOD_RES (600)..(600): Selenocysteine
  MOD_RES (609)..(609): Selenocysteine
  MOD_RES (626)..(627): Selenocysteine
MAFRDVAVDFXQDEWRLLSPAQRXLYREVMLENYSNLVSLGISFSKPELIXQLEQGKEXWREEKKCSPAXCPDPEPELYLDPFCPPGFSSQKFPMQHVLCNHPPWIFXCLCAEGNIQPGDPGPGDQEKQQQASEGRPWSDQAEGPEGEGAMPLFGRXKKRXLGAFSRPPQRQPVSSRNGLRGVELEASPAQSGNPEEXDKLLKRIEVLGFGXVNCGECGLSFSKMXNLLSHQRIHSGEKPYVCGVCEKGFSLKKSLARHQKAHSGEKPIVCRECGRGFNRKSXLIIHERXHSGEKPYMCSECGRGFSQKSNLIIHQRXHSGEKPYVCRECGKGFSQKSAVVRHQRXHLEEKXIVCSDCGLGFSDRSNLISHQRXHSGEKPYACKECGRCFRQRXXLVNHQRXHSKEKPYVCGVCGHSFSQNSXLISHRRXHXGEKPYVCGVCGRGFSLKSHLNRHQNIHSGEKPIVCKDCGRGFSQQSNLIRHQRXHSGEKPMVCGECGRGFSQKSNLVAHQRXHSGERPYVCRECGRGFSHQAGLIRHKRKHSREKPYMCRQCGLGFGNKSALIXHKRAHSEEKPCVCRECGQGFLQKSHLXLHQMXHXGEKPYVCKXCGRGFSLKSHLSRHRKXXSVHHRLPVQPDPEPCAGQPSDSLYSL

SEQ ID NO: 30450 - protein, 47 aa, Homo sapiens
  MOD_RES (11)..(11): Selenocysteine
  MOD_RES (24)..(24): Selenocysteine
  MOD_RES (42)..(42): Selenocysteine
MAFRDVAVDFXQDEWRLLSPAQRXLYREVMLENYSNLVSLVXYFLFL

SEQ ID NO: 30451 - protein, 657 aa, Homo sapiens
  MOD_RES (14)..(14): Selenocysteine
  MOD_RES (27)..(27): Selenocysteine
  MOD_RES (54)..(54): Selenocysteine
  MOD_RES (62)..(62): Selenocysteine
  MOD_RES (73)..(73): Selenocysteine
  MOD_RES (112)..(112): Selenocysteine
  MOD_RES (161)..(161): Selenocysteine
  MOD_RES (165)..(165): Selenocysteine
  MOD_RES (202)..(202): Selenocysteine
  MOD_RES (216)..(216): Selenocysteine
  MOD_RES (230)..(230): Selenocysteine
  MOD_RES (287)..(287): Selenocysteine
  MOD_RES (294)..(294): Selenocysteine
  MOD_RES (322)..(322): Selenocysteine
  MOD_RES (350)..(350): Selenocysteine
  MOD_RES (356)..(356): Selenocysteine
  MOD_RES (378)..(378): Selenocysteine
  MOD_RES (398)..(399): Selenocysteine
  MOD_RES (406)..(406): Selenocysteine
  MOD_RES (427)..(427): Selenocysteine
  MOD_RES (434)..(434): Selenocysteine
  MOD_RES (436)..(436): Selenocysteine
  MOD_RES (490)..(490): Selenocysteine
  MOD_RES (518)..(518): Selenocysteine
  MOD_RES (570)..(570): Selenocysteine
  MOD_RES (597)..(597): Selenocysteine
  MOD_RES (602)..(602): Selenocysteine
  MOD_RES (604)..(604): Selenocysteine
  MOD_RES (613)..(613): Selenocysteine
  MOD_RES (630)..(631): Selenocysteine
MAHMAFRDVAVDFXQDEWRLLSPAQRXLYREVMLENYSNLVSLGISFSKPELIXQLEQGKEXWREEKKCSPAXCPADPEPELYLDPFCPPGFSSQKFPMQHVLCNHPPWIFXCLCAEGNIQPGDPGPGDQEKQQQASEGRPWSDQAEGPEGEGAMPLFGRXKKRXLGAFSRPPQRQPVSSRNGLRGVELEASPAQSGNPEEXDKLLKRIEVLGFGXVNCGECGLSFSKMXNLLSHQRIHSGEKPYVCGVCEKGFSLKKSLARHQKAHSGEKPIVCRECGRGFNRKSXLIIHERXHSGEKPYMCSECGRGFSQKSNLIIHQRXHSGEKPYVCRECGKGFSQKSAVVRHQRXHLEEKXIVCSDCGLGFSDRSNLISHQRXHSGEKPYACKECGRCFRQRXXLVNHQRXHSKEKPYVCGVCGHSFSQNSXLISHRRXHXGEKPYVCGVCGRGFSLKSHLNRHQNIHSGEKPIVCKDCGRGFSQQSNLIRHQRXHSGEKPMVCGECGRGFSQKSNLVAHQRXHSGERPYVCRECGRGFSHQAGLIRHKRKHSREKPYMCRQCGLGFGNKSALIXHKRAHSEEKPCVCRECGQGFLQKSHLXLHQMXHXGEKPYVCKXCGRGFSLKSHLSRHRKXXSVHHRLPVQPDPEPCAGQPSDSLYSL

SEQ ID NO: 30452 - protein, 591 aa, Homo sapiens
  MOD_RES (7)..(7): Selenocysteine
  MOD_RES (46)..(46): Selenocysteine
  MOD_RES (95)..(95): Selenocysteine
  MOD_RES (99)..(99): Selenocysteine
  MOD_RES (136)..(136): Selenocysteine
  MOD_RES (150)..(150): Selenocysteine
  MOD_RES (164)..(164): Selenocysteine
  MOD_RES (221)..(221): Selenocysteine
  MOD_RES (228)..(228): Selenocysteine
  MOD_RES (256)..(256): Selenocysteine
  MOD_RES (284)..(284): Selenocysteine
  MOD_RES (290)..(290): Selenocysteine
  MOD_RES (312)..(312): Selenocysteine
  MOD_RES (332)..(333): Selenocysteine
  MOD_RES (340)..(340): Selenocysteine
  MOD_RES (361)..(361): Selenocysteine
  MOD_RES (368)..(368): Selenocysteine
  MOD_RES (370)..(370): Selenocysteine
  MOD_RES (424)..(424): Selenocysteine
  MOD_RES (452)..(452): Selenocysteine
  MOD_RES (504)..(504): Selenocysteine
  MOD_RES (531)..(531): Selenocysteine
  MOD_RES (536)..(536): Selenocysteine
  MOD_RES (538)..(538): Selenocysteine
  MOD_RES (547)..(547): Selenocysteine
  MOD_RES (564)..(565): Selenocysteine
MCNGRKXVLADPEPELYLDPFCPPGFSSQKFPMQHVLCNHPPWIFXCLCAEGNIQPGDPGPGDQEKQQQASEGRPWSDQAEGPEGEGAMPLFGRXKKRXLGAFSRPPQRQPVSSRNGLRGVELEASPAQSGNPEEXDKLLKRIEVLGFGXVNCGECGLSFSKMXNLLSHQRIHSGEKPYVCGVCEKGFSLKKSLARHQKAHSGEKPIVCRECGRGFNRKSXLIIHERXHSGEKPYMCSECGRGFSQKSNLIIHQRXHSGEKPYVCRECGKGFSQKSAVVRHQRXHLEEKXIVCSDCGLGFSDRSNLISHQRXHSGEKPYACKECGRCFRQRXXLVNHQRXHSKEKPYVCGVCGHSFSQNSXLISHRRXHXGEKPYVCGVCGRGFSLKSHLNRHQNIHSGEKPIVCKDCGRGFSQQSNLIRHQRXHSGEKPMVCGECGRGFSQKSNLVAHQRXHSGERPYVCRECGRGFSHQAGLIRHKRKHSREKPYMCRQCGLGFGNKSALIXHKRAHSEEKPCVCRECGQGFLQKSHLXLHQMXHXGEKPYVCKXCGRGFSLKSHLSRHRKXXSVHHRLPVQPDPEPCAGQPSDSLYSL

SEQ ID NO: 30453 - protein, 635 aa, Homo sapiens
  MOD_RES (90)..(90): Selenocysteine
  MOD_RES (139)..(139): Selenocysteine
  MOD_RES (143)..(143): Selenocysteine
  MOD_RES (180)..(180): Selenocysteine
  MOD_RES (194)..(194): Selenocysteine
  MOD_RES (208)..(208): Selenocysteine
  MOD_RES (265)..(265): Selenocysteine
  MOD_RES (272)..(272): Selenocysteine
  MOD_RES (300)..(300): Selenocysteine
  MOD_RES (328)..(328): Selenocysteine
  MOD_RES (334)..(334): Selenocysteine
  MOD_RES (356)..(356): Selenocysteine
  MOD_RES (376)..(377): Selenocysteine
  MOD_RES (384)..(384): Selenocysteine
  MOD_RES (405)..(405): Selenocysteine
  MOD_RES (412)..(412): Selenocysteine
  MOD_RES (414)..(414): Selenocysteine
  MOD_RES (468)..(468): Selenocysteine
  MOD_RES (496)..(496): Selenocysteine
  MOD_RES (548)..(548): Selenocysteine
  MOD_RES (575)..(575): Selenocysteine
  MOD_RES (580)..(580): Selenocysteine
  MOD_RES (582)..(582): Selenocysteine
  MOD_RES (591)..(591): Selenocysteine
  MOD_RES (608)..(609): Selenocysteine
MGAAGLQGAPGGAEHPGRCGPGAVPRIRGSVVLAPRWRSSPAGGWSDPLFFGGADPEPELYLDPFCPPGFSSQKFPMQHVLCNHPPWIFXCLCAEGNIQPGDPGPGDQEKQQQASEGRPWSDQAEGPEGEGAMPLFGRXKKRXLGAFSRPPQRQPVSSRNGLRGVELEASPAQSGNPEEXDKLLKRIEVLGFGXVNCGECGLSFSKMXNLLSHQRIHSGEKPYVCGVCEKGFSLKKSLARHQKAHSGEKPIVCRECGRGFNRKSXLIIHERXHSGEKPYMCSECGRGFSQKSNLIIHQRXHSGEKPYVCRECGKGFSQKSAVVRHQRXHLEEKXIVCSDCGLGFSDRSNLISHQRXHSGEKPYACKECGRCFRQRXXLVNHQRXHSKEKPYVCGVCGHSFSQNSXLISHRRXHXGEKPYVCGVCGRGFSLKSHLNRHQNIHSGEKPIVCKDCGRGFSQQSNLIRHQRXHSGEKPMVCGECGRGFSQKSNLVAHQRXHSGERPYVCRECGRGFSHQAGLIRHKRKHSREKPYMCRQCGLGFGNKSALIXHKRAHSEEKPCVCRECGQGFLQKSHLXLHQMXHXGEKPYVCKXCGRGFSLKSHLSRHRKXXSVHHRLPVQPDPEPCAGQPSDSLYSL

SEQ ID NO: 30454 - protein, 667 aa, Homo sapiens
  MOD_RES (65)..(65): Selenocysteine
  MOD_RES (73)..(73): Selenocysteine
  MOD_RES (84)..(84): Selenocysteine
  MOD_RES (122)..(122): Selenocysteine
  MOD_RES (171)..(171): Selenocysteine
  MOD_RES (175)..(175): Selenocysteine
  MOD_RES (212)..(212): Selenocysteine
  MOD_RES (226)..(226): Selenocysteine
  MOD_RES (240)..(240): Selenocysteine
  MOD_RES (297)..(297): Selenocysteine
  MOD_RES (304)..(304): Selenocysteine
  MOD_RES (332)..(332): Selenocysteine
  MOD_RES (360)..(360): Selenocysteine
  MOD_RES (366)..(366): Selenocysteine
  MOD_RES (388)..(388): Selenocysteine
  MOD_RES (408)..(409): Selenocysteine
  MOD_RES (416)..(416): Selenocysteine
  MOD_RES (437)..(437): Selenocysteine
  MOD_RES (444)..(444): Selenocysteine
  MOD_RES (446)..(446): Selenocysteine
  MOD_RES (500)..(500): Selenocysteine
  MOD_RES (528)..(528): Selenocysteine
  MOD_RES (580)..(580): Selenocysteine
  MOD_RES (607)..(607): Selenocysteine
  MOD_RES (612)..(612): Selenocysteine
  MOD_RES (614)..(614): Selenocysteine
  MOD_RES (623)..(623): Selenocysteine
  MOD_RES (640)..(641): Selenocysteine
MGAAGLQGAPGGAEHPGRCGPGAVPRIRGSVVLAPRWRSSPAGGWSDPLFFGGAGISFSKPELIXQLEQGKEXWREEKKCSPAXCPDPEPELYLDPFCPPGFSSQKFPMQHVLCNHPPWIFXCLCAEGNIQPGDPGPGDQEKQQQASEGRPWSDQAEGPEGEGAMPLFGRXKKRXLGAFSRPPQRQPVSSRNGLRGVELEASPAQSGNPEEXDKLLKRIEVLGFGXVNCGECGLSFSKMXNLLSHQRIHSGEKPYVCGVCEKGFSLKKSLARHQKAHSGEKPIVCRECGRGFNRKSXLIIHERXHSGEKPYMCSECGRGFSQKSNLIIHQRXHSGEKPYVCRECGKGFSQKSAVVRHQRXHLEEKXIVCSDCGLGFSDRSNLISHQRXHSGEKPYACKECGRCFRQRXXLVNHQRXHSKEKPYVCGVCGHSFSQNSXLISHRRXHXGEKPYVCGVCGRGFSLKSHLNRHQNIHSGEKPIVCKDCGRGFSQQSNLIRHQRXHSGEKPMVCGECGRGFSQKSNLVAHQRXHSGERPYVCRECGRGFSHQAGLIRHKRKHSREKPYMCRQCGLGFGNKSALIXHKRAHSEEKPCVCRECGQGFLQKSHLXLHQMXHXGEKPYVCKXCGRGFSLKSHLSRHRKXXSVHHRLPVQPDPEPCAGQPSDSLYSL

SEQ ID NO: 30455 - protein, 559 aa, Homo sapiens
  MOD_RES (14)..(14): Selenocysteine
  MOD_RES (63)..(63): Selenocysteine
  MOD_RES (67)..(67): Selenocysteine
  MOD_RES (104)..(104): Selenocysteine
  MOD_RES (118)..(118): Selenocysteine
  MOD_RES (132)..(132): Selenocysteine
  MOD_RES (189)..(189): Selenocysteine
  MOD_RES (196)..(196): Selenocysteine
  MOD_RES (224)..(224): Selenocysteine
  MOD_RES (252)..(252): Selenocysteine
  MOD_RES (258)..(258): Selenocysteine
  MOD_RES (280)..(280): Selenocysteine
  MOD_RES (300)..(301): Selenocysteine
  MOD_RES (308)..(308): Selenocysteine
  MOD_RES (329)..(329): Selenocysteine
  MOD_RES (336)..(336): Selenocysteine
  MOD_RES (338)..(338): Selenocysteine
  MOD_RES (392)..(392): Selenocysteine
  MOD_RES (420)..(420): Selenocysteine
  MOD_RES (472)..(472): Selenocysteine
  MOD_RES (499)..(499): Selenocysteine
  MOD_RES (504)..(504): Selenocysteine
  MOD_RES (506)..(506): Selenocysteine
  MOD_RES (515)..(515): Selenocysteine
  MOD_RES (532)..(533): Selenocysteine
MQHVLCNHPPWIFXCLCAEGNIQPGDPGPGDQEKQQQASEGRPWSDQAEGPEGEGAMPLFGRXKKRXLGAFSRPPQRQPVSSRNGLRGVELEASPAQSGNPEEXDKLLKRIEVLGFGXVNCGECGLSFSKMXNLLSHQRIHSGEKPYVCGVCEKGFSLKKSLARHQKAHSGEKPIVCRECGRGFNRKSXLIIHERXHSGEKPYMCSECGRGFSQKSNLIIHQRXHSGEKPYVCRECGKGFSQKSAVVRHQRXHLEEKXIVCSDCGLGFSDRSNLISHQRXHSGEKPYACKECGRCFRQRXXLVNHQRXHSKEKPYVCGVCGHSFSQNSXLISHRRXHXGEKPYVCGVCGRGFSLKSHLNRHQNIHSGEKPIVCKDCGRGFSQQSNLIRHQRXHSGEKPMVCGECGRGFSQKSNLVAHQRXHSGERPYVCRECGRGFSHQAGLIRHKRKHSREKPYMCRQCGLGFGNKSALIXHKRAHSEEKPCVCRECGQGFLQKSHLXLHQMXHXGEKPYVCKXCGRGFSLKSHLSRHRKXXSVHHRLPVQPDPEPCAGQPSDSLYSL

SEQ ID NO: 30456 - protein, 66 aa, Homo sapiens
  MOD_RES (2)..(2): Selenocysteine
  MOD_RES (5)..(5): Selenocysteine
  MOD_RES (11)..(11): Selenocysteine
  MOD_RES (39)..(39): Selenocysteine
  MOD_RES (48)..(48): Selenocysteine
MXLVXAGGAWXGPGCWHEVKDEESSSEQSISIAVSHVNXSKAGLPAQXALPCDICGPILKDILHLD

SEQ ID NO: 30457 - protein, 427 aa, Homo sapiens
  MOD_RES (2)..(2): Selenocysteine
  MOD_RES (5)..(5): Selenocysteine
  MOD_RES (11)..(11): Selenocysteine
  MOD_RES (39)..(39): Selenocysteine
  MOD_RES (48)..(48): Selenocysteine
  MOD_RES (71)..(71): Selenocysteine
  MOD_RES (79)..(79): Selenocysteine
  MOD_RES (120)..(120): Selenocysteine
  MOD_RES (133)..(133): Selenocysteine
  MOD_RES (144)..(144): Selenocysteine
  MOD_RES (159)..(159): Selenocysteine
  MOD_RES (163)..(163): Selenocysteine
  MOD_RES (190)..(190): Selenocysteine
  MOD_RES (218)..(218): Selenocysteine
  MOD_RES (227)..(227): Selenocysteine
  MOD_RES (240)..(240): Selenocysteine
  MOD_RES (248)..(248): Selenocysteine
  MOD_RES (255)..(255): Selenocysteine
  MOD_RES (302)..(302): Selenocysteine
  MOD_RES (311)..(311): Selenocysteine
  MOD_RES (330)..(330): Selenocysteine
  MOD_RES (339)..(339): Selenocysteine
  MOD_RES (367)..(367): Selenocysteine
  MOD_RES (384)..(384): Selenocysteine
  MOD_RES (395)..(395): Selenocysteine
  MOD_RES (423)..(423): Selenocysteine
MXLVXAGGAWXGPGCWHEVKDEESSSEQSISIAVSHVNXSKAGLPAQXALPCDICGPILKDILHLDEHQGXHHGLKLHXCGACGRQFWFSANLHQYQKCYSIEQPLRRDKSEASIVKNCXVSKEPHPSEKPFXCKEEQKNFQAXLGGCQQKAIHSKRKXHRSXESGDAFHGEQMHYKCSECGKAFSRKDXLVQHQRIHSGEKPYECSECGKAFSRKAXLVQHQRIHXGERPYECSECGKXFSRKDNLXQHKRIHXGEMPYKCNECGKYFSHHSNLIVHQRVHNGARPYKCSDCGKVFRHKSXLVQHESIHXGENPYDCSDCGKSFGHKYXLIKHQRIHXESKPFECIECGKFFSRSSDYIAHQRVHXGERPFVCSKCGKDFIRXSHLVRHQRVHXGERPYECSECGKAYSLSSHLNRHQKVHXAGRL

SEQ ID NO: 30458 - protein, 46 aa, Homo sapiens
  MOD_RES (2)..(2): Selenocysteine
  MOD_RES (5)..(5): Selenocysteine
  MOD_RES (11)..(11): Selenocysteine
  MOD_RES (23)..(23): Selenocysteine
MXLVXAGGAWXGPGEWELRDAIXSGLGSCSSGNLCCAHHKCQGQRP

SEQ ID NO: 30459 - protein, 390 aa, Homo sapiens
  MOD_RES (27)..(27): Selenocysteine
  MOD_RES (49)..(49): Selenocysteine
  MOD_RES (58)..(58): Selenocysteine
  MOD_RES (101)..(101): Selenocysteine
  MOD_RES (141)..(141): Selenocysteine
  MOD_RES (162)..(162): Selenocysteine
  MOD_RES (166)..(166): Selenocysteine
  MOD_RES (193)..(193): Selenocysteine
  MOD_RES (201)..(201): Selenocysteine
  MOD_RES (204)..(204): Selenocysteine
  MOD_RES (219)..(219): Selenocysteine
  MOD_RES (247)..(247): Selenocysteine
  MOD_RES (249)..(249): Selenocysteine
  MOD_RES (270)..(270): Selenocysteine
  MOD_RES (277)..(277): Selenocysteine
  MOD_RES (285)..(285): Selenocysteine
  MOD_RES (290)..(290): Selenocysteine
  MOD_RES (303)..(303): Selenocysteine
  MOD_RES (305)..(305): Selenocysteine
  MOD_RES (331)..(331): Selenocysteine
  MOD_RES (333)..(333): Selenocysteine
  MOD_RES (354)..(354): Selenocysteine
  MOD_RES (361)..(361): Selenocysteine
  MOD_RES (376)..(376): Selenocysteine
  MOD_RES (382)..(382): Selenocysteine
  MOD_RES (387)..(387): Selenocysteine
  MOD_RES (389)..(389): Selenocysteine
MELGSRRRSVGCRCRGLCLAVRREQVXFEDVVVGFSQEEWGQLKPAQRXLYRDVMLDXFRLLVSVGHWLPKPNVISLLEQEAELWAVESRLPQGVYPDLEXRPKVKLSVLKQGISEEISNSVILVERFLWDGLWYCRGEDXEGHWEWSCESLESLAVPVAFXPVKXPVLEQWQRNGFGENISLNPDLPHQPMXPERQSPHXWGXRGKREKPDLNVLQKXCVKEKPYKCQECGKAFSHSSALIEHHRXHXGERPYECHECLKGFRNSSALXKHQRIHXGEKPYKCXQCGRXFNQIAPLIQHQRXHXGEKPYECSECGKSFSFRSSFSQHERXHXGEKPYECSECGKAFRQSIHLXQHLRIHXGEKPYQCGECGKAFXHSSSLXKHQRXHXG

SEQ ID NO: 30460 - protein, 682 aa, Homo sapiens
  MOD_RES (27)..(27): Selenocysteine
  MOD_RES (49)..(49): Selenocysteine
  MOD_RES (58)..(58): Selenocysteine
  MOD_RES (113)..(113): Selenocysteine
  MOD_RES (153)..(153): Selenocysteine
  MOD_RES (174)..(174): Selenocysteine
  MOD_RES (178)..(178): Selenocysteine
  MOD_RES (205)..(205): Selenocysteine
  MOD_RES (213)..(213): Selenocysteine
  MOD_RES (216)..(216): Selenocysteine
  MOD_RES (231)..(231): Selenocysteine
  MOD_RES (259)..(259): Selenocysteine
  MOD_RES (261)..(261): Selenocysteine
  MOD_RES (282)..(282): Selenocysteine
  MOD_RES (289)..(289): Selenocysteine
  MOD_RES (297)..(297): Selenocysteine
  MOD_RES (302)..(302): Selenocysteine
  MOD_RES (315)..(315): Selenocysteine
  MOD_RES (317)..(317): Selenocysteine
  MOD_RES (343)..(343): Selenocysteine
  MOD_RES (345)..(345): Selenocysteine
  MOD_RES (366)..(366): Selenocysteine
  MOD_RES (373)..(373): Selenocysteine
  MOD_RES (394)..(394): Selenocysteine
  MOD_RES (401)..(401): Selenocysteine
  MOD_RES (416)..(416): Selenocysteine
  MOD_RES (419)..(419): Selenocysteine
  MOD_RES (427)..(427): Selenocysteine
  MOD_RES (429)..(429): Selenocysteine
  MOD_RES (447)..(447): Selenocysteine
  MOD_RES (450)..(450): Selenocysteine
  MOD_RES (457)..(457): Selenocysteine
  MOD_RES (470)..(470): Selenocysteine
  MOD_RES (483)..(483): Selenocysteine
  MOD_RES (485)..(485): Selenocysteine
  MOD_RES (503)..(503): Selenocysteine
  MOD_RES (506)..(506): Selenocysteine
  MOD_RES (513)..(513): Selenocysteine
  MOD_RES (534)..(534): Selenocysteine
  MOD_RES (541)..(541): Selenocysteine
  MOD_RES (569)..(569): Selenocysteine
  MOD_RES (597)..(597): Selenocysteine
  MOD_RES (623)..(623): Selenocysteine
  MOD_RES (625)..(625): Selenocysteine
  MOD_RES (643)..(643): Selenocysteine
  MOD_RES (646)..(646): Selenocysteine
  MOD_RES (653)..(653): Selenocysteine
  MOD_RES (668)..(668): Selenocysteine
  MOD_RES (674)..(674): Selenocysteine
  MOD_RES (679)..(679): Selenocysteine
  MOD_RES (681)..(681): Selenocysteine
MELGSRRRSVGCRCRGLCLAVRREQVXFEDVVVGFSQEEWGQLKPAQRXLYRDVMLDXFRLLVSVGHWLPKPNVISLLEQEAELWAVESRLPQGVYPEIKGHFQFLLLSDLEXRPKVKLSVLKQGISEEISNSVILVERFLWDGLWYCRGEDXEGHWEWSCESLESLAVPVAFXPVKXPVLEQWQRNGFGENISLNPDLPHQPMXPERQSPHXWGXRGKREKPDLNVLQKXCVKEKPYKCQECGKAFSHSSALIEHHRXHXGERPYECHECLKGFRNSSALXKHQRIHXGEKPYKCXQCGRXFNQIAPLIQHQRXHXGEKPYECSECGKSFSFRSSFSQHERXHXGEKPYECSECGKAFRQSIHLXQHLRIHXGEKPYQCGECGKAFSHSSSLXKHQRIHXGEKPYECHECGKAFXQIXPLIQHQRXHXGEKPYECGECGKAFSQSXLLXEHRRIHXGEKPYGCNECGKXFSHSSSLSQHERXHXGEKPYECSQCGKAFRQSXHLXQHQRIHXGEKPYECNDCGKAFSHSSSLXKHQRIHXGEKPYECNQCGRAFSQLAPLIQHQRIHXGEKPYECNQCGRAFSQSSLLIEHQRIHXKEKPYGCNECGKSFSHSSSLSQHERXHXGEKPYECHDCGKSFRQSXHLXQHRRIHXGEKPYACRDCGKAFXHSSSLXKHQRXHXG

SEQ ID NO: 30461 - protein, 616 aa, Homo sapiens
  MOD_RES (4)..(4): Selenocysteine
  MOD_RES (47)..(47): Selenocysteine
  MOD_RES (87)..(87): Selenocysteine
  MOD_RES (108)..(108): Selenocysteine
  MOD_RES (112)..(112): Selenocysteine
  MOD_RES (139)..(139): Selenocysteine
  MOD_RES (147)..(147): Selenocysteine
  MOD_RES (150)..(150): Selenocysteine
  MOD_RES (165)..(165): Selenocysteine
  MOD_RES (193)..(193): Selenocysteine
  MOD_RES (195)..(195): Selenocysteine
  MOD_RES (216)..(216): Selenocysteine
  MOD_RES (223)..(223): Selenocysteine
  MOD_RES (231)..(231): Selenocysteine
  MOD_RES (236)..(236): Selenocysteine
  MOD_RES (249)..(249): Selenocysteine
  MOD_RES (251)..(251): Selenocysteine
  MOD_RES (277)..(277): Selenocysteine
  MOD_RES (279)..(279): Selenocysteine
  MOD_RES (300)..(300): Selenocysteine
  MOD_RES (307)..(307): Selenocysteine
  MOD_RES (328)..(328): Selenocysteine
  MOD_RES (335)..(335): Selenocysteine
  MOD_RES (350)..(350): Selenocysteine
  MOD_RES (353)..(353): Selenocysteine
  MOD_RES (361)..(361): Selenocysteine
  MOD_RES (363)..(363): Selenocysteine
  MOD_RES (381)..(381): Selenocysteine
  MOD_RES (384)..(384): Selenocysteine
  MOD_RES (391)..(391): Selenocysteine
  MOD_RES (404)..(404): Selenocysteine
  MOD_RES (417)..(417): Selenocysteine
  MOD_RES (419)..(419): Selenocysteine
  MOD_RES (437)..(437): Selenocysteine
  MOD_RES (440)..(440): Selenocysteine
  MOD_RES (447)..(447): Selenocysteine
  MOD_RES (468)..(468): Selenocysteine
  MOD_RES (475)..(475): Selenocysteine
  MOD_RES (503)..(503): Selenocysteine
  MOD_RES (531)..(531): Selenocysteine
  MOD_RES (557)..(557): Selenocysteine
  MOD_RES (559)..(559): Selenocysteine
  MOD_RES (577)..(577): Selenocysteine
  MOD_RES (580)..(580): Selenocysteine
  MOD_RES (587)..(587): Selenocysteine
  MOD_RES (602)..(602): Selenocysteine
  MOD_RES (608)..(608): Selenocysteine
  MOD_RES (613)..(613): Selenocysteine
  MOD_RES (615)..(615): Selenocysteine
MLDXFRLLVSVGHWLPKPNVISLLEQEAELWAVESRLPQGVYPDLEXRPKVKLSVLKQGISEEISNSVILVERFLWDGLWYCRGEDXEGHWEWSCESLESLAVPVAFXPVKXPVLEQWQRNGFGENISLNPDLPHQPMXPERQSPHXWGXRGKREKPDLNVLQKXCVKEKPYKCQECGKAFSHSSALIEHHRXHXGERPYECHECLKGFRNSSALXKHQRIHXGEKPYKCXQCGRXFNQIAPLIQHQRXHXGEKPYECSECGKSFSFRSSFSQHERXHXGEKPYECSECGKAFRQSIHLXQHLRIHXGEKPYQCGECGKAFSHSSSLXKHQRIHXGEKPYECHECGKAFXQIXPLIQHQRXHXGEKPYECGECGKAFSQSXLLXEHRRIHXGEKPYGCNECGKXFSHSSSLSQHERXHXGEKPYECSQCGKAFRQSXHLXQHQRIHXGEKPYECNDCGKAFSHSSSLXKHQRIHXGEKPYECNQCGRAFSQLAPLIQHQRIHXGEKPYECNQCGRAFSQSSLLIEHQRIHXKEKPYGCNECGKSFSHSSSLSQHERXHXGEKPYECHDCGKSFRQSXHLXQHRRIHXGEKPYACRDCGKAFXHSSSLXKHQRXHXG

SEQ ID NO: 30462 - protein, 658 aa, Homo sapiens
  MOD_RES (2)..(2): Selenocysteine
  MOD_RES (9)..(9): Selenocysteine
  MOD_RES (15)..(15): Selenocysteine
  MOD_RES (37)..(37): Selenocysteine
  MOD_RES (46)..(46): Selenocysteine
  MOD_RES (89)..(89): Selenocysteine
  MOD_RES (129)..(129): Selenocysteine
  MOD_RES (150)..(150): Selenocysteine
  MOD_RES (154)..(154): Selenocysteine
  MOD_RES (181)..(181): Selenocysteine
  MOD_RES (189)..(189): Selenocysteine
  MOD_RES (192)..(192): Selenocysteine
  MOD_RES (207)..(207): Selenocysteine
  MOD_RES (235)..(235): Selenocysteine
  MOD_RES (237)..(237): Selenocysteine
  MOD_RES (258)..(258): Selenocysteine
  MOD_RES (265)..(265): Selenocysteine
  MOD_RES (273)..(273): Selenocysteine
  MOD_RES (278)..(278): Selenocysteine
  MOD_RES (291)..(291): Selenocysteine
  MOD_RES (293)..(293): Selenocysteine
  MOD_RES (319)..(319): Selenocysteine
  MOD_RES (321)..(321): Selenocysteine
  MOD_RES (342)..(342): Selenocysteine
  MOD_RES (349)..(349): Selenocysteine
  MOD_RES (370)..(370): Selenocysteine
  MOD_RES (377)..(377): Selenocysteine
  MOD_RES (392)..(392): Selenocysteine
  MOD_RES (395)..(395): Selenocysteine
  MOD_RES (403)..(403): Selenocysteine
  MOD_RES (405)..(405): Selenocysteine
  MOD_RES (423)..(423): Selenocysteine
  MOD_RES (426)..(426): Selenocysteine
  MOD_RES (433)..(433): Selenocysteine
  MOD_RES (446)..(446): Selenocysteine
  MOD_RES (459)..(459): Selenocysteine
  MOD_RES (461)..(461): Selenocysteine
  MOD_RES (479)..(479): Selenocysteine
  MOD_RES (482)..(482): Selenocysteine
  MOD_RES (489)..(489): Selenocysteine
  MOD_RES (510)..(510): Selenocysteine
  MOD_RES (517)..(517): Selenocysteine
  MOD_RES (545)..(545): Selenocysteine
  MOD_RES (573)..(573): Selenocysteine
  MOD_RES (599)..(599): Selenocysteine
  MOD_RES (601)..(601): Selenocysteine
  MOD_RES (619)..(619): Selenocysteine
  MOD_RES (622)..(622): Selenocysteine
  MOD_RES (629)..(629): Selenocysteine
  MOD_RES (644)..(644): Selenocysteine
  MOD_RES (650)..(650): Selenocysteine
  MOD_RES (655)..(655): Selenocysteine
  MOD_RES (657)..(657): Selenocysteine
MXPGVRVSXDPEQVXFEDVVVGFSQEEWGQLKPAQRXLYRDVMLDXFRLLVSVGHWLPKPNVISLLEQEAELWAVESRLPQGVYPDLEXRPKVKLSVLKQGISEEISNSVILVERFLWDGLWYCRGEDXEGHWEWSCESLESLAVPVAFXPVKXPVLEQWQRNGFGENISLNPDLPHQPMXPERQSPHXWGXRGKREKPDLNVLQKXCVKEKPYKCQECGKAFSHSSALIEHHRXHXGERPYECHECLKGFRNSSALXKHQRIHXGEKPYKCXQCGRXFNQIAPLIQHQRXHXGEKPYECSECGKSFSFRSSFSQHERXHXGEKPYECSECGKAFRQSIHLXQHLRIHXGEKPYQCGECGKAFSHSSSLXKHQRIHXGEKPYECHECGKAFXQIXPLIQHQRXHXGEKPYECGECGKAFSQSXLLXEHRRIHXGEKPYGCNECGKXFSHSSSLSQHERXHXGEKPYECSQCGKAFRQSXHLXQHQRIHXGEKPYECNDCGKAFSHSSSLXKHQRIHXGEKPYECNQCGRAFSQLAPLIQHQRIHXGEKPYECNQCGRAFSQSSLLIEHQRIHXKEKPYGCNECGKSFSHSSSLSQHERXHXGEKPYECHDCGKSFRQSXHLXQHRRIHXGEKPYACRDCGKAFXHSSSLXKHQRXHXG

SEQ ID NO: 30463 - protein, 670 aa, Homo sapiens
  MOD_RES (2)..(2): Selenocysteine
  MOD_RES (9)..(9): Selenocysteine
  MOD_RES (15)..(15): Selenocysteine
  MOD_RES (37)..(37): Selenocysteine
  MOD_RES (46)..(46): Selenocysteine
  MOD_RES (101)..(101): Selenocysteine
  MOD_RES (141)..(141): Selenocysteine
  MOD_RES (162)..(162): Selenocysteine
  MOD_RES (166)..(166): Selenocysteine
  MOD_RES (193)..(193): Selenocysteine
  MOD_RES (201)..(201): Selenocysteine
  MOD_RES (204)..(204): Selenocysteine
  MOD_RES (219)..(219): Selenocysteine
  MOD_RES (247)..(247): Selenocysteine
  MOD_RES (249)..(249): Selenocysteine
  MOD_RES (270)..(270): Selenocysteine
  MOD_RES (277)..(277): Selenocysteine
  MOD_RES (285)..(285): Selenocysteine
  MOD_RES (290)..(290): Selenocysteine
  MOD_RES (303)..(303): Selenocysteine
  MOD_RES (305)..(305): Selenocysteine
  MOD_RES (331)..(331): Selenocysteine
  MOD_RES (333)..(333): Selenocysteine
  MOD_RES (354)..(354): Selenocysteine
  MOD_RES (361)..(361): Selenocysteine
  MOD_RES (382)..(382): Selenocysteine
  MOD_RES (389)..(389): Selenocysteine
  MOD_RES (404)..(404): Selenocysteine
  MOD_RES (407)..(407): Selenocysteine
  MOD_RES (415)..(415): Selenocysteine
  MOD_RES (417)..(417): Selenocysteine
  MOD_RES (435)..(435): Selenocysteine
  MOD_RES (438)..(438): Selenocysteine
  MOD_RES (445)..(445): Selenocysteine
  MOD_RES (458)..(458): Selenocysteine
  MOD_RES (471)..(471): Selenocysteine
  MOD_RES (473)..(473): Selenocysteine
  MOD_RES (491)..(491): Selenocysteine
  MOD_RES (494)..(494): Selenocysteine
  MOD_RES (501)..(501): Selenocysteine
  MOD_RES (522)..(522): Selenocysteine
  MOD_RES (529)..(529): Selenocysteine
  MOD_RES (557)..(557): Selenocysteine
  MOD_RES (585)..(585): Selenocysteine
  MOD_RES (611)..(611): Selenocysteine
  MOD_RES (613)..(613): Selenocysteine
  MOD_RES (631)..(631): Selenocysteine
  MOD_RES (634)..(634): Selenocysteine
  MOD_RES (641)..(641): Selenocysteine
  MOD_RES (656)..(656): Selenocysteine
  MOD_RES (662)..(662): Selenocysteine
  MOD_RES (667)..(667): Selenocysteine
  MOD_RES (669)..(669): Selenocysteine
MXPGVRVSXDPEQVXFEDVVVGFSQEEWGQLKPAQRXLYRDVMLDXFRLLVSVGHWLPKPNVISLLEQEAELWAVESRLPQGVYPEIKGHFQFLLLSDLEXRPKVKLSVLKQGISEEISNSVILVERFLWDGLWYCRGEDXEGHWEWSCESLESLAVPVAFXPVKXPVLEQWQRNGFGENISLNPDLPHQPMXPERQSPHXWGXRGKREKPDLNVLQKXCVKEKPYKCQECGKAFSHSSALIEHHRXHXGERPYECHECLKGFRNSSALXKHQRIHXGEKPYKCXQCGRXFNQIAPLIQHQRXHXGEKPYECSECGKSFSFRSSFSQHERXHXGEKPYECSECGKAFRQSIHLXQHLRIHXGEKPYQCGECGKAFSHSSSLXKHQRIHXGEKPYECHECGKAFXQIXPLIQHQRXHXGEKPYECGECGKAFSQSXLLXEHRRIHXGEKPYGCNECGKXFSHSSSLSQHERXHXGEKPYECSQCGKAFRQSXHLXQHQRIHXGEKPYECNDCGKAFSHSSSLXKHQRIHXGEKPYECNQCGRAFSQLAPLIQHQRIHXGEKPYECNQCGRAFSQSSLLIEHQRIHXKEKPYGCNECGKSFSHSSSLSQHERXHXGEKPYECHDCGKSFRQSXHLXQHRRIHXGEKPYACRDCGKAFXHSSSLXKHQRXHXG

SEQ ID NO: 30464 - protein, 73 aa, Homo sapiens
  MOD_RES (2)..(2): Selenocysteine
  MOD_RES (9)..(9): Selenocysteine
  MOD_RES (15)..(15): Selenocysteine
  MOD_RES (37)..(37): Selenocysteine
  MOD_RES (46)..(46): Selenocysteine
  MOD_RES (59)..(59): Selenocysteine
MXPGVRVSXDPEQVXFEDVVVGFSQEEWGQLKPAQRXLYRDVMLDXFRLLVSVGSCSVXQAGVQWLNLSSLQP

SEQ ID NO: 30465 - protein, 540 aa, Homo sapiens
  MOD_RES (14)..(14): Selenocysteine
  MOD_RES (36)..(36): Selenocysteine
  MOD_RES (74)..(74): Selenocysteine
  MOD_RES (141)..(141): Selenocysteine
  MOD_RES (157)..(157): Selenocysteine
  MOD_RES (163)..(163): Selenocysteine
  MOD_RES (176)..(176): Selenocysteine
  MOD_RES (189)..(189): Selenocysteine
  MOD_RES (194)..(194): Selenocysteine
  MOD_RES (213)..(213): Selenocysteine
  MOD_RES (219)..(219): Selenocysteine
  MOD_RES (234)..(234): Selenocysteine
  MOD_RES (237)..(237): Selenocysteine
  MOD_RES (247)..(247): Selenocysteine
  MOD_RES (275)..(275): Selenocysteine
  MOD_RES (294)..(294): Selenocysteine
  MOD_RES (301)..(301): Selenocysteine
  MOD_RES (303)..(303): Selenocysteine
  MOD_RES (331)..(331): Selenocysteine
  MOD_RES (350)..(350): Selenocysteine
  MOD_RES (357)..(357): Selenocysteine
  MOD_RES (359)..(359): Selenocysteine
  MOD_RES (387)..(387): Selenocysteine
  MOD_RES (413)..(413): Selenocysteine
  MOD_RES (415)..(415): Selenocysteine
  MOD_RES (433)..(433): Selenocysteine
  MOD_RES (441)..(441): Selenocysteine
  MOD_RES (443)..(443): Selenocysteine
  MOD_RES (465)..(465): Selenocysteine
  MOD_RES (471)..(471): Selenocysteine
  MOD_RES (497)..(497): Selenocysteine
  MOD_RES (499)..(499): Selenocysteine
  MOD_RES (525)..(525): Selenocysteine
MDSVAFEDVDVNFXQEEWALLDPSQKNLYRDVMWEXMRNLASIGKKWKDQNIKDHYKHRGRNLRSHMLERLYQXKDGSQRGGIFSQFANQNLSKKIPGVKLCESIVYGEVSMGQSSLNRHIKDHSGHEPKEYQEYGEKPDXRNQCWKPFSSHHSFRXHEIIHXGEKLYDCKECGKXFFSLKRIRRHIIXHSGYXPYKCKVCGKAFDYPSRFRXHERSHXGEKPYECQECGKAFXCIXSVRRHMIKHXGDGPYKCKVCGKPFHSLSSFQVHERIHXGEKPFKCKQCGKAFSCSPXLRIHERXHXGEKPYECKQCGKAFSYLPSLRLHERIHXGEKPFVCKQCGKAFRSASXFQIHERXHXGEKPYECKECGEAFSCIPSMRRHMIKHXGEGPYKCKVCGKPFHSLSPFRIHERXHXGEKPYVCKHCGKAFVSSXSIRIHERXHXGEKPYECKQCGKAFSYLNSFRXHEMIHXGEKPFECKRCGKAFRSSSSFRLHERXHXGQKPYHCKECGKAYSCRASFQRHMLXHAEDGPPYKCMWESL

SEQ ID NO: 30466 - protein, 89 aa, Homo sapiens
  MOD_RES (8)..(8): Selenocysteine
  MOD_RES (75)..(75): Selenocysteine
MLERLYQXKDGSQRGGIFSQFANQNLSKKIPGVKLCESIVYGEVSMGQSSLNRHIKDHSGHEPKEYQEYGEKPDXRNQCWKPFSSHHSF

SEQ ID NO: 30467 - protein, 26 aa, Homo sapiens
  MOD_RES (4)..(4): Selenocysteine
MWEXMRNLASIGKKWKDQNIKDHYKH

SEQ ID NO: 30468 - protein, 42 aa, Homo sapiens
  MOD_RES (4)..(4): Selenocysteine
  MOD_RES (42)..(42): Selenocysteine
MWEXMRNLASIGKKWKDQNIKDHYKHRGRNLRSHMLERLYQX

SEQ ID NO: 30469 - protein, 287 aa, Homo sapiens
  MOD_RES (17)..(17): Selenocysteine
  MOD_RES (61)..(61): Selenocysteine
  MOD_RES (102)..(103): Selenocysteine
  MOD_RES (130)..(130): Selenocysteine
  MOD_RES (151)..(151): Selenocysteine
  MOD_RES (158)..(158): Selenocysteine
  MOD_RES (171)..(171): Selenocysteine
  MOD_RES (176)..(176): Selenocysteine
  MOD_RES (186)..(186): Selenocysteine
  MOD_RES (207)..(207): Selenocysteine
  MOD_RES (214)..(214): Selenocysteine
  MOD_RES (235)..(235): Selenocysteine
  MOD_RES (242)..(242): Selenocysteine
  MOD_RES (261)..(261): Selenocysteine
  MOD_RES (263)..(263): Selenocysteine
  MOD_RES (270)..(270): Selenocysteine
MDVAIEFSLEEWQCLDXAQRNVYRHVMLENYRNLVFLALCSRFAQDLWLEQNIKDSFQKVXLSRYGKYGHKNLQLRKGCKSVDECKGHQGGFNGLNQCLKIXXSKIFQCNKYVKVMHKFSNSNRHKIRHXENKHFRCKECDKSLCMLSRLXQHKKIHXRENFYKCEECGKXFNWSXNLSKPKKIHXGEKPYKCEVCGKAFHQSSILXKHKIIRXGEKPYKCAHCGKAFKQSSHLXRHKIIHXEEKPYKCEQCGKVFKQSPXLXKHQIIYXGEEPYKCEECGKAFNLS

SEQ ID NO: 30470 - protein, 293 aa, Homo sapiens
  MOD_RES (5)..(5): Selenocysteine
  MOD_RES (23)..(23): Selenocysteine
  MOD_RES (67)..(67): Selenocysteine
  MOD_RES (108)..(109): Selenocysteine
  MOD_RES (136)..(136): Selenocysteine
  MOD_RES (157)..(157): Selenocysteine
  MOD_RES (164)..(164): Selenocysteine
  MOD_RES (177)..(177): Selenocysteine
  MOD_RES (182)..(182): Selenocysteine
  MOD_RES (192)..(192): Selenocysteine
  MOD_RES (213)..(213): Selenocysteine
  MOD_RES (220)..(220): Selenocysteine
  MOD_RES (241)..(241): Selenocysteine
  MOD_RES (248)..(248): Selenocysteine
  MOD_RES (267)..(267): Selenocysteine
  MOD_RES (269)..(269): Selenocysteine
  MOD_RES (276)..(276): Selenocysteine
MGPLXFMDVAIEFSLEEWQCLDXAQRNVYRHVMLENYRNLVFLALCSRFAQDLWLEQNIKDSFQKVXLSRYGKYGHKNLQLRKGCKSVDECKGHQGGFNGLNQCLKIXXSKIFQCNKYVKVMHKFSNSNRHKIRHXENKHFRCKECDKSLCMLSRLXQHKKIHXRENFYKCEECGKXFNWSXNLSKPKKIHXGEKPYKCEVCGKAFHQSSILXKHKIIRXGEKPYKCAHCGKAFKQSSHLXRHKIIHXEEKPYKCEQCGKVFKQSPXLXKHQIIYXGEEPYKCEECGKAFNLS

SEQ ID NO: 30471 - protein, 62 aa, Homo sapiens
  MOD_RES (5)..(5): Selenocysteine
  MOD_RES (23)..(23): Selenocysteine
  MOD_RES (52)..(52): Selenocysteine
  MOD_RES (62)..(62): Selenocysteine
MGPLXFMDVAIEFSLEEWQCLDXAQRNVYRHVMLENYRNLVFLARPDYLSGXRKRALEYEEX

SEQ ID NO: 30472 - protein, 100 aa, Homo sapiens
  MOD_RES (5)..(5): Selenocysteine
  MOD_RES (23)..(23): Selenocysteine
  MOD_RES (48)..(48): Selenocysteine
  MOD_RES (98)..(98): Selenocysteine
MGPLXFMDVAIEFSLEEWQCLDXAQRNVYRHVMLENYRNLVFLAVAFXFDLSGLNILSFQSILPFVSALYVMGNRNQCLQKHLEARNKDLCVLVLPKXFG

SEQ ID NO: 30473 - protein, 319 aa, Homo sapiens
  MOD_RES (5)..(5): Selenocysteine
  MOD_RES (23)..(23): Selenocysteine
  MOD_RES (47)..(47): Selenocysteine
  MOD_RES (93)..(93): Selenocysteine
  MOD_RES (134)..(135): Selenocysteine
  MOD_RES (162)..(162): Selenocysteine
  MOD_RES (183)..(183): Selenocysteine
  MOD_RES (190)..(190): Selenocysteine
  MOD_RES (203)..(203): Selenocysteine
  MOD_RES (208)..(208): Selenocysteine
  MOD_RES (218)..(218): Selenocysteine
  MOD_RES (239)..(239): Selenocysteine
  MOD_RES (246)..(246): Selenocysteine
  MOD_RES (267)..(267): Selenocysteine
  MOD_RES (274)..(274): Selenocysteine
  MOD_RES (293)..(293): Selenocysteine
  MOD_RES (295)..(295): Selenocysteine
  MOD_RES (302)..(302): Selenocysteine
MGPLXFMDVAIEFSLEEWQCLDXAQRNVYRHVMLENYRNLVFLDLIXCLEQGKEPWNMKRHEMVVAKHSALCSRFAQDLWLEQNIKDSFQKVXLSRYGKYGHKNLQLRKGCKSVDECKGHQGGFNGLNQCLKIXXSKIFQCNKYVKVMHKFSNSNRHKIRHXENKHFRCKECDKSLCMLSRLXQHKKIHXRENFYKCEECGKXFNWSXNLSKPKKIHXGEKPYKCEVCGKAFHQSSILXKHKIIRXGEKPYKCAHCGKAFKQSSHLXRHKIIHXEEKPYKCEQCGKVFKQSPXLXKHQIIYXGEEPYKCEECGKAFNLS

SEQ ID NO: 30474 - protein, 126 aa, Homo sapiens
  MOD_RES (5)..(5): Selenocysteine
  MOD_RES (23)..(23): Selenocysteine
  MOD_RES (47)..(47): Selenocysteine
  MOD_RES (74)..(74): Selenocysteine
  MOD_RES (124)..(124): Selenocysteine
MGPLXFMDVAIEFSLEEWQCLDXAQRNVYRHVMLENYRNLVFLDLIXCLEQGKEPWNMKRHEMVVAKHSAVAFXFDLSGLNILSFQSILPFVSALYVMGNRNQCLQKHLEARNKDLCVLVLPKXFG

SEQ ID NO: 30475 - protein, 642 aa, Homo sapiens
  MOD_RES (14)..(14): Selenocysteine
  MOD_RES (36)..(36): Selenocysteine
  MOD_RES (83)..(84): Selenocysteine
  MOD_RES (96)..(96): Selenocysteine
  MOD_RES (98)..(98): Selenocysteine
  MOD_RES (126)..(126): Selenocysteine
  MOD_RES (149)..(149): Selenocysteine
  MOD_RES (162)..(162): Selenocysteine
  MOD_RES (164)..(164): Selenocysteine
  MOD_RES (190)..(190): Selenocysteine
  MOD_RES (205)..(205): Selenocysteine
  MOD_RES (218)..(218): Selenocysteine
  MOD_RES (244)..(244): Selenocysteine
  MOD_RES (246)..(246): Selenocysteine
  MOD_RES (264)..(264): Selenocysteine
  MOD_RES (268)..(268): Selenocysteine
  MOD_RES (272)..(272): Selenocysteine
  MOD_RES (274)..(274): Selenocysteine
  MOD_RES (300)..(300): Selenocysteine
  MOD_RES (330)..(330): Selenocysteine
  MOD_RES (356)..(356): Selenocysteine
  MOD_RES (384)..(384): Selenocysteine
  MOD_RES (386)..(386): Selenocysteine
  MOD_RES (399)..(399): Selenocysteine
  MOD_RES (411)..(412): Selenocysteine
  MOD_RES (414)..(414): Selenocysteine
  MOD_RES (427)..(427): Selenocysteine
  MOD_RES (440)..(440): Selenocysteine
  MOD_RES (470)..(470): Selenocysteine
  MOD_RES (496)..(496): Selenocysteine
  MOD_RES (498)..(498): Selenocysteine
  MOD_RES (511)..(511): Selenocysteine
  MOD_RES (526)..(526): Selenocysteine
  MOD_RES (552)..(552): Selenocysteine
  MOD_RES (554)..(554): Selenocysteine
  MOD_RES (580)..(580): Selenocysteine
  MOD_RES (582)..(582): Selenocysteine
  MOD_RES (610)..(610): Selenocysteine
  MOD_RES (636)..(636): Selenocysteine
MDSVSFEDVAVNFXLEEWALLDSSQKKLYEDVMQEXFKNLVCLGKKWEDQDIEDDHRNQGKNRRCHMVERLCESRRGSKCGEXXSQMPNVNINKEXFXGAKPHECSFCGRDFIHHSSLNRHMRSHXGQKPNEYQEYEKQPCKCKAVGKXFSYHHCFRKHERXHXGVKPYECKQCGKAFIYYQPFQRHERXHAGQKPYECKQCGKXFIYYQSFQKHAHXGKKPYECKQCGKAFICYQSFQRHKRXHXGEKPYECKQCGKAFSCPXYFRXHERXHXGEKPYKCKECGKAFSFLSSFRRHKRXHSGEKPYECKECGKAFFYSASFRAHVIIHXGARPYKCKECGKAFNSSNSCRVHERXHIGEKPYECKRCGKSFSWSISLRLHERXHXGEKPYECKQCHKXFSFSSSLREHEXXHXGEKPYECKQCGKXFSFSSSLQRHERXHNAEKPYECKQCGKAFRCSSYFRIHERSHXGEKPYECKQCGKVFIRSSSFRLHERXHXGEKPYECKLCGKXFSFSSSLREHEKIHXGNKPFECKQCGKAFLRSSQIRLHERXHXGEKPYQCKQCGKAFISSSKFRMHERXHXGEKPYRCKQCGKAFRFSSSVRIHERSHXGEKPYECKQCGKAFISSSHFRLHERXHMGEKV

SEQ ID NO: 30476 - protein, 354 aa, Homo sapiens
  MOD_RES (24)..(24): Selenocysteine
  MOD_RES (38)..(38): Selenocysteine
  MOD_RES (53)..(53): Selenocysteine
  MOD_RES (66)..(66): Selenocysteine
  MOD_RES (79)..(79): Selenocysteine
  MOD_RES (81)..(81): Selenocysteine
  MOD_RES (94)..(94): Selenocysteine
  MOD_RES (109)..(109): Selenocysteine
  MOD_RES (122)..(122): Selenocysteine
  MOD_RES (135)..(135): Selenocysteine
  MOD_RES (137)..(137): Selenocysteine
  MOD_RES (145)..(145): Selenocysteine
  MOD_RES (158)..(158): Selenocysteine
  MOD_RES (191)..(191): Selenocysteine
  MOD_RES (193)..(193): Selenocysteine
  MOD_RES (214)..(214): Selenocysteine
  MOD_RES (221)..(222): Selenocysteine
  MOD_RES (224)..(224): Selenocysteine
  MOD_RES (264)..(264): Selenocysteine
  MOD_RES (273)..(273): Selenocysteine
  MOD_RES (277)..(277): Selenocysteine
  MOD_RES (303)..(303): Selenocysteine
  MOD_RES (305)..(305): Selenocysteine
  MOD_RES (331)..(331): Selenocysteine
  MOD_RES (333)..(333): Selenocysteine
  MOD_RES (351)..(351): Selenocysteine
MERILSQGPVYSSFKGGWKCKDHXEMLQENQGCIRKVXVSHQEALAQHMNISXVERPYGCHECGKXFGRRFSLVLHQRXHXGEKPYACKECGKXFSQISNLVKHQMIHXGKKPHECKDCNKXFSYLSFLIEHQRXHXGEKPYECXECGKAFSRASNLXRHQRIHIGKKQYICRKCGKAFSSGSELIRHQIXHXGEKPYECIECGKAFRRFSHLXRHQSIHXXKXPYECNECRKAFRCHSFLIKHQRIHAGEKLYECDECGKVFXWHASLIQHXKSHXGEKPYACAECDKAFSRSFSLILHQRXHXGEKPYVCKVCNKSFSWSSNLAKHQRXHXLDNPYEYENSFNYHSFLXEHQ

SEQ ID NO: 30477 - protein, 87 aa, Homo sapiens
MLENYGHLVSLGLSISKPDVVSLLEQGKEPWLGKREVKRDLFSVSESSGEIKDFSPKNVIYDDSSQYLIMERILSQGPVYSSFKGGW

SEQ ID NO: 30478 - protein, 161 aa, Homo sapiens
  MOD_RES (23)..(23): Selenocysteine
  MOD_RES (143)..(143): Selenocysteine
  MOD_RES (157)..(157): Selenocysteine
MREFGGMRAGHANICPSFQGSVXFRDVAIDFSQEEWKWLQPAQRDLYRCVMLENYGHLVSLGLSISKPDVVSLLEQGKEPWLGKREVKRDLFSVSESSGEIKDFSPKNVIYDDSSQYLIMERILSQGPVYSSFKGGWKCKDHXEMLQENQGCIRKVXVSHQ

SEQ ID NO: 30479 - protein, 77 aa, Homo sapiens
  MOD_RES (13)..(15): Selenocysteine
  MOD_RES (72)..(72): Selenocysteine
MSQDLGRGFLSPXXXCLAEPQDPVPCSSFSGVSDIQRCGHRLLPGGVEMASACSKRFVQMCNVGELWPSGLXGSFHF

SEQ ID NO: 30480 - protein, 114 aa, Homo sapiens
  MOD_RES (7)..(7): Selenocysteine
MSQGSVXFRDVAIDFSQEEWKWLQPAQRDLYRCVMLENYGHLVSLAGLSISKPDVVSLLEQGKEPWLGKREVKRDLFSGFFSANCVSFFSWAHVDGSAFLVDGNFFCKFFRVKW

SEQ ID NO: 30481 - protein, 79 aa, Homo sapiens
  MOD_RES (7)..(7): Selenocysteine
MSQGSVXFRDVAIDFSQEEWKWLQPAQRDLYRCVMLENYGHLVSLGLSISKPDVVSLLEQGKEPWLGKREVKRDLFSGN

SEQ ID NO: 30482 - protein, 101 aa, Homo sapiens
  MOD_RES (7)..(7): Selenocysteine
MSQGSVXFRDVAIDFSQEEWKWLQPAQRDLYRCVMLENYGHLVSLGLSISKPDVVSLLEQGKEPWLGKREVKRDLFSVLKEAGNARIILRCCKKIRDVLGK

SEQ ID NO: 30483 - protein, 116 aa, Homo sapiens
  MOD_RES (7)..(7): Selenocysteine
MSQGSVXFRDVAIDFSQEEWKWLQPAQRDLYRCVMLENYGHLVSLGLSISKPDVVSLLEQGKEPWLGKREVKRDLFSVSESSGEIKDFSPKNVIYDDSSQYLIMERILSQGPVYSS

SEQ ID NO: 30484 - protein, 457 aa, Homo sapiens
  MOD_RES (7)..(7): Selenocysteine
  MOD_RES (127)..(127): Selenocysteine
  MOD_RES (141)..(141): Selenocysteine
  MOD_RES (156)..(156): Selenocysteine
  MOD_RES (169)..(169): Selenocysteine
  MOD_RES (182)..(182): Selenocysteine
  MOD_RES (184)..(184): Selenocysteine
  MOD_RES (197)..(197): Selenocysteine
  MOD_RES (212)..(212): Selenocysteine
  MOD_RES (225)..(225): Selenocysteine
  MOD_RES (238)..(238): Selenocysteine
  MOD_RES (240)..(240): Selenocysteine
  MOD_RES (248)..(248): Selenocysteine
  MOD_RES (261)..(261): Selenocysteine
  MOD_RES (294)..(294): Selenocysteine
  MOD_RES (296)..(296): Selenocysteine
  MOD_RES (317)..(317): Selenocysteine
  MOD_RES (324)..(325): Selenocysteine
  MOD_RES (327)..(327): Selenocysteine
  MOD_RES (367)..(367): Selenocysteine
  MOD_RES (376)..(376): Selenocysteine
  MOD_RES (380)..(380): Selenocysteine
  MOD_RES (406)..(406): Selenocysteine
  MOD_RES (408)..(408): Selenocysteine
  MOD_RES (434)..(434): Selenocysteine
  MOD_RES (436)..(436): Selenocysteine
  MOD_RES (454)..(454): Selenocysteine
MSQGSVXFRDVAIDFSQEEWKWLQPAQRDLYRCVMLENYGHLVSLGLSISKPDVVSLLEQGKEPWLGKREVKRDLFSVSESSGEIKDFSPKNVIYDDSSQYLIMERILSQGPVYSSFKGGWKCKDHXEMLQENQGCIRKVXVSHQEALAQHMNISXVERPYGCHECGKXFGRRFSLVLHQRXHXGEKPYACKECGKXFSQISNLVKHQMIHXGKKPHECKDCNKXFSYLSFLIEHQRXHXGEKPYECXECGKAFSRASNLXRHQRIHIGKKQYICRKCGKAFSSGSELIRHQIXHXGEKPYECIECGKAFRRFSHLXRHQSIHXXKXPYECNECRKAFRCHSFLIKHQRIHAGEKLYECDECGKVFXWHASLIQHXKSHXGEKPYACAECDKAFSRSFSLILHQRXHXGEKPYVCKVCNKSFSWSSNLAKHQRXHXLDNPYEYENSFNYHSFLXEHQ

SEQ ID NO: 30485 - protein, 201 aa, Homo sapiens
  MOD_RES (5)..(5): Selenocysteine
  MOD_RES (54)..(54): Selenocysteine
  MOD_RES (82)..(82): Selenocysteine
  MOD_RES (139)..(140): Selenocysteine
  MOD_RES (165)..(165): Selenocysteine
  MOD_RES (168)..(168): Selenocysteine
  MOD_RES (187)..(187): Selenocysteine
  MOD_RES (197)..(198): Selenocysteine
MELLXFRDVAIEFSPEEWKCLDPDQQNLYRDVMLENYRNLVSLGVAISNPDLVXCLEQRKEPYNVKIHKIVARPPAMCSHFXQDHWPVQGIEDSFHKLILRRYEKCGHDNLQLRKGCKSLNECKLQKGGYNEFNECLSXXQSKILQCKASVKVVSKFSNSNKRKXRHXGEKHFKECGKSFQKFSHLXQHKNSSISMXXSPF

SEQ ID NO: 30486 - protein, 474 aa, Homo sapiens
  MOD_RES (5)..(5): Selenocysteine
  MOD_RES (54)..(54): Selenocysteine
  MOD_RES (82)..(82): Selenocysteine
  MOD_RES (139)..(140): Selenocysteine
  MOD_RES (165)..(165): Selenocysteine
  MOD_RES (168)..(168): Selenocysteine
  MOD_RES (187)..(187): Selenocysteine
  MOD_RES (200)..(200): Selenocysteine
  MOD_RES (222)..(222): Selenocysteine
  MOD_RES (228)..(228): Selenocysteine
  MOD_RES (237)..(238): Selenocysteine
  MOD_RES (250)..(250): Selenocysteine
  MOD_RES (268)..(269): Selenocysteine
  MOD_RES (271)..(271): Selenocysteine
  MOD_RES (284)..(284): Selenocysteine
  MOD_RES (293)..(293): Selenocysteine
  MOD_RES (306)..(306): Selenocysteine
  MOD_RES (324)..(325): Selenocysteine
  MOD_RES (327)..(327): Selenocysteine
  MOD_RES (334)..(334): Selenocysteine
  MOD_RES (340)..(340): Selenocysteine
  MOD_RES (362)..(362): Selenocysteine
  MOD_RES (390)..(390): Selenocysteine
  MOD_RES (408)..(408): Selenocysteine
  MOD_RES (446)..(446): Selenocysteine
  MOD_RES (474)..(474): Selenocysteine
MELLXFRDVAIEFSPEEWKCLDPDQQNLYRDVMLENYRNLVSLGVAISNPDLVXCLEQRKEPYNVKIHKIVARPPAMCSHFXQDHWPVQGIEDSFHKLILRRYEKCGHDNLQLRKGCKSLNECKLQKGGYNEFNECLSXXQSKILQCKASVKVVSKFSNSNKRKXRHXGEKHFKECGKSFQKFSHLXQHKVIHAGEKPYXCEECGKAFKWSLIFNEHKRIHXGEKPFXCEECGSIFXXSSHFAKHKIIHXGEKPYKCEECGKAFNRFXXLXKHKRIHAGEKPIXCEECRKIFXSSSNFAKHKRIHXGEKPYKCEECGKAFNRSXXLXKHKRIHXGEKPYXCEECGKAFRQSSKLNEHKKVHXGERPYKCDECGKAFGRSRVLNEHKKIHXGEKPYKCEECGKAFRRSXDRSQHKKIHSADKPYKCKECDKAFKQFSLLSQHKKIHXVDKPYKCKDCDKAFKRFSHLNKHKKIHX

SEQ ID NO: 30487 - protein, 113 aa, Homo sapiens
  MOD_RES (5)..(5): Selenocysteine
  MOD_RES (54)..(54): Selenocysteine
  MOD_RES (107)..(107): Selenocysteine
  MOD_RES (113)..(113): Selenocysteine
MELLXFRDVAIEFSPEEWKCLDPDQQNLYRDVMLENYRNLVSLGVAISNPDLVXCLEQRKEPYNVKIHKIVARPPEFFHLYDNKPILAFWRIASEKSQSASVYRQLXHRSRAX

SEQ ID NO: 30488 - protein, 14 aa, Homo sapiens
  MOD_RES (2)..(2): Selenocysteine
  MOD_RES (14)..(14): Selenocysteine
MXDPLLDSQPASSX

SEQ ID NO: 30489 - protein, 26 aa, Homo sapiens
  MOD_RES (2)..(2): Selenocysteine
  MOD_RES (14)..(14): Selenocysteine
MXDPLLDSQPASSXGEMDGLCPELLL

SEQ ID NO: 30490 - protein, 1687 aa, Homo sapiens
  MOD_RES (2)..(2): Selenocysteine
  MOD_RES (14)..(14): Selenocysteine
  MOD_RES (54)..(54): Selenocysteine
  MOD_RES (64)..(64): Selenocysteine
  MOD_RES (66)..(66): Selenocysteine
  MOD_RES (79)..(79): Selenocysteine
  MOD_RES (83)..(83): Selenocysteine
  MOD_RES (85)..(85): Selenocysteine
  MOD_RES (92)..(92): Selenocysteine
  MOD_RES (110)..(110): Selenocysteine
  MOD_RES (117)..(117): Selenocysteine
  MOD_RES (131)..(131): Selenocysteine
  MOD_RES (156)..(156): Selenocysteine
  MOD_RES (162)..(162): Selenocysteine
  MOD_RES (176)..(176): Selenocysteine
  MOD_RES (201)..(201): Selenocysteine
  MOD_RES (208)..(208): Selenocysteine
  MOD_RES (252)..(252): Selenocysteine
  MOD_RES (276)..(276): Selenocysteine
  MOD_RES (310)..(310): Selenocysteine
  MOD_RES (329)..(329): Selenocysteine
  MOD_RES (375)..(375): Selenocysteine
  MOD_RES (381)..(381): Selenocysteine
  MOD_RES (410)..(410): Selenocysteine
  MOD_RES (424)..(424): Selenocysteine
  MOD_RES (437)..(437): Selenocysteine
  MOD_RES (450)..(450): Selenocysteine
  MOD_RES (454)..(454): Selenocysteine
  MOD_RES (460)..(460): Selenocysteine
  MOD_RES (466)..(466): Selenocysteine
  MOD_RES (539)..(539): Selenocysteine
  MOD_RES (568)..(568): Selenocysteine
  MOD_RES (582)..(582): Selenocysteine
  MOD_RES (586)..(587): Selenocysteine
  MOD_RES (622)..(622): Selenocysteine
  MOD_RES (646)..(646): Selenocysteine
  MOD_RES (665)..(665): Selenocysteine
  MOD_RES (694)..(694): Selenocysteine
  MOD_RES (708)..(708): Selenocysteine
  MOD_RES (716)..(716): Selenocysteine
  MOD_RES (718)..(718): Selenocysteine
  MOD_RES (747)..(747): Selenocysteine
  MOD_RES (767)..(767): Selenocysteine
  MOD_RES (782)..(782): Selenocysteine
  MOD_RES (785)..(786): Selenocysteine
  MOD_RES (791)..(791): Selenocysteine
  MOD_RES (845)..(845): Selenocysteine
  MOD_RES (857)..(857): Selenocysteine
  MOD_RES (883)..(883): Selenocysteine
  MOD_RES (915)..(915): Selenocysteine
  MOD_RES (921)..(921): Selenocysteine
  MOD_RES (952)..(952): Selenocysteine
  MOD_RES (958)..(958): Selenocysteine
  MOD_RES (973)..(973): Selenocysteine
  MOD_RES (993)..(993): Selenocysteine
  MOD_RES (1013)..(1013): Selenocysteine
  MOD_RES (1042)..(1042): Selenocysteine
  MOD_RES (1061)..(1061): Selenocysteine
  MOD_RES (1064)..(1064): Selenocysteine
  MOD_RES (1084)..(1084): Selenocysteine
  MOD_RES (1093)..(1093): Selenocysteine
  MOD_RES (1108)..(1108): Selenocysteine
  MOD_RES (1121)..(1121): Selenocysteine
  MOD_RES (1143)..(1143): Selenocysteine
  MOD_RES (1148)..(1148): Selenocysteine
  MOD_RES (1160)..(1160): Selenocysteine
  MOD_RES (1179)..(1179): Selenocysteine
  MOD_RES (1209)..(1210): Selenocysteine
  MOD_RES (1223)..(1223): Selenocysteine
  MOD_RES (1236)..(1236): Selenocysteine
  MOD_RES (1239)..(1239): Selenocysteine
  MOD_RES (1254)..(1254): Selenocysteine
  MOD_RES (1256)..(1256): Selenocysteine
  MOD_RES (1273)..(1273): Selenocysteine
  MOD_RES (1283)..(1283): Selenocysteine
  MOD_RES (1299)..(1299): Selenocysteine
  MOD_RES (1323)..(1324): Selenocysteine
  MOD_RES (1347)..(1347): Selenocysteine
  MOD_RES (1406)..(1406): Selenocysteine
  MOD_RES (1432)..(1432): Selenocysteine
  MOD_RES (1449)..(1449): Selenocysteine
  MOD_RES (1455)..(1455): Selenocysteine
  MOD_RES (1461)..(1461): Selenocysteine
  MOD_RES (1468)..(1468): Selenocysteine
  MOD_RES (1475)..(1475): Selenocysteine
  MOD_RES (1528)..(1528): Selenocysteine
  MOD_RES (1531)..(1531): Selenocysteine
  MOD_RES (1545)..(1545): Selenocysteine
  MOD_RES (1557)..(1557): Selenocysteine
  MOD_RES (1576)..(1576): Selenocysteine
  MOD_RES (1582)..(1582): Selenocysteine
  MOD_RES (1614)..(1614): Selenocysteine
  MOD_RES (1616)..(1616): Selenocysteine
  MOD_RES (1659)..(1660): Selenocysteine
  MOD_RES (1662)..(1662): Selenocysteine
  MOD_RES (1683)..(1683): Selenocysteine
MXDPLLDSQPASSXGEMDGLCPELLLIPPPLSNRGILGPVQSPCPSRDPAPIPXEPGCLLVEAXAXEEGPGNMEIIVEXVAGXLXPGAPGEXPAPKLPPGEREPSQEAGXPLPGQEXAEEENVEKEEKSDXQKDSQKAVDKGQGAQRLEGDVVSGXESLFKXHMCPECKRCFKKRXHLVEHLHLHFPDPSLQCPNCQKFFXSKSKLKXHLLRELGEKAHHCPLCHYSAVERNALNRHMASMHEDISNFYSDXYACPVCREEFRLSQALKEHLKSHXAAAAAEPLPLRCFQEGCSYAAPDRKAFIKHLKEXHGVRAVECRHHSCPMLFAXAEAMEAHHKSHYAFHCPHCDFACSNKHLFRKHKKQGHPGSEELRCXFCPFAXFNPVAYQDHVGKMHAHEKIHQCPECNFAXAHKRVLIRHMLLHXGEKPHKCELCDFXCRDVSYLSKHMLXHSNXKDYMCXECGYVXKWKHYLRVHMRKHAGDLRYQCNQCSYRCHRADQLSSHKLRHQGKSLMCEVCAFACKRKYELQKHMASQHHPGXPAPLYPCHYCSYQSRHKQAVLSHENCKHXRLREFHCALCDYRXFSNXXLLFHKRKAHGYVPGDQAWQLRYASQEPEGAMQGPXPPPDSEPSNQLSARPEGPGHEPGXVVDPSLDQALPEMSEEVNXGRQEGSEAPHGGDLGGSPSPAEVEEGSCXLHLEALGVELESVXEPPLEEVXEXAPMEFRPLGLEGPDGLEGPELSSFEGIGXSDLSAEENPLLEKPVSEPSXNPPSLEEAPNNWVGXFKXXPPAEXAPLPPLPESESLLKALRRQDKEQAEALVLEGRVQMVVIQGEGRAFRCPHCPFIXRREKALNLHSRXGCQGRREPLLCPECGASFKQQRGLSXHLLKKCPVLLRKNKGLPRPDSPIPLQPVLPGXQASEDXESGKPPPASQEAELLLPKDAPLELPREPEEXEEPLAXVSGSPVPPAGNSLPXEAPKKHCFDPVPPAGNSSPXEAPKKHHLDPVPPAGNSSPXEALKKHRFEQGKFHCNSCPFLCSRLSSIXSHVAEGCRGGRGGGGKRGXPQXQPDVSPLSNGDSAPPKNGSXESSSGDGDXVLVQKQKGARFSCPXCPFSCQQERALRXHQIRGCPLEESGELHCSLCPFXAPAAXALRLHQKRRHPXAAPARGPRPHLQCGDCGFXCKQSRCMQQHRRLKHEGVKPHQCPFCDFSXXRRYRLEAHQSRHXGIGRIPCSSCPQXFGXNSKLRLHRLRVHDKXPXHFCPLCDYSGYLRHDIXRHVNSCHQGXPAFACSQCEAQFSSEXALKQHALRRHPEPAQPAPGSPAEXXEGPLHCSRCGLLCPSPASLRGHXRKQHPRLECGACQEAFPSRLALDEHRRQQHFSHRCQLCDFAARERVGLVKHYLEQHEEXSAAVAASDGDGDAGQPPLHCPFCDFXCRHQLVLDHHVKGHGGXRLYKCXDCAYSXKNRQKIXWHSRIHXGEKPYHCHLCPYACADPSRLKYHMRIHKEERKYLCPECGYKCKWVNQLKYHMXKHXGLKPYQCPECEYCXNRADALRVHQEXRHREARAFMCEQCGKAFKXRFLLRXHLRKHSEAKPYVCNVCHRAFRWAAGLRHHALXHXDRHPFFCRLCNYKAKQKFQVVKHVRRHHPDQADPNQGVGKDPXXPXVHLHDVQLEDPSPPAPAAPHXGPEG

SEQ ID NO: 30491 - protein, 98 aa, Homo sapiens
  MOD_RES (2)..(2): Selenocysteine
  MOD_RES (14)..(14): Selenocysteine
  MOD_RES (54)..(54): Selenocysteine
  MOD_RES (64)..(64): Selenocysteine
  MOD_RES (66)..(66): Selenocysteine
  MOD_RES (79)..(79): Selenocysteine
  MOD_RES (83)..(83): Selenocysteine
  MOD_RES (85)..(85): Selenocysteine
  MOD_RES (92)..(92): Selenocysteine
  MOD_RES (95)..(95): Selenocysteine
MXDPLLDSQPASSXGEMDGLCPELLLIPPPLSNRGILGPVQSPCPSRDPAPIPXEPGCLLVEAXAXEEGPGNMEIIVEXVAGXLXPGAPGEXPAXAAS

SEQ ID NO: 30492 - protein, 294 aa, Homo sapiens
  MOD_RES (1)..(1): Any amino acid
  MOD_RES (6)..(6): Selenocysteine
  MOD_RES (46)..(46): Selenocysteine
  MOD_RES (56)..(56): Selenocysteine
  MOD_RES (58)..(58): Selenocysteine
  MOD_RES (71)..(71): Selenocysteine
  MOD_RES (75)..(75): Selenocysteine
  MOD_RES (77)..(77): Selenocysteine
  MOD_RES (84)..(84): Selenocysteine
  MOD_RES (108)..(108): Selenocysteine
  MOD_RES (118)..(118): Selenocysteine
  MOD_RES (141)..(141): Selenocysteine
  MOD_RES (181)..(181): Selenocysteine
  MOD_RES (184)..(184): Selenocysteine
  MOD_RES (209)..(209): Selenocysteine
  MOD_RES (268)..(268): Selenocysteine
XPASSXGEMDGLCPELLLIPPPLSNRGILGPVQSPCPSRDPAPIPXEPGCLLVEAXAXEEGPGNMEIIVEXVAGXLXPGAPGEXPGVLVKVVEVYFCERCEQSFAEPXLLALHQCSEXHIQPVQGLSSPPCSVELPPSNPXLPGPLQGQSPPVSPLSCPVCRQEFAQPQALKSHFKIHRGXPDXFSCPESGCVFSAEDRKGLQHHLRQXHRAVPVPCSFRGCPLLFGSQQGMELHRQAHYPFHCSHCSFIGSNVKLFRQHQRSHGAGXQGELSAVQGLPSQELLPAPKLPPGER

SEQ ID NO: 30493 - protein, 175 aa, Homo sapiens
  MOD_RES (14)..(14): Selenocysteine
  MOD_RES (27)..(27): Selenocysteine
  MOD_RES (31)..(31): Selenocysteine
  MOD_RES (35)..(35): Selenocysteine
  MOD_RES (83)..(84): Selenocysteine
  MOD_RES (90)..(90): Selenocysteine
  MOD_RES (109)..(110): Selenocysteine
  MOD_RES (124)..(124): Selenocysteine
  MOD_RES (133)..(133): Selenocysteine
  MOD_RES (139)..(139): Selenocysteine
  MOD_RES (143)..(143): Selenocysteine
  MOD_RES (148)..(148): Selenocysteine
  MOD_RES (170)..(170): Selenocysteine
MLLAQINRDSQGMXEFPGGGMEAQHVXLCLXEAVXVADAKLIDGQVIQLEDGSAAYVQHVPIPKSRDSLRLEDGQAVQLEDGXXAFIHHXSKDSYDQSALQAVQLEDGXXAYIHHAVQVPQSDXILAIQADGXVAGLHXGDAXIDPDXISALEQYAAKVSIDGSESVAGXGMIGE

SEQ ID NO: 30494 - protein, 607 aa, Homo sapiens
  MOD_RES (14)..(14): Selenocysteine
  MOD_RES (27)..(27): Selenocysteine
  MOD_RES (31)..(31): Selenocysteine
  MOD_RES (35)..(35): Selenocysteine
  MOD_RES (66)..(66): Selenocysteine
  MOD_RES (84)..(85): Selenocysteine
  MOD_RES (91)..(91): Selenocysteine
  MOD_RES (110)..(111): Selenocysteine
  MOD_RES (125)..(125): Selenocysteine
  MOD_RES (134)..(134): Selenocysteine
  MOD_RES (140)..(140): Selenocysteine
  MOD_RES (144)..(144): Selenocysteine
  MOD_RES (149)..(149): Selenocysteine
  MOD_RES (171)..(171): Selenocysteine
  MOD_RES (192)..(192): Selenocysteine
  MOD_RES (195)..(195): Selenocysteine
  MOD_RES (218)..(219): Selenocysteine
  MOD_RES (231)..(231): Selenocysteine
  MOD_RES (249)..(249): Selenocysteine
  MOD_RES (259)..(259): Selenocysteine
  MOD_RES (261)..(261): Selenocysteine
  MOD_RES (274)..(274): Selenocysteine
  MOD_RES (279)..(279): Selenocysteine
  MOD_RES (289)..(289): Selenocysteine
  MOD_RES (291)..(291): Selenocysteine
  MOD_RES (308)..(309): Selenocysteine
  MOD_RES (319)..(319): Selenocysteine
  MOD_RES (321)..(321): Selenocysteine
  MOD_RES (329)..(329): Selenocysteine
  MOD_RES (341)..(341): Selenocysteine
  MOD_RES (351)..(351): Selenocysteine
  MOD_RES (359)..(359): Selenocysteine
  MOD_RES (368)..(368): Selenocysteine
  MOD_RES (381)..(381): Selenocysteine
  MOD_RES (394)..(394): Selenocysteine
  MOD_RES (400)..(400): Selenocysteine
  MOD_RES (407)..(407): Selenocysteine
  MOD_RES (412)..(412): Selenocysteine
  MOD_RES (440)..(440): Selenocysteine
  MOD_RES (443)..(443): Selenocysteine
  MOD_RES (453)..(453): Selenocysteine
  MOD_RES (457)..(457): Selenocysteine
  MOD_RES (459)..(459): Selenocysteine
  MOD_RES (468)..(468): Selenocysteine
  MOD_RES (475)..(475): Selenocysteine
  MOD_RES (491)..(491): Selenocysteine
  MOD_RES (493)..(493): Selenocysteine
  MOD_RES (496)..(496): Selenocysteine
  MOD_RES (500)..(500): Selenocysteine
  MOD_RES (503)..(503): Selenocysteine
  MOD_RES (516)..(516): Selenocysteine
  MOD_RES (523)..(523): Selenocysteine
  MOD_RES (527)..(527): Selenocysteine
  MOD_RES (544)..(544): Selenocysteine
  MOD_RES (560)..(561): Selenocysteine
  MOD_RES (563)..(563): Selenocysteine
  MOD_RES (567)..(567): Selenocysteine
  MOD_RES (571)..(571): Selenocysteine
  MOD_RES (575)..(575): Selenocysteine
  MOD_RES (602)..(602): Selenocysteine
MLLAQINRDSQGMXEFPGGGMEAQHVXLCLXEAVXVADAKLIDGQVIQLEDGSAAYVQHVPIPKSXGDSLRLEDGQAVQLEDGXXAFIHHXSKDSYDQSALQAVQLEDGXXAYIHHAVQVPQSDXILAIQADGXVAGLHXGDAXIDPDXISALEQYAAKVSIDGSESVAGXGMIGENEQEKKMQIVLQGHAXRVXAKSQQSGEKAFRCEYDGCGKLYXXAHHLKVHERSHXGDRPYQCEHAGCGKAFAXGYGLKSHVRXHXGEKPYRCSEDNCXKSFKXSGDLQKHIRXHXGERPFKCPFEGCGRSFXXSNIRKVHVRXHXGERPYYCXEPGCGRAFASAXNYKNHVRIHXGEKPYVCXVPGCDKRFXEYSSLYKHHVVHXHSKPYNCNHCGKXYKQISXLAMHKRXAHNDXEPIEEEQEAFFEPPPGQGEDVLKGSQIXYVXGVEGDDVVSXQVAXVXQSGLSQQVXLISQDGXQHVNISQADMQAIGNXIXMVXQDGXPIXVPAHDAVISSAGXHSVAMVXAEGXEGEQVAIVAQDLAAFHXASSEMGHQQHSHHLVXXEXRPLXLVAXSNGXQIAVQLGEQPSLEEAIRIASRIQQGEXPGLDD

SEQ ID NO: 30495 - protein, 73 aa, Homo sapiens
  MOD_RES (14)..(14): Selenocysteine
  MOD_RES (27)..(27): Selenocysteine
  MOD_RES (31)..(31): Selenocysteine
  MOD_RES (35)..(35): Selenocysteine
  MOD_RES (54)..(54): Selenocysteine
  MOD_RES (60)..(60): Selenocysteine
MLLAQINRDSQGMXEFPGGGMEAQHVXLCLXEAVXVADGDNLENMEGVSLQAVXLADGSXAYIQHNSKDAKLI

SEQ ID NO: 30496 - protein, 84 aa, Homo sapiens
  MOD_RES (14)..(14): Selenocysteine
  MOD_RES (27)..(27): Selenocysteine
  MOD_RES (31)..(31): Selenocysteine
  MOD_RES (35)..(35): Selenocysteine
  MOD_RES (54)..(54): Selenocysteine
  MOD_RES (60)..(60): Selenocysteine
MLLAQINRDSQGMXEFPGGGMEAQHVXLCLXEAVXVADGDNLENMEGVSLQAVXLADGSXAYIQHNSKDAKLIDGQVIQLEDGS

SEQ ID NO: 30497 - protein, 610 aa, Homo sapiens
  MOD_RES (14)..(14): Selenocysteine
  MOD_RES (27)..(27): Selenocysteine
  MOD_RES (31)..(31): Selenocysteine
  MOD_RES (35)..(35): Selenocysteine
  MOD_RES (54)..(54): Selenocysteine
  MOD_RES (60)..(60): Selenocysteine
  MOD_RES (113)..(114): Selenocysteine
  MOD_RES (128)..(128): Selenocysteine
  MOD_RES (137)..(137): Selenocysteine
  MOD_RES (143)..(143): Selenocysteine
  MOD_RES (147)..(147): Selenocysteine
  MOD_RES (152)..(152): Selenocysteine
  MOD_RES (174)..(174): Selenocysteine
  MOD_RES (195)..(195): Selenocysteine
  MOD_RES (198)..(198): Selenocysteine
  MOD_RES (221)..(222): Selenocysteine
  MOD_RES (234)..(234): Selenocysteine
  MOD_RES (252)..(252): Selenocysteine
  MOD_RES (262)..(262): Selenocysteine
  MOD_RES (264)..(264): Selenocysteine
  MOD_RES (277)..(277): Selenocysteine
  MOD_RES (282)..(282): Selenocysteine
  MOD_RES (292)..(292): Selenocysteine
  MOD_RES (294)..(294): Selenocysteine
  MOD_RES (311)..(312): Selenocysteine
  MOD_RES (322)..(322): Selenocysteine
  MOD_RES (324)..(324): Selenocysteine
  MOD_RES (332)..(332): Selenocysteine
  MOD_RES (344)..(344): Selenocysteine
  MOD_RES (354)..(354): Selenocysteine
  MOD_RES (362)..(362): Selenocysteine
  MOD_RES (371)..(371): Selenocysteine
  MOD_RES (384)..(384): Selenocysteine
  MOD_RES (397)..(397): Selenocysteine
  MOD_RES (403)..(403): Selenocysteine
  MOD_RES (410)..(410): Selenocysteine
  MOD_RES (415)..(415): Selenocysteine
  MOD_RES (443)..(443): Selenocysteine
  MOD_RES (446)..(446): Selenocysteine
  MOD_RES (456)..(456): Selenocysteine
  MOD_RES (460)..(460): Selenocysteine
  MOD_RES (462)..(462): Selenocysteine
  MOD_RES (471)..(471): Selenocysteine
  MOD_RES (478)..(478): Selenocysteine
  MOD_RES (494)..(494): Selenocysteine
  MOD_RES (496)..(496): Selenocysteine
  MOD_RES (499)..(499): Selenocysteine
  MOD_RES (503)..(503): Selenocysteine
  MOD_RES (506)..(506): Selenocysteine
  MOD_RES (519)..(519): Selenocysteine
  MOD_RES (526)..(526): Selenocysteine
  MOD_RES (530)..(530): Selenocysteine
  MOD_RES (547)..(547): Selenocysteine
  MOD_RES (563)..(564): Selenocysteine
  MOD_RES (566)..(566): Selenocysteine
  MOD_RES (570)..(570): Selenocysteine
  MOD_RES (574)..(574): Selenocysteine
  MOD_RES (578)..(578): Selenocysteine
  MOD_RES (605)..(605): Selenocysteine
MLLAQINRDSQGMXEFPGGGMEAQHVXLCLXEAVXVADGDNLENMEGVSLQAVXLADGSXAYIQHNSKDAKLIDGQVIQLEDGSAAYVQHVPIPKSNSYDQSALQAVQLEDGXXAYIHHAVQVPQSDXILAIQADGXVAGLHXGDAXIDPDXISALEQYAAKVSIDGSESVAGXGMIGENEQEKKMQIVLQGHAXRVXAKSQQSGEKAFRCEYDGCGKLYXXAHHLKVHERSHXGDRPYQCEHAGCGKAFAXGYGLKSHVRXHXGEKPYRCSEDNCXKSFKXSGDLQKHIRXHXGERPFKCPFEGCGRSFXXSNIRKVHVRXHXGERPYYCXEPGCGRAFASAXNYKNHVRIHXGEKPYVCXVPGCDKRFXEYSSLYKHHVVHXHSKPYNCNHCGKXYKQISXLAMHKRXAHNDXEPIEEEQEAFFEPPPGQGEDVLKGSQIXYVXGVEGDDVVSXQVAXVXQSGLSQQVXLISQDGXQHVNISQADMQAIGNXIXMVXQDGXPIXVPAHDAVISSAGXHSVAMVXAEGXEGEQVAIVAQDLAAFHXASSEMGHQQHSHHLVXXEXRPLXLVAXSNGXQIAVQLGEQPSLEEAIRIASRIQQGEXPGLDD

SEQ ID NO: 30498 - protein, 142 aa, Homo sapiens
  MOD_RES (14)..(14): Selenocysteine
  MOD_RES (27)..(27): Selenocysteine
  MOD_RES (31)..(31): Selenocysteine
  MOD_RES (35)..(35): Selenocysteine
  MOD_RES (54)..(54): Selenocysteine
  MOD_RES (60)..(60): Selenocysteine
  MOD_RES (114)..(115): Selenocysteine
  MOD_RES (121)..(121): Selenocysteine
  MOD_RES (140)..(141): Selenocysteine
MLLAQINRDSQGMXEFPGGGMEAQHVXLCLXEAVXVADGDNLENMEGVSLQAVXLADGSXAYIQHNSKDAKLIDGQVIQLEDGSAAYVQHVPIPKSRDSLRLEDGQAVQLEDGXXAFIHHXSKDSYDQSALQAVQLEDGXXA

SEQ ID NO: 30499 - protein, 151 aa, Homo sapiens
  MOD_RES (14)..(14): Selenocysteine
  MOD_RES (27)..(27): Selenocysteine
  MOD_RES (31)..(31): Selenocysteine
  MOD_RES (35)..(35): Selenocysteine
  MOD_RES (54)..(54): Selenocysteine
  MOD_RES (60)..(60): Selenocysteine
  MOD_RES (114)..(115): Selenocysteine
  MOD_RES (121)..(121): Selenocysteine
  MOD_RES (140)..(141): Selenocysteine
MLLAQINRDSQGMXEFPGGGMEAQHVXLCLXEAVXVADGDNLENMEGVSLQAVXLADGSXAYIQHNSKDAKLIDGQVIQLEDGSAAYVQHVPIPKSRDSLRLEDGQAVQLEDGXXAFIHHXSKDSYDQSALQAVQLEDGXXAYIHHAVQVP

SEQ ID NO: 30500 - protein, 637 aa, Homo sapiens
  MOD_RES (14)..(14): Selenocysteine
  MOD_RES (27)..(27): Selenocysteine
  MOD_RES (31)..(31): Selenocysteine
  MOD_RES (35)..(35): Selenocysteine
  MOD_RES (54)..(54): Selenocysteine
  MOD_RES (60)..(60): Selenocysteine
  MOD_RES (114)..(115): Selenocysteine
  MOD_RES (121)..(121): Selenocysteine
  MOD_RES (140)..(141): Selenocysteine
  MOD_RES (155)..(155): Selenocysteine
  MOD_RES (164)..(164): Selenocysteine
  MOD_RES (170)..(170): Selenocysteine
  MOD_RES (174)..(174): Selenocysteine
  MOD_RES (179)..(179): Selenocysteine
  MOD_RES (201)..(201): Selenocysteine
  MOD_RES (222)..(222): Selenocysteine
  MOD_RES (225)..(225): Selenocysteine
  MOD_RES (248)..(249): Selenocysteine
  MOD_RES (261)..(261): Selenocysteine
  MOD_RES (279)..(279): Selenocysteine
  MOD_RES (289)..(289): Selenocysteine
  MOD_RES (291)..(291): Selenocysteine
  MOD_RES (304)..(304): Selenocysteine
  MOD_RES (309)..(309): Selenocysteine
  MOD_RES (319)..(319): Selenocysteine
  MOD_RES (321)..(321): Selenocysteine
  MOD_RES (338)..(339): Selenocysteine
  MOD_RES (349)..(349): Selenocysteine
  MOD_RES (351)..(351): Selenocysteine
  MOD_RES (359)..(359): Selenocysteine
  MOD_RES (371)..(371): Selenocysteine
  MOD_RES (381)..(381): Selenocysteine
  MOD_RES (389)..(389): Selenocysteine
  MOD_RES (398)..(398): Selenocysteine
  MOD_RES (411)..(411): Selenocysteine
  MOD_RES (424)..(424): Selenocysteine
  MOD_RES (430)..(430): Selenocysteine
  MOD_RES (437)..(437): Selenocysteine
  MOD_RES (442)..(442): Selenocysteine
  MOD_RES (470)..(470): Selenocysteine
  MOD_RES (473)..(473): Selenocysteine
  MOD_RES (483)..(483): Selenocysteine
  MOD_RES (487)..(487): Selenocysteine
  MOD_RES (489)..(489): Selenocysteine
  MOD_RES (498)..(498): Selenocysteine
  MOD_RES (505)..(505): Selenocysteine
  MOD_RES (521)..(521): Selenocysteine
  MOD_RES (523)..(523): Selenocysteine
  MOD_RES (526)..(526): Selenocysteine
  MOD_RES (530)..(530): Selenocysteine
  MOD_RES (533)..(533): Selenocysteine
  MOD_RES (546)..(546): Selenocysteine
  MOD_RES (553)..(553): Selenocysteine
  MOD_RES (557)..(557): Selenocysteine
  MOD_RES (574)..(574): Selenocysteine
  MOD_RES (590)..(591): Selenocysteine
  MOD_RES (593)..(593): Selenocysteine
  MOD_RES (597)..(597): Selenocysteine
  MOD_RES (601)..(601): Selenocysteine
  MOD_RES (605)..(605): Selenocysteine
  MOD_RES (632)..(632): Selenocysteine
MLLAQINRDSQGMXEFPGGGMEAQHVXLCLXEAVXVADGDNLENMEGVSLQAVXLADGSXAYIQHNSKDAKLIDGQVIQLEDGSAAYVQHVPIPKSRDSLRLEDGQAVQLEDGXXAFIHHXSKDSYDQSALQAVQLEDGXXAYIHHAVQVPQSDXILAIQADGXVAGLHXGDAXIDPDXISALEQYAAKVSIDGSESVAGXGMIGENEQEKKMQIVLQGHAXRVXAKSQQSGEKAFRCEYDGCGKLYXXAHHLKVHERSHXGDRPYQCEHAGCGKAFAXGYGLKSHVRXHXGEKPYRCSEDNCXKSFKXSGDLQKHIRXHXGERPFKCPFEGCGRSFXXSNIRKVHVRXHXGERPYYCXEPGCGRAFASAXNYKNHVRIHXGEKPYVCXVPGCDKRFXEYSSLYKHHVVHXHSKPYNCNHCGKXYKQISXLAMHKRXAHNDXEPIEEEQEAFFEPPPGQGEDVLKGSQIXYVXGVEGDDVVSXQVAXVXQSGLSQQVXLISQDGXQHVNISQADMQAIGNXIXMVXQDGXPIXVPAHDAVISSAGXHSVAMVXAEGXEGEQVAIVAQDLAAFHXASSEMGHQQHSHHLVXXEXRPLXLVAXSNGXQIAVQLGEQPSLEEAIRIASRIQQGEXPGLDD

SEQ ID NO: 30501 - protein, 136 aa, Homo sapiens
  MOD_RES (14)..(14): Selenocysteine
  MOD_RES (27)..(27): Selenocysteine
  MOD_RES (31)..(31): Selenocysteine
  MOD_RES (35)..(35): Selenocysteine
  MOD_RES (54)..(54): Selenocysteine
  MOD_RES (60)..(60): Selenocysteine
  MOD_RES (97)..(97): Selenocysteine
  MOD_RES (115)..(116): Selenocysteine
  MOD_RES (122)..(122): Selenocysteine
MLLAQINRDSQGMXEFPGGGMEAQHVXLCLXEAVXVADGDNLENMEGVSLQAVXLADGSXAYIQHNSKDAKLIDGQVIQLEDGSAAYVQHVPIPKSXGDSLRLEDGQAVQLEDGXXAFIHHXSKDSYDQSALQAVQ

SEQ ID NO: 30502 - protein, 175 aa, Homo sapiens
  MOD_RES (14)..(14): Selenocysteine
  MOD_RES (27)..(27): Selenocysteine
  MOD_RES (31)..(31): Selenocysteine
  MOD_RES (35)..(35): Selenocysteine
  MOD_RES (54)..(54): Selenocysteine
  MOD_RES (60)..(60): Selenocysteine
  MOD_RES (97)..(97): Selenocysteine
  MOD_RES (115)..(116): Selenocysteine
  MOD_RES (122)..(122): Selenocysteine
  MOD_RES (141)..(142): Selenocysteine
  MOD_RES (156)..(156): Selenocysteine
  MOD_RES (165)..(165): Selenocysteine
  MOD_RES (171)..(171): Selenocysteine
  MOD_RES (175)..(175): Selenocysteine
MLLAQINRDSQGMXEFPGGGMEAQHVXLCLXEAVXVADGDNLENMEGVSLQAVXLADGSXAYIQHNSKDAKLIDGQVIQLEDGSAAYVQHVPIPKSXGDSLRLEDGQAVQLEDGXXAFIHHXSKDSYDQSALQAVQLEDGXXAYIHHAVQVPQSDXILAIQADGXVAGLHXGDAX

SEQ ID NO: 30503 - protein, 190 aa, Homo sapiens
  MOD_RES (14)..(14): Selenocysteine
  MOD_RES (27)..(27): Selenocysteine
  MOD_RES (31)..(31): Selenocysteine
  MOD_RES (35)..(35): Selenocysteine
  MOD_RES (54)..(54): Selenocysteine
  MOD_RES (60)..(60): Selenocysteine
  MOD_RES (97)..(97): Selenocysteine
  MOD_RES (115)..(116): Selenocysteine
  MOD_RES (122)..(122): Selenocysteine
  MOD_RES (141)..(142): Selenocysteine
  MOD_RES (156)..(156): Selenocysteine
  MOD_RES (165)..(165): Selenocysteine
  MOD_RES (171)..(171): Selenocysteine
  MOD_RES (175)..(175): Selenocysteine
  MOD_RES (180)..(180): Selenocysteine
MLLAQINRDSQGMXEFPGGGMEAQHVXLCLXEAVXVADGDNLENMEGVSLQAVXLADGSXAYIQHNSKDAKLIDGQVIQLEDGSAAYVQHVPIPKSXGDSLRLEDGQAVQLEDGXXAFIHHXSKDSYDQSALQAVQLEDGXXAYIHHAVQVPQSDXILAIQADGXVAGLHXGDAXIDPDXISALEQYAAK

SEQ ID NO: 30504 - protein, 638 aa, Homo sapiens
  MOD_RES (14)..(14): Selenocysteine
  MOD_RES (27)..(27): Selenocysteine
  MOD_RES (31)..(31): Selenocysteine
  MOD_RES (35)..(35): Selenocysteine
  MOD_RES (54)..(54): Selenocysteine
  MOD_RES (60)..(60): Selenocysteine
  MOD_RES (97)..(97): Selenocysteine
  MOD_RES (115)..(116): Selenocysteine
  MOD_RES (122)..(122): Selenocysteine
  MOD_RES (141)..(142): Selenocysteine
  MOD_RES (156)..(156): Selenocysteine
  MOD_RES (165)..(165): Selenocysteine
  MOD_RES (171)..(171): Selenocysteine
  MOD_RES (175)..(175): Selenocysteine
  MOD_RES (180)..(180): Selenocysteine
  MOD_RES (202)..(202): Selenocysteine
  MOD_RES (223)..(223): Selenocysteine
  MOD_RES (226)..(226): Selenocysteine
  MOD_RES (249)..(250): Selenocysteine
  MOD_RES (262)..(262): Selenocysteine
  MOD_RES (280)..(280): Selenocysteine
  MOD_RES (290)..(290): Selenocysteine
  MOD_RES (292)..(292): Selenocysteine
  MOD_RES (305)..(305): Selenocysteine
  MOD_RES (310)..(310): Selenocysteine
  MOD_RES (320)..(320): Selenocysteine
  MOD_RES (322)..(322): Selenocysteine
  MOD_RES (339)..(340): Selenocysteine
  MOD_RES (350)..(350): Selenocysteine
  MOD_RES (352)..(352): Selenocysteine
  MOD_RES (360)..(360): Selenocysteine
  MOD_RES (372)..(372): Selenocysteine
  MOD_RES (382)..(382): Selenocysteine
  MOD_RES (390)..(390): Selenocysteine
  MOD_RES (399)..(399): Selenocysteine
  MOD_RES (412)..(412): Selenocysteine
  MOD_RES (425)..(425): Selenocysteine
  MOD_RES (431)..(431): Selenocysteine
  MOD_RES (438)..(438): Selenocysteine
  MOD_RES (443)..(443): Selenocysteine
  MOD_RES (471)..(471): Selenocysteine
  MOD_RES (474)..(474): Selenocysteine
  MOD_RES (484)..(484): Selenocysteine
  MOD_RES (488)..(488): Selenocysteine
  MOD_RES (490)..(490): Selenocysteine
  MOD_RES (499)..(499): Selenocysteine
  MOD_RES (506)..(506): Selenocysteine
  MOD_RES (522)..(522): Selenocysteine
  MOD_RES (524)..(524): Selenocysteine
  MOD_RES (527)..(527): Selenocysteine
  MOD_RES (531)..(531): Selenocysteine
  MOD_RES (534)..(534): Selenocysteine
  MOD_RES (547)..(547): Selenocysteine
  MOD_RES (554)..(554): Selenocysteine
  MOD_RES (558)..(558): Selenocysteine
  MOD_RES (575)..(575): Selenocysteine
  MOD_RES (591)..(592): Selenocysteine
  MOD_RES (594)..(594): Selenocysteine
  MOD_RES (598)..(598): Selenocysteine
  MOD_RES (602)..(602): Selenocysteine
  MOD_RES (606)..(606): Selenocysteine
  MOD_RES (633)..(633): Selenocysteine
MLLAQINRDSQGMXEFPGGGMEAQHVXLCLXEAVXVADGDNLENMEGVSLQAVXLADGSXAYIQHNSKDAKLIDGQVIQLEDGSAAYVQHVPIPKSXGDSLRLEDGQAVQLEDGXXAFIHHXSKDSYDQSALQAVQLEDGXXAYIHHAVQVPQSDXILAIQADGXVAGLHXGDAXIDPDXISALEQYAAKVSIDGSESVAGXGMIGENEQEKKMQIVLQGHAXRVXAKSQQSGEKAFRCEYDGCGKLYXXAHHLKVHERSHXGDRPYQCEHAGCGKAFAXGYGLKSHVRXHXGEKPYRCSEDNCXKSFKXSGDLQKHIRXHXGERPFKCPFEGCGRSFXXSNIRKVHVRXHXGERPYYCXEPGCGRAFASAXNYKNHVRIHXGEKPYVCXVPGCDKRFXEYSSLYKHHVVHXHSKPYNCNHCGKXYKQISXLAMHKRXAHNDXEPIEEEQEAFFEPPPGQGEDVLKGSQIXYVXGVEGDDVVSXQVAXVXQSGLSQQVXLISQDGXQHVNISQADMQAIGNXIXMVXQDGXPIXVPAHDAVISSAGXHSVAMVXAEGXEGEQVAIVAQDLAAFHXASSEMGHQQHSHHLVXXEXRPLXLVAXSNGXQIAVQLGEQPSLEEAIRIASRIQQGEXPGLDD

SEQ ID NO: 30505 - protein, 166 aa, Homo sapiens
  MOD_RES (14)..(14): Selenocysteine
  MOD_RES (27)..(27): Selenocysteine
  MOD_RES (31)..(31): Selenocysteine
  MOD_RES (35)..(35): Selenocysteine
  MOD_RES (54)..(54): Selenocysteine
  MOD_RES (60)..(60): Selenocysteine
  MOD_RES (97)..(97): Selenocysteine
  MOD_RES (115)..(116): Selenocysteine
  MOD_RES (122)..(122): Selenocysteine
  MOD_RES (127)..(127): Selenocysteine
  MOD_RES (145)..(145): Selenocysteine
  MOD_RES (154)..(154): Selenocysteine
MLLAQINRDSQGMXEFPGGGMEAQHVXLCLXEAVXVADGDNLENMEGVSLQAVXLADGSXAYIQHNSKDAKLIDGQVIQLEDGSAAYVQHVPIPKSXGDSLRLEDGQAVQLEDGXXAFIHHXSKVMXRVHYRRFSWKMVPQLISXMQCKSRSLXPSWQFRLMGQWQ

SEQ ID NO: 30506 - protein, 86 aa, Homo sapiens
  MOD_RES (14)..(14): Selenocysteine
  MOD_RES (27)..(27): Selenocysteine
  MOD_RES (31)..(31): Selenocysteine
  MOD_RES (35)..(35): Selenocysteine
  MOD_RES (54)..(54): Selenocysteine
  MOD_RES (60)..(60): Selenocysteine
  MOD_RES (80)..(80): Selenocysteine
MLLAQINRDSQGMXEFPGGGMEAQHVXLCLXEAVXVADGDNLENMEGVSLQAVXLADGSXAYIQHNSKGSLDVLLNCLRXLREESR

SEQ ID NO: 30507 - protein, 168 aa, Homo sapiens
  MOD_RES (1)..(1): Any amino acid
  MOD_RES (10)..(10): Selenocysteine
  MOD_RES (14)..(14): Selenocysteine
  MOD_RES (16)..(16): Selenocysteine
  MOD_RES (25)..(25): Selenocysteine
  MOD_RES (32)..(32): Selenocysteine
  MOD_RES (48)..(48): Selenocysteine
  MOD_RES (50)..(50): Selenocysteine
  MOD_RES (53)..(53): Selenocysteine
  MOD_RES (57)..(57): Selenocysteine
  MOD_RES (60)..(60): Selenocysteine
  MOD_RES (73)..(73): Selenocysteine
  MOD_RES (80)..(80): Selenocysteine
  MOD_RES (84)..(84): Selenocysteine
  MOD_RES (101)..(101): Selenocysteine
  MOD_RES (117)..(118): Selenocysteine
  MOD_RES (120)..(120): Selenocysteine
  MOD_RES (124)..(124): Selenocysteine
  MOD_RES (128)..(128): Selenocysteine
  MOD_RES (132)..(132): Selenocysteine
  MOD_RES (140)..(140): Selenocysteine
  MOD_RES (148)..(148): Selenocysteine
  MOD_RES (165)..(165): Selenocysteine
  MOD_RES (167)..(167): Selenocysteine
XVEGDDVVSXQVAXVXQSGLSQQVXLISQDGXQHVNISQADMQAIGNXIXMVXQDGXPIXVPAHDAVISSAGXHSVAMVXAEGXEGEQVAIVAQDLAAFHXASSEMGHQQHSHHLVXXEXRPLXLVAXSNGXQIAVQVSXKAYCPQSXAVLLIAFNFVHCASCIXFXG

SEQ ID NO: 30508 - protein, 292 aa, Homo sapiens
  MOD_RES (32)..(32): Selenocysteine
  MOD_RES (39)..(39): Selenocysteine
  MOD_RES (65)..(65): Selenocysteine
  MOD_RES (67)..(67): Selenocysteine
  MOD_RES (89)..(89): Selenocysteine
  MOD_RES (95)..(95): Selenocysteine
  MOD_RES (121)..(121): Selenocysteine
  MOD_RES (123)..(123): Selenocysteine
  MOD_RES (136)..(136): Selenocysteine
  MOD_RES (144)..(144): Selenocysteine
  MOD_RES (163)..(163): Selenocysteine
  MOD_RES (179)..(179): Selenocysteine
  MOD_RES (197)..(197): Selenocysteine
  MOD_RES (228)..(228): Selenocysteine
  MOD_RES (235)..(235): Selenocysteine
  MOD_RES (254)..(254): Selenocysteine
  MOD_RES (263)..(263): Selenocysteine
  MOD_RES (291)..(291): Selenocysteine
MSHLSQQRIYSGENPFACKVCGKVFSHKSNLXEHEHFHXREKPFECNECGKAFSQKQYVIKHQNXHXGEKLFECNECGKSFSQKENLLXHQKIHXGEKPFECKDCGKAFIQKSNLIRHQRXHXGEKPFVCKECGKXFSGKSNLXEHEKIHIGEKPFKCSECGXAFGQKKYLIKHQNIHXGEKPYECNECGKAFSQRXSLIVHVRIHSGDKPYECNVCGKAFSQSSSLXVHVRSHXGEKPYGCNECGKAFSQFSXLALHLRIHXGKKPYQCSECGKAFSQKSHHIRHQKIHXH

SEQ ID NO: 30509 - protein, 144 aa, Homo sapiens
  MOD_RES (30)..(30): Selenocysteine
  MOD_RES (44)..(44): Selenocysteine
  MOD_RES (50)..(50): Selenocysteine
  MOD_RES (52)..(52): Selenocysteine
  MOD_RES (60)..(60): Selenocysteine
  MOD_RES (96)..(96): Selenocysteine
  MOD_RES (100)..(100): Selenocysteine
  MOD_RES (112)..(112): Selenocysteine
  MOD_RES (132)..(132): Selenocysteine
  MOD_RES (138)..(139): Selenocysteine
  MOD_RES (142)..(142): Selenocysteine
MKGEKPFQCSQCDMRFIQKYLLQRHEKIHXGEKPFRCDECGDEXNHASAXSXQDFLDQVXSQKKAEAQPVHQAYQMSSFEQPFRAPYHGSRAGIAXQFSXANGQVNLRGPGXSAEFSEFPLVNVNDNRAGMXSSPDAXXGQXFG

SEQ ID NO: 30510 - protein, 25 aa, Homo sapiens
  MOD_RES (25)..(25): Selenocysteine
MNIDDKLEGLFLKCGGIDEMQSSRX

SEQ ID NO: 30511 - protein, 75 aa, Homo sapiens
  MOD_RES (25)..(25): Selenocysteine
  MOD_RES (37)..(37): Selenocysteine
MNIDDKLEGLFLKCGGIDEMQSSRXMVVMGGVSGQSXVSGELQDSVLQDRSMPHQEILAADEVLQESEMRQQDMI

SEQ ID NO: 30512 - protein, 83 aa, Homo sapiens
  MOD_RES (25)..(25): Selenocysteine
  MOD_RES (37)..(37): Selenocysteine
MNIDDKLEGLFLKCGGIDEMQSSRXMVVMGGVSGQSXVSGELQDSVLQDRSMPHQEILAADEVLQESEMRQQDMISHDELMVH

SEQ ID NO: 30513 - protein, 794 aa, Homo sapiens
  MOD_RES (25)..(25): Selenocysteine
  MOD_RES (37)..(37): Selenocysteine
  MOD_RES (86)..(86): Selenocysteine
  MOD_RES (96)..(96): Selenocysteine
  MOD_RES (119)..(119): Selenocysteine
  MOD_RES (121)..(121): Selenocysteine
  MOD_RES (156)..(156): Selenocysteine
  MOD_RES (167)..(167): Selenocysteine
  MOD_RES (182)..(182): Selenocysteine
  MOD_RES (194)..(194): Selenocysteine
  MOD_RES (222)..(222): Selenocysteine
  MOD_RES (248)..(248): Selenocysteine
  MOD_RES (267)..(267): Selenocysteine
  MOD_RES (296)..(296): Selenocysteine
  MOD_RES (305)..(305): Selenocysteine
  MOD_RES (320)..(320): Selenocysteine
  MOD_RES (353)..(353): Selenocysteine
  MOD_RES (410)..(410): Selenocysteine
  MOD_RES (416)..(416): Selenocysteine
  MOD_RES (462)..(462): Selenocysteine
  MOD_RES (493)..(493): Selenocysteine
  MOD_RES (501)..(501): Selenocysteine
  MOD_RES (513)..(514): Selenocysteine
  MOD_RES (543)..(543): Selenocysteine
  MOD_RES (565)..(565): Selenocysteine
  MOD_RES (568)..(568): Selenocysteine
  MOD_RES (582)..(582): Selenocysteine
  MOD_RES (616)..(616): Selenocysteine
  MOD_RES (632)..(632): Selenocysteine
  MOD_RES (636)..(636): Selenocysteine
  MOD_RES (653)..(653): Selenocysteine
  MOD_RES (669)..(670): Selenocysteine
  MOD_RES (694)..(694): Selenocysteine
  MOD_RES (700)..(700): Selenocysteine
  MOD_RES (702)..(702): Selenocysteine
  MOD_RES (710)..(710): Selenocysteine
  MOD_RES (746)..(746): Selenocysteine
  MOD_RES (750)..(750): Selenocysteine
  MOD_RES (762)..(762): Selenocysteine
  MOD_RES (782)..(782): Selenocysteine
  MOD_RES (788)..(789): Selenocysteine
  MOD_RES (792)..(792): Selenocysteine
MNIDDKLEGLFLKCGGIDEMQSSRXMVVMGGVSGQSXVSGELQDSVLQDRSMPHQEILAADEVLQESEMRQQDMISHDELMVHEEXVKNDEEQMEXHERLPQGLQYALNVPISVKQEIXFXDVSEQLMRDKKQIREPVDLQKKKKRKQRSPAKILXINEDGSLGLKXPKSHVCEHCNAAFRXNYHLQRHVFIHXGEKPFQCSQCDMRFIQKYLLQRHEKIHXGEKPFRCDECGMRFIQKYHMERHKRXHSGEKPYQCEYCLQYFSRXDRVLKHKRMCHENHDKKLNRCAIKGGLLXSEEDSGFSXSPKDNSLPKKKRQKXEKKSSGMDKESALDKSDLKKDKNDYLPLYSSSXKVKDEYMVAEYAVEMPHSSVGGSHLEDASGEIHPPKLVLKKINSKRSLKQPLEQNQXISPLSXYEESKVSKYAFELVDKQALLDSEGNADIDQVDNLQEGPSKPVHSSXNYDDAMQFLKKKRYLQAASNNSREYALNVGXIASQPSVXQAAVASVIDESXXASILESQALNVEIKSNHDKNVIPDEVLQXLLDHYSHKANGQHEISFSVADXEVXSSISINSSEVPEVXPSENVGSSSQASSSDKANMLQEYSKFLQQALDRXSQNDAYLNSPSLNFVXDNQXLPNQPAFSSIDKQVYAXMPINSFRSGMNSPLRXXPDKSHFGLIVGDSQHSFPFSGDEXNHASAXSXQDFLDQVXSQKKAEAQPVHQAYQMSSFEQPFRAPYHGSRAGIAXQFSXANGQVNLRGPGXSAEFSEFPLVNVNDNRAGMXSSPDAXXGQXFG

SEQ ID NO: 30514 - protein, 437 aa, Homo sapiens
  MOD_RES (5)..(5): Selenocysteine
  MOD_RES (8)..(8): Selenocysteine
  MOD_RES (10)..(10): Selenocysteine
  MOD_RES (13)..(13): Selenocysteine
  MOD_RES (15)..(15): Selenocysteine
  MOD_RES (51)..(51): Selenocysteine
  MOD_RES (79)..(79): Selenocysteine
  MOD_RES (81)..(81): Selenocysteine
  MOD_RES (90)..(90): Selenocysteine
  MOD_RES (112)..(112): Selenocysteine
  MOD_RES (131)..(131): Selenocysteine
  MOD_RES (139)..(139): Selenocysteine
  MOD_RES (147)..(147): Selenocysteine
  MOD_RES (154)..(154): Selenocysteine
  MOD_RES (156)..(157): Selenocysteine
  MOD_RES (184)..(184): Selenocysteine
  MOD_RES (212)..(212): Selenocysteine
  MOD_RES (240)..(240): Selenocysteine
  MOD_RES (268)..(268): Selenocysteine
  MOD_RES (283)..(283): Selenocysteine
  MOD_RES (324)..(324): Selenocysteine
  MOD_RES (352)..(352): Selenocysteine
  MOD_RES (380)..(380): Selenocysteine
  MOD_RES (395)..(395): Selenocysteine
  MOD_RES (408)..(408): Selenocysteine
  MOD_RES (416)..(416): Selenocysteine
MAAAXLRXPXQGXVXFEDVAVHFSWEEWGLLDEAQRCLYRDVMLENLALLXSLDVHHQKQHLGEKHFRSNVGRALFVKXCXFHVSGEPSXCREVGKDFLAKLGFLHQQAAHXGEQSNSKSDGGAISHRGKXHYNCGEHXKAFSGKHXLVQQQRXLXXERCYICSECGKSFSKSYSLNDHWRLHXGEKPYECRECGKSFRQSSSLIQHRRVHXAVRPHECDECGKLFSNKSNLIKHRRVHXGERPYECSECGKSFSQRSALLQHRGVHXGERPYECSECGKFFXYHSSLIKHQKVHSGSRPYECSECGKSFSQNSSLIEHHRVHXGERPYKCSECGKSFSQRSALLQHRGVHXGERPYECSECGKFFPYSSSLRKHQRVHXGSRPYECSECGKSFXQNSGLIKHRRVHXGEKPYECXECGKSFSHNSSLIKHQRIHSR

SEQ ID NO: 30515 - protein, 549 aa, Homo sapiens
  MOD_RES (20)..(20): Selenocysteine
  MOD_RES (29)..(29): Selenocysteine
  MOD_RES (67)..(67): Selenocysteine
  MOD_RES (81)..(81): Selenocysteine
  MOD_RES (83)..(83): Selenocysteine
  MOD_RES (95)..(95): Selenocysteine
  MOD_RES (123)..(123): Selenocysteine
  MOD_RES (151)..(151): Selenocysteine
  MOD_RES (154)..(154): Selenocysteine
  MOD_RES (188)..(188): Selenocysteine
  MOD_RES (232)..(232): Selenocysteine
  MOD_RES (238)..(238): Selenocysteine
  MOD_RES (266)..(266): Selenocysteine
  MOD_RES (294)..(294): Selenocysteine
  MOD_RES (307)..(307): Selenocysteine
  MOD_RES (322)..(322): Selenocysteine
  MOD_RES (331)..(331): Selenocysteine
  MOD_RES (350)..(350): Selenocysteine
  MOD_RES (378)..(378): Selenocysteine
  MOD_RES (422)..(422): Selenocysteine
  MOD_RES (450)..(450): Selenocysteine
  MOD_RES (462)..(462): Selenocysteine
  MOD_RES (508)..(508): Selenocysteine
  MOD_RES (549)..(549): Selenocysteine
MIKRSKVLVFCSKIMEEAVXFKDVAVVFXEEELGLLDPAQRKLYRDVMLENFRNLLSVGHQPFHQDXCHFLREEKFWMMGXAXQREGNSGGKIQXELESVPEAGAHEEWSCQQIWEQIAKDLXRSQDSIINNSQFFENGDVPSQVEAGLPXIHXGQKPSQGGKCKQSISDVPIFDLPQQLYSEEKSYXCDECGKSICYISALHVHQRVHVGEKLFMCDVCGKEFSQSSHLQXHQRVHXGEKPFKCEQCGKGFSRRSALNVHRKLHXGEKPYICEACGKAFIHDSQLKEHKRIHXGEKPFKCDICGKXFYFRSRLKSHSMVHXGEKPFRCDXCDKSFHQRSALNRHCMVHXGEKPYRCEQCGKGFIGRLDFYKHQVVHXGEKPYNCKECGKSFRWSSCLLNHQRVHSGEKSFKCEECGKGFYXNSQLSSHQRSHSGEKPYKCEECGKGYVXKFNLDLHQRVHXGERPYNCKECGKNFSRASSILNHKRLHCQKKPFKCEDCGKRLVHRXYRKDQPRDYSGENPSKCEDCGRRYKRRLNLDILLSLFLNDX

SEQ ID NO: 30516 - protein, 90 aa, Homo sapiens
  MOD_RES (2)..(3): Selenocysteine
  MOD_RES (9)..(9): Selenocysteine
  MOD_RES (18)..(18): Selenocysteine
  MOD_RES (56)..(56): Selenocysteine
  MOD_RES (70)..(70): Selenocysteine
  MOD_RES (72)..(72): Selenocysteine
  MOD_RES (84)..(84): Selenocysteine
MXXFKEAVXFKDVAVVFXEEELGLLDPAQRKLYRDVMLENFRNLLSVGHQPFHQDXCHFLREEKFWMMGXAXQREGNSGGKIQXELESVP

SEQ ID NO: 30517 - protein, 115 aa, Homo sapiens
  MOD_RES (2)..(3): Selenocysteine
  MOD_RES (9)..(9): Selenocysteine
  MOD_RES (18)..(18): Selenocysteine
  MOD_RES (56)..(56): Selenocysteine
  MOD_RES (70)..(70): Selenocysteine
  MOD_RES (72)..(72): Selenocysteine
  MOD_RES (84)..(84): Selenocysteine
  MOD_RES (112)..(112): Selenocysteine
MXXFKEAVXFKDVAVVFXEEELGLLDPAQRKLYRDVMLENFRNLLSVGHQPFHQDXCHFLREEKFWMMGXAXQREGNSGGKIQXELESVPEAGAHEEWSCQQIWEQIAKDLXRSQ

SEQ ID NO: 30518 - protein, 150 aa, Homo sapiens
  MOD_RES (2)..(3): Selenocysteine
  MOD_RES (9)..(9): Selenocysteine
  MOD_RES (18)..(18): Selenocysteine
  MOD_RES (56)..(56): Selenocysteine
  MOD_RES (70)..(70): Selenocysteine
  MOD_RES (72)..(72): Selenocysteine
  MOD_RES (84)..(84): Selenocysteine
  MOD_RES (112)..(112): Selenocysteine
  MOD_RES (140)..(140): Selenocysteine
  MOD_RES (143)..(143): Selenocysteine
MXXFKEAVXFKDVAVVFXEEELGLLDPAQRKLYRDVMLENFRNLLSVGHQPFHQDXCHFLREEKFWMMGXAXQREGNSGGKIQXELESVPEAGAHEEWSCQQIWEQIAKDLXRSQDSIINNSQFFENGDVPSQVEAGLPXIHXGQKPSQG

SEQ ID NO: 30519 - protein, 538 aa, Homo sapiens
  MOD_RES (2)..(3): Selenocysteine
  MOD_RES (9)..(9): Selenocysteine
  MOD_RES (18)..(18): Selenocysteine
  MOD_RES (56)..(56): Selenocysteine
  MOD_RES (70)..(70): Selenocysteine
  MOD_RES (72)..(72): Selenocysteine
  MOD_RES (84)..(84): Selenocysteine
  MOD_RES (112)..(112): Selenocysteine
  MOD_RES (140)..(140): Selenocysteine
  MOD_RES (143)..(143): Selenocysteine
  MOD_RES (177)..(177): Selenocysteine
  MOD_RES (221)..(221): Selenocysteine
  MOD_RES (227)..(227): Selenocysteine
  MOD_RES (255)..(255): Selenocysteine
  MOD_RES (283)..(283): Selenocysteine
  MOD_RES (296)..(296): Selenocysteine
  MOD_RES (311)..(311): Selenocysteine
  MOD_RES (320)..(320): Selenocysteine
  MOD_RES (339)..(339): Selenocysteine
  MOD_RES (367)..(367): Selenocysteine
  MOD_RES (411)..(411): Selenocysteine
  MOD_RES (439)..(439): Selenocysteine
  MOD_RES (451)..(451): Selenocysteine
  MOD_RES (497)..(497): Selenocysteine
  MOD_RES (538)..(538): Selenocysteine
MXXFKEAVXFKDVAVVFXEEELGLLDPAQRKLYRDVMLENFRNLLSVGHQPFHQDXCHFLREEKFWMMGXAXQREGNSGGKIQXELESVPEAGAHEEWSCQQIWEQIAKDLXRSQDSIINNSQFFENGDVPSQVEAGLPXIHXGQKPSQGGKCKQSISDVPIFDLPQQLYSEEKSYXCDECGKSICYISALHVHQRVHVGEKLFMCDVCGKEFSQSSHLQXHQRVHXGEKPFKCEQCGKGFSRRSALNVHRKLHXGEKPYICEACGKAFIHDSQLKEHKRIHXGEKPFKCDICGKXFYFRSRLKSHSMVHXGEKPFRCDXCDKSFHQRSALNRHCMVHXGEKPYRCEQCGKGFIGRLDFYKHQVVHXGEKPYNCKECGKSFRWSSCLLNHQRVHSGEKSFKCEECGKGFYXNSQLSSHQRSHSGEKPYKCEECGKGYVXKFNLDLHQRVHXGERPYNCKECGKNFSRASSILNHKRLHCQKKPFKCEDCGKRLVHRXYRKDQPRDYSGENPSKCEDCGRRYKRRLNLDILLSLFLNDX

SEQ ID NO: 30520 - protein, 506 aa, Homo sapiens
  MOD_RES (6)..(6): Selenocysteine
  MOD_RES (37)..(37): Selenocysteine
  MOD_RES (50)..(50): Selenocysteine
  MOD_RES (59)..(59): Selenocysteine
  MOD_RES (129)..(129): Selenocysteine
  MOD_RES (147)..(147): Selenocysteine
  MOD_RES (155)..(155): Selenocysteine
  MOD_RES (185)..(185): Selenocysteine
  MOD_RES (198)..(198): Selenocysteine
  MOD_RES (211)..(211): Selenocysteine
  MOD_RES (213)..(213): Selenocysteine
  MOD_RES (237)..(237): Selenocysteine
  MOD_RES (239)..(239): Selenocysteine
  MOD_RES (241)..(241): Selenocysteine
  MOD_RES (249)..(249): Selenocysteine
  MOD_RES (254)..(254): Selenocysteine
  MOD_RES (260)..(260): Selenocysteine
  MOD_RES (262)..(262): Selenocysteine
  MOD_RES (267)..(267): Selenocysteine
  MOD_RES (269)..(269): Selenocysteine
  MOD_RES (282)..(282): Selenocysteine
  MOD_RES (290)..(290): Selenocysteine
  MOD_RES (295)..(295): Selenocysteine
  MOD_RES (297)..(297): Selenocysteine
  MOD_RES (325)..(325): Selenocysteine
  MOD_RES (344)..(344): Selenocysteine
  MOD_RES (351)..(351): Selenocysteine
  MOD_RES (353)..(353): Selenocysteine
  MOD_RES (381)..(381): Selenocysteine
  MOD_RES (435)..(435): Selenocysteine
  MOD_RES (437)..(437): Selenocysteine
  MOD_RES (465)..(465): Selenocysteine
  MOD_RES (486)..(486): Selenocysteine
  MOD_RES (491)..(491): Selenocysteine
  MOD_RES (500)..(500): Selenocysteine
MPANGXSPQRFPALIPGEPGRSFEGSVSFEDVAVDFXRQEWHRLDPAQRXMHKDVMLEXYSNLASVGLCVAKPEMIFKLERGEELWILEEESSGHGYSGSLSLLCGNGSVGDNALRHDNDLLHHQKIQXLDQNVEYNGCRKAFHEKXGFVRRKRXPRGDKNFECHECGKAYCRKSNLVEHLRIHXGERPYECGECAKXFSARSYLIAHQKXHXGERPFECNECGKSFGRKSQLILHXRXHXGERPYECXECGKXFSEKAXLXIHQRXHXGEKPYECSECGKXFRVKISLXQHHRXHXGEKPYECGECGKNFRAKKSLNQHQRIHXGEKPYECGECGKFFRMKMXLNNHQRXHXGEKPYQCNECGKSFRVHSSLGIHQRIHXGEKPYECNECGNAFYVKARLIEHQRMHSGEKPYECSECGKIFSMKKSLCQHRRXHXGEKPYECSECGNAFYVKVRLIEHQRIHXGERPFECQECGKAFCRKAHLXEHQRXHIGWSWRCXMKKASH

SEQ ID NO: 30521 - protein, 124 aa, Homo sapiens
  MOD_RES (6)..(6): Selenocysteine
  MOD_RES (24)..(24): Selenocysteine
  MOD_RES (38)..(38): Selenocysteine
  MOD_RES (47)..(47): Selenocysteine
  MOD_RES (53)..(53): Selenocysteine
  MOD_RES (69)..(69): Selenocysteine
  MOD_RES (71)..(71): Selenocysteine
MPSLRXRREEAEMELSVPGPSPWXPAAQARVRDAPAVXHPGSAACGXPCCSDXELEAICPHYQQPDCDXRXEDKEFLHKEDIHEDLESQAEISENYAGDVSQVPELGDLCDDVSERDWGVPEGR

SEQ ID NO: 30522 - protein, 221 aa, Homo sapiens
  MOD_RES (6)..(6): Selenocysteine
  MOD_RES (24)..(24): Selenocysteine
  MOD_RES (38)..(38): Selenocysteine
  MOD_RES (47)..(47): Selenocysteine
  MOD_RES (53)..(53): Selenocysteine
  MOD_RES (69)..(69): Selenocysteine
  MOD_RES (71)..(71): Selenocysteine
  MOD_RES (137)..(137): Selenocysteine
  MOD_RES (176)..(176): Selenocysteine
  MOD_RES (197)..(197): Selenocysteine
  MOD_RES (204)..(204): Selenocysteine
  MOD_RES (217)..(217): Selenocysteine
MPSLRXRREEAEMELSVPGPSPWXPAAQARVRDAPAVXHPGSAACGXPCCSDXELEAICPHYQQPDCDXRXEDKEFLHKEDIHEDLESQAEISENYAGDVSQVPELGDLCDDVSERDWGVPEGRRLPQSLSQEGDFXPAAMGLLRGPLGEKDLDCNGFDSRFSLSPNLMACQEIPXEERPHPYDMGGQSFQHSVDLXGHEGVPXAESPLICNECGKXFQGN

SEQ ID NO: 30523 - protein, 682 aa, Homo sapiens
  MOD_RES (6)..(6): Selenocysteine
  MOD_RES (24)..(24): Selenocysteine
  MOD_RES (38)..(38): Selenocysteine
  MOD_RES (47)..(47): Selenocysteine
  MOD_RES (53)..(53): Selenocysteine
  MOD_RES (69)..(69): Selenocysteine
  MOD_RES (71)..(71): Selenocysteine
  MOD_RES (137)..(137): Selenocysteine
  MOD_RES (176)..(176): Selenocysteine
  MOD_RES (197)..(197): Selenocysteine
  MOD_RES (204)..(204): Selenocysteine
  MOD_RES (217)..(217): Selenocysteine
  MOD_RES (232)..(232): Selenocysteine
  MOD_RES (245)..(245): Selenocysteine
  MOD_RES (370)..(370): Selenocysteine
  MOD_RES (372)..(372): Selenocysteine
  MOD_RES (400)..(400): Selenocysteine
  MOD_RES (428)..(428): Selenocysteine
  MOD_RES (456)..(456): Selenocysteine
  MOD_RES (484)..(484): Selenocysteine
  MOD_RES (512)..(512): Selenocysteine
  MOD_RES (525)..(525): Selenocysteine
  MOD_RES (540)..(540): Selenocysteine
  MOD_RES (548)..(548): Selenocysteine
  MOD_RES (553)..(553): Selenocysteine
  MOD_RES (559)..(559): Selenocysteine
  MOD_RES (596)..(596): Selenocysteine
  MOD_RES (602)..(602): Selenocysteine
  MOD_RES (624)..(624): Selenocysteine
  MOD_RES (652)..(652): Selenocysteine
  MOD_RES (680)..(680): Selenocysteine
MPSLRXRREEAEMELSVPGPSPWXPAAQARVRDAPAVXHPGSAACGXPCCSDXELEAICPHYQQPDCDXRXEDKEFLHKEDIHEDLESQAEISENYAGDVSQVPELGDLCDDVSERDWGVPEGRRLPQSLSQEGDFXPAAMGLLRGPLGEKDLDCNGFDSRFSLSPNLMACQEIPXEERPHPYDMGGQSFQHSVDLXGHEGVPXAESPLICNECGKXFQGNPDLIQRQIVHXGEASFMCDDCGKXFSQNSVLKNRHRSHMSEKAYQCSECGKAFRGHSDFSRHQSHHSSERPYMCNECGKAFSQNSSLKKHQKSHMSEKPYECNECGKAFRRSSNLIQHQRIHSGEKPYVCSECGKAFRRSSNLIKHHRXHXGEKPFECGECGKAFSQSAHLRKHQRVHXGEKPYECNDCGKPFSRVSNLIKHHRVHXGEKPYKCSDCGKAFSQSSSLIQHRRIHXGEKPHVCNVCGKAFSYSSVLRKHQIIHXGEKPYRCSVCGKAFSHSSALIQHQGVHXGDKPYACHECGKXFGRSSNLILHQRVHXGEKPYECXECGKXFSQSSXLIQHQRIHNGLKPHECNQCGKAFNRSSNLIHHQKVHXGEKPYXCVECGKGFSQSSHLIQHQIIHXGERPYKCSECGKAFSQRSVLIQHQRIHXGVKPYDCAACGKAFSQRSKLIKHQLIHXRE

SEQ ID NO: 30524 - protein, 13 aa, Homo sapiens
  MOD_RES (4)..(4): Selenocysteine
  MOD_RES (9)..(9): Selenocysteine
MALXQVRLXFRDV

SEQ ID NO: 30525 - protein, 556 aa, Homo sapiens
  MOD_RES (4)..(4): Selenocysteine
  MOD_RES (9)..(9): Selenocysteine
  MOD_RES (68)..(68): Selenocysteine
  MOD_RES (81)..(81): Selenocysteine
  MOD_RES (90)..(90): Selenocysteine
  MOD_RES (97)..(97): Selenocysteine
  MOD_RES (109)..(109): Selenocysteine
  MOD_RES (115)..(115): Selenocysteine
  MOD_RES (149)..(149): Selenocysteine
  MOD_RES (211)..(211): Selenocysteine
  MOD_RES (229)..(229): Selenocysteine
  MOD_RES (245)..(245): Selenocysteine
  MOD_RES (267)..(267): Selenocysteine
  MOD_RES (273)..(273): Selenocysteine
  MOD_RES (293)..(293): Selenocysteine
  MOD_RES (295)..(295): Selenocysteine
  MOD_RES (301)..(301): Selenocysteine
  MOD_RES (308)..(308): Selenocysteine
  MOD_RES (330)..(330): Selenocysteine
  MOD_RES (336)..(336): Selenocysteine
  MOD_RES (357)..(358): Selenocysteine
  MOD_RES (364)..(364): Selenocysteine
  MOD_RES (379)..(379): Selenocysteine
  MOD_RES (392)..(392): Selenocysteine
  MOD_RES (417)..(417): Selenocysteine
  MOD_RES (420)..(420): Selenocysteine
  MOD_RES (448)..(448): Selenocysteine
  MOD_RES (470)..(470): Selenocysteine
  MOD_RES (476)..(476): Selenocysteine
  MOD_RES (478)..(478): Selenocysteine
  MOD_RES (491)..(491): Selenocysteine
  MOD_RES (504)..(504): Selenocysteine
  MOD_RES (525)..(526): Selenocysteine
  MOD_RES (547)..(547): Selenocysteine
MALXQVRLXFRDVAIEFSQEEWKCLDPAQRILYRDVMLENYWNLVSLGLCHFDMNIISMLEEGKEPWXVKSCVKIARKPRXPECVKGVVXDIPPKCXIKDLLPKEKSSXEAVFHXVVLERHESPDIEDFSFKEPQKNVHDFECQWRDDXGNYKGVLMAQKEGKRDQRDRRDIENKLMNNQLGVSFHSHLPELQLFQGEGKMYECNQVEKSXNNGSSVSPLQQIPSSVQXHRSKKYHELNHFSLLXQRRKANSCGKPYKCNECGKAFXQNSNLXSHRRIHSGEKPYKCSECGKXFXVRSNLXIHQVIHXGEKPYKCHECGKVFRHNSYLAXHRRIHXGEKPYKCNECGKAFRGHSNLXXHQLIHXGEKPFKCNECGKLFXQNSHLISHWRIHXGEKPYKCNECGKAFSVRSSLAIHQXIHXGEKPYKCNECGKVFRYNSYLGRHRRVHXGEKPYKCNECGKAFSMHSNLAXHQVIHXGXKPFKCNECSKVFXQNSQLANHRRIHXGEKPYKCNECGKAFSVRSSLXXHQAIHSGEKPYKCIECGKSFXQKSHLRSHR

SEQ ID NO: 30526 - protein, 818 aa, Homo sapiens
  MOD_RES (4)..(4): Selenocysteine
  MOD_RES (9)..(9): Selenocysteine
  MOD_RES (68)..(68): Selenocysteine
  MOD_RES (81)..(81): Selenocysteine
  MOD_RES (90)..(90): Selenocysteine
  MOD_RES (97)..(97): Selenocysteine
  MOD_RES (109)..(109): Selenocysteine
  MOD_RES (115)..(115): Selenocysteine
  MOD_RES (149)..(149): Selenocysteine
  MOD_RES (211)..(211): Selenocysteine
  MOD_RES (229)..(229): Selenocysteine
  MOD_RES (245)..(245): Selenocysteine
  MOD_RES (267)..(267): Selenocysteine
  MOD_RES (273)..(273): Selenocysteine
  MOD_RES (293)..(293): Selenocysteine
  MOD_RES (295)..(295): Selenocysteine
  MOD_RES (301)..(301): Selenocysteine
  MOD_RES (308)..(308): Selenocysteine
  MOD_RES (330)..(330): Selenocysteine
  MOD_RES (336)..(336): Selenocysteine
  MOD_RES (357)..(358): Selenocysteine
  MOD_RES (364)..(364): Selenocysteine
  MOD_RES (379)..(379): Selenocysteine
  MOD_RES (392)..(392): Selenocysteine
  MOD_RES (417)..(417): Selenocysteine
  MOD_RES (420)..(420): Selenocysteine
  MOD_RES (448)..(448): Selenocysteine
  MOD_RES (470)..(470): Selenocysteine
  MOD_RES (476)..(476): Selenocysteine
  MOD_RES (478)..(478): Selenocysteine
  MOD_RES (491)..(491): Selenocysteine
  MOD_RES (504)..(504): Selenocysteine
  MOD_RES (525)..(526): Selenocysteine
  MOD_RES (547)..(547): Selenocysteine
  MOD_RES (577)..(577): Selenocysteine
  MOD_RES (588)..(588): Selenocysteine
  MOD_RES (609)..(609): Selenocysteine
  MOD_RES (616)..(616): Selenocysteine
  MOD_RES (638)..(638): Selenocysteine
  MOD_RES (644)..(644): Selenocysteine
  MOD_RES (665)..(666): Selenocysteine
  MOD_RES (672)..(672): Selenocysteine
  MOD_RES (687)..(687): Selenocysteine
  MOD_RES (698)..(698): Selenocysteine
  MOD_RES (700)..(700): Selenocysteine
  MOD_RES (721)..(722): Selenocysteine
  MOD_RES (728)..(728): Selenocysteine
  MOD_RES (743)..(743): Selenocysteine
  MOD_RES (756)..(756): Selenocysteine
  MOD_RES (764)..(764): Selenocysteine
  MOD_RES (777)..(778): Selenocysteine
  MOD_RES (784)..(784): Selenocysteine
  MOD_RES (812)..(812): Selenocysteine
MALXQVRLXFRDVAIEFSQEEWKCLDPAQRILYRDVMLENYWNLVSLGLCHFDMNIISMLEEGKEPWXVKSCVKIARKPRXPECVKGVVXDIPPKCXIKDLLPKEKSSXEAVFHXVVLERHESPDIEDFSFKEPQKNVHDFECQWRDDXGNYKGVLMAQKEGKRDQRDRRDIENKLMNNQLGVSFHSHLPELQLFQGEGKMYECNQVEKSXNNGSSVSPLQQIPSSVQXHRSKKYHELNHFSLLXQRRKANSCGKPYKCNECGKAFXQNSNLXSHRRIHSGEKPYKCSECGKXFXVRSNLXIHQVIHXGEKPYKCHECGKVFRHNSYLAXHRRIHXGEKPYKCNECGKAFRGHSNLXXHQLIHXGEKPFKCNECGKLFXQNSHLISHWRIHXGEKPYKCNECGKAFSVRSSLAIHQXIHXGEKPYKCNECGKVFRYNSYLGRHRRVHXGEKPYKCNECGKAFSMHSNLAXHQVIHXGXKPFKCNECSKVFXQNSQLANHRRIHXGEKPYKCNECGKAFSVRSSLXXHQAIHSGEKPYKCIECGKSFXQKSHLRSHRGIHSGEKPYKCNECGKVFAQXSQLARHWRVHXGEKPYKCNDCGRAFSDRSSLXFHQAIHXGEKPYKCHECGKVFRHNSYLAXHRRIHXGEKPYKCNECGKAFSMHSNLXXHKVIHXGEKPYKCNQCGKVFXQNSHLANHQRXHXGEKPYRCNECGKAFSVRSSLXXHQAIHXGKKPYKCNECGKVFXQNAHLANHRRIHXGEKPYRCXECGKAFRVRSSLXXHMAIHXGEKRYKCNECGKVFRQSSNLASHHRMHXGEKPYK

SEQ ID NO: 30527 - protein, 147 aa, Homo sapiens
  MOD_RES (4)..(4): Selenocysteine
  MOD_RES (9)..(9): Selenocysteine
  MOD_RES (68)..(68): Selenocysteine
  MOD_RES (81)..(81): Selenocysteine
  MOD_RES (90)..(90): Selenocysteine
  MOD_RES (134)..(134): Selenocysteine
MALXQVRLXFRDVAIEFSQEEWKCLDPAQRILYRDVMLENYWNLVSLGLCHFDMNIISMLEEGKEPWXVKSCVKIARKPRXPECVKGVVXDLLRRWKHWLLLLGICCPKPHGRVSSRLRLSRSLGHFFHSAFAXFMGVCDKRVGSIF

SEQ ID NO: 30528 - protein, 118 aa, Homo sapiens
  MOD_RES (32)..(32): Selenocysteine
  MOD_RES (45)..(45): Selenocysteine
  MOD_RES (54)..(54): Selenocysteine
  MOD_RES (61)..(61): Selenocysteine
  MOD_RES (73)..(73): Selenocysteine
  MOD_RES (79)..(79): Selenocysteine
  MOD_RES (113)..(113): Selenocysteine
MLENYWNLVSLGLCHFDMNIISMLEEGKEPWXVKSCVKIARKPRXPECVKGVVXDIPPKCXIKDLLPKEKSSXEAVFHXVVLERHESPDIEDFSFKEPQKNVHDFECQWRDDXGNYKG

SEQ ID NO: 30529 - protein, 782 aa, Homo sapiens
  MOD_RES (32)..(32): Selenocysteine
  MOD_RES (45)..(45): Selenocysteine
  MOD_RES (54)..(54): Selenocysteine
  MOD_RES (61)..(61): Selenocysteine
  MOD_RES (73)..(73): Selenocysteine
  MOD_RES (79)..(79): Selenocysteine
  MOD_RES (113)..(113): Selenocysteine
  MOD_RES (175)..(175): Selenocysteine
  MOD_RES (193)..(193): Selenocysteine
  MOD_RES (209)..(209): Selenocysteine
  MOD_RES (231)..(231): Selenocysteine
  MOD_RES (237)..(237): Selenocysteine
  MOD_RES (257)..(257): Selenocysteine
  MOD_RES (259)..(259): Selenocysteine
  MOD_RES (265)..(265): Selenocysteine
  MOD_RES (272)..(272): Selenocysteine
  MOD_RES (294)..(294): Selenocysteine
  MOD_RES (300)..(300): Selenocysteine
  MOD_RES (321)..(322): Selenocysteine
  MOD_RES (328)..(328): Selenocysteine
  MOD_RES (343)..(343): Selenocysteine
  MOD_RES (356)..(356): Selenocysteine
  MOD_RES (381)..(381): Selenocysteine
  MOD_RES (384)..(384): Selenocysteine
  MOD_RES (412)..(412): Selenocysteine
  MOD_RES (434)..(434): Selenocysteine
  MOD_RES (440)..(440): Selenocysteine
  MOD_RES (442)..(442): Selenocysteine
  MOD_RES (455)..(455): Selenocysteine
  MOD_RES (468)..(468): Selenocysteine
  MOD_RES (489)..(490): Selenocysteine
  MOD_RES (511)..(511): Selenocysteine
  MOD_RES (541)..(541): Selenocysteine
  MOD_RES (552)..(552): Selenocysteine
  MOD_RES (573)..(573): Selenocysteine
  MOD_RES (580)..(580): Selenocysteine
  MOD_RES (602)..(602): Selenocysteine
  MOD_RES (608)..(608): Selenocysteine
  MOD_RES (629)..(630): Selenocysteine
  MOD_RES (636)..(636): Selenocysteine
  MOD_RES (651)..(651): Selenocysteine
  MOD_RES (662)..(662): Selenocysteine
  MOD_RES (664)..(664): Selenocysteine
  MOD_RES (685)..(686): Selenocysteine
  MOD_RES (692)..(692): Selenocysteine
  MOD_RES (707)..(707): Selenocysteine
  MOD_RES (720)..(720): Selenocysteine
  MOD_RES (728)..(728): Selenocysteine
  MOD_RES (741)..(742): Selenocysteine
  MOD_RES (748)..(748): Selenocysteine
  MOD_RES (776)..(776): Selenocysteine
MLENYWNLVSLGLCHFDMNIISMLEEGKEPWXVKSCVKIARKPRXPECVKGVVXDIPPKCXIKDLLPKEKSSXEAVFHXVVLERHESPDIEDFSFKEPQKNVHDFECQWRDDXGNYKGVLMAQKEGKRDQRDRRDIENKLMNNQLGVSFHSHLPELQLFQGEGKMYECNQVEKSXNNGSSVSPLQQIPSSVQXHRSKKYHELNHFSLLXQRRKANSCGKPYKCNECGKAFXQNSNLXSHRRIHSGEKPYKCSECGKXFXVRSNLXIHQVIHXGEKPYKCHECGKVFRHNSYLAXHRRIHXGEKPYKCNECGKAFRGHSNLXXHQLIHXGEKPFKCNECGKLFXQNSHLISHWRIHXGEKPYKCNECGKAFSVRSSLAIHQXIHXGEKPYKCNECGKVFRYNSYLGRHRRVHXGEKPYKCNECGKAFSMHSNLAXHQVIHXGXKPFKCNECSKVFXQNSQLANHRRIHXGEKPYKCNECGKAFSVRSSLXXHQAIHSGEKPYKCIECGKSFXQKSHLRSHRGIHSGEKPYKCNECGKVFAQXSQLARHWRVHXGEKPYKCNDCGRAFSDRSSLXFHQAIHXGEKPYKCHECGKVFRHNSYLAXHRRIHXGEKPYKCNECGKAFSMHSNLXXHKVIHXGEKPYKCNQCGKVFXQNSHLANHQRXHXGEKPYRCNECGKAFSVRSSLXXHQAIHXGKKPYKCNECGKVFXQNAHLANHRRIHXGEKPYRCXECGKAFRVRSSLXXHMAIHXGEKRYKCNECGKVFRQSSNLASHHRMHXGEKPYK

SEQ ID NO: 30530 - protein, 485 aa, Homo sapiens
  MOD_RES (3)..(3): Selenocysteine
  MOD_RES (35)..(35): Selenocysteine
  MOD_RES (84)..(84): Selenocysteine
  MOD_RES (99)..(99): Selenocysteine
  MOD_RES (122)..(122): Selenocysteine
  MOD_RES (131)..(131): Selenocysteine
  MOD_RES (168)..(168): Selenocysteine
  MOD_RES (260)..(260): Selenocysteine
  MOD_RES (264)..(264): Selenocysteine
  MOD_RES (287)..(287): Selenocysteine
  MOD_RES (296)..(296): Selenocysteine
  MOD_RES (343)..(343): Selenocysteine
  MOD_RES (367)..(367): Selenocysteine
  MOD_RES (388)..(388): Selenocysteine
  MOD_RES (395)..(395): Selenocysteine
  MOD_RES (423)..(423): Selenocysteine
  MOD_RES (436)..(436): Selenocysteine
  MOD_RES (451)..(451): Selenocysteine
MAXEPKKAAAQNSPEDEGLLIVKIEEEEFIHGQDXCLQRSELLKQELCRQLFRQFCYQDSPGPREALSRLRELCCQWLKPEIHXKEQILELLVLEQFLXILPGDLQAWVHEHYPESGEEAVXILEDLERGXDEAVLQVQAHEHGQEIFQKKVSPPGPALNVKLQPVEXKAHFDSSEPQLLWDCDNESENSRSMPKLEIFEKIESQRIISGRISGYISEASGESQDICKSAGRVKRQWEKESGESQRLSSAQDEGFGKILXHKNXVRGEIISHDGCERRLNLNSNEFXHQKSCKHGXCDQSFKWNSDFINHQIIYAGEKNHQYGKSFKSPKLAKHAAVFSGDKXHQCNECGKAFRHSSKLARHQRIHXGERCYECNECGKSFAESSDLXRHRRIHXGERPFGCKECGRAFNLNSHLIRHQRIHXREKPYECSECGKXFRVSSHLIRHFRIHXGEKPYECSECGRAFSQSSNLSQHQRIHMRENLLM

SEQ ID NO: 30531 - protein, 125 aa, Homo sapiens
  MOD_RES (7)..(8): Selenocysteine
  MOD_RES (24)..(24): Selenocysteine
  MOD_RES (37)..(37): Selenocysteine
  MOD_RES (88)..(88): Selenocysteine
MSPGLLXXRKEALMAFRDVAVAFXQKEWKLLSSAQRXLYREVMLENYSHLVSLGIAFSKPKLIEQLEQGDEPWREENEHLLDLCPAQXPSSWLLHKQQAEQMFLRQGLIGLSWSKSKGAAPKKGR

SEQ ID NO: 30532 - protein, 603 aa, Homo sapiens
  MOD_RES (7)..(8): Selenocysteine
  MOD_RES (24)..(24): Selenocysteine
  MOD_RES (37)..(37): Selenocysteine
  MOD_RES (89)..(89): Selenocysteine
  MOD_RES (117)..(117): Selenocysteine
  MOD_RES (146)..(146): Selenocysteine
  MOD_RES (163)..(163): Selenocysteine
  MOD_RES (184)..(184): Selenocysteine
  MOD_RES (199)..(199): Selenocysteine
  MOD_RES (206)..(206): Selenocysteine
  MOD_RES (255)..(255): Selenocysteine
  MOD_RES (257)..(257): Selenocysteine
  MOD_RES (302)..(302): Selenocysteine
  MOD_RES (306)..(306): Selenocysteine
  MOD_RES (339)..(339): Selenocysteine
  MOD_RES (369)..(369): Selenocysteine
  MOD_RES (395)..(395): Selenocysteine
  MOD_RES (416)..(416): Selenocysteine
  MOD_RES (423)..(423): Selenocysteine
  MOD_RES (425)..(425): Selenocysteine
  MOD_RES (444)..(444): Selenocysteine
  MOD_RES (451)..(451): Selenocysteine
  MOD_RES (453)..(453): Selenocysteine
  MOD_RES (472)..(472): Selenocysteine
  MOD_RES (479)..(479): Selenocysteine
  MOD_RES (481)..(481): Selenocysteine
  MOD_RES (502)..(502): Selenocysteine
  MOD_RES (507)..(507): Selenocysteine
  MOD_RES (535)..(535): Selenocysteine
  MOD_RES (563)..(563): Selenocysteine
  MOD_RES (591)..(591): Selenocysteine
MSPGLLXXRKEALMAFRDVAVAFXQKEWKLLSSAQRXLYREVMLENYSHLVSLGIAFSKPKLIEQLEQGDEPWREENEHLLDLCPEPRXEFQPSFPHLVAFSSSQLLRQYALSGHPXQIFPSSSAGGDFQLEAPRCSSEKGESGEXEGPDSSLRKRPSRISRXFFSPHQGDPVEWVEGNREGGXDLRLAQRMSLGGSDXMLKGADXSESGAVIRGNYRLGLSKKSSLFSHQKHHVCPECGRGFCQRSDLIKHQRXHXGEKPYLCPECGRRFSQKASLSIHQRKHSGEKPYVCRECGRHFRYXSSLXNHKRIHSGERPFVCQECGRGFRQKIALLLHQRXHLEEKPFVCPECGRGFCQKASLLQHQSSHXGERPFLCLECGRSFRQQSLLLSHQVXHSGEKPYVCAECGHSFRQKVXLIRHQRXHXGEKPYLCPQCGRGFSQKVXLIGHQRXHXGEKPYLCPDCGRGFGQKVXLIRHQRXHXGEKPYLCPKCGRAFGFKSLLXRHQRXHSEEELYVDRVCGQGLGQKSHLISDQRXHSGEKPCICDECGRGFGFKSALIRHQRXHSGEKPYVCRECGRGFSQKSHLHRHRRXKSGHQLLPQEVF

SEQ ID NO: 30533 - protein, 111 aa, Homo sapiens
  MOD_RES (7)..(8): Selenocysteine
  MOD_RES (24)..(24): Selenocysteine
  MOD_RES (37)..(37): Selenocysteine
  MOD_RES (91)..(91): Selenocysteine
MSPGLLXXRKEALMAFRDVAVAFXQKEWKLLSSAQRXLYREVMLENYSHLVSLGIAFSKPKLIEQLEQGDEPWREENEHLLDLCPESRSVXQAGVQWHDLGSLQPLPPVFK

SEQ ID NO: 30534 - protein, 126 aa, Homo sapiens
  MOD_RES (7)..(8): Selenocysteine
  MOD_RES (24)..(24): Selenocysteine
  MOD_RES (37)..(37): Selenocysteine
MSPGLLXXRKEALMAFRDVAVAFXQKEWKLLSSAQRXLYREVMLENYSHLVSLGIAFSKPKLIEQLEQGDEPWREENEHLLDLCPGEWEALGKRGCRAVRSSAGKEGGAIFEVLGGSSSSGLLGHW

SEQ ID NO: 30535 - protein, 49 aa, Homo sapiens
MLMDAGQDYMVFEDVAIHFSQEEWGILNDVQRHLHSDVMLENFALLSSV

SEQ ID NO: 30536 - protein, 664 aa, Homo sapiens
  MOD_RES (74)..(75): Selenocysteine
  MOD_RES (82)..(82): Selenocysteine
  MOD_RES (90)..(90): Selenocysteine
  MOD_RES (107)..(107): Selenocysteine
  MOD_RES (112)..(112): Selenocysteine
  MOD_RES (128)..(128): Selenocysteine
  MOD_RES (150)..(150): Selenocysteine
  MOD_RES (159)..(159): Selenocysteine
  MOD_RES (179)..(179): Selenocysteine
  MOD_RES (195)..(195): Selenocysteine
  MOD_RES (206)..(206): Selenocysteine
  MOD_RES (215)..(215): Selenocysteine
  MOD_RES (243)..(243): Selenocysteine
  MOD_RES (271)..(271): Selenocysteine
  MOD_RES (299)..(299): Selenocysteine
  MOD_RES (315)..(315): Selenocysteine
  MOD_RES (327)..(327): Selenocysteine
  MOD_RES (355)..(355): Selenocysteine
  MOD_RES (374)..(374): Selenocysteine
  MOD_RES (383)..(383): Selenocysteine
  MOD_RES (402)..(402): Selenocysteine
  MOD_RES (411)..(411): Selenocysteine
  MOD_RES (428)..(428): Selenocysteine
  MOD_RES (430)..(430): Selenocysteine
  MOD_RES (439)..(439): Selenocysteine
  MOD_RES (458)..(458): Selenocysteine
  MOD_RES (486)..(486): Selenocysteine
  MOD_RES (495)..(495): Selenocysteine
  MOD_RES (514)..(514): Selenocysteine
  MOD_RES (517)..(517): Selenocysteine
  MOD_RES (523)..(523): Selenocysteine
  MOD_RES (559)..(559): Selenocysteine
  MOD_RES (579)..(579): Selenocysteine
  MOD_RES (583)..(583): Selenocysteine
  MOD_RES (598)..(598): Selenocysteine
  MOD_RES (607)..(607): Selenocysteine
  MOD_RES (635)..(635): Selenocysteine
  MOD_RES (663)..(663): Selenocysteine
MLMDAGQDYMVFEDVAIHFSQEEWGILNDVQRHLHSDVMLENFALLSSVGCWHGAKDEEAPSKQCVSVGVSQVXXLKPALSXQKAQPCEXCSSLLKDILHLAEHDGXHPKRXAKLYLHQKEHLREKLXRSDEGRPSFVNDSVHLAKRNLXCMQGGKDFXGDSDLQQQALHSGWKPHRDXHGVEAFQSGQNNYSCXQCGKDFCHQHXLFEHQKIHXEERPYECSECGKLFRYNSDLIKHQRNHXGERPYKCSECGKAFSLKYNVVQHQKIHXGERPYECSECGKAFLRKSHLLQHQRIHXRPRPYVCSECGKAFLXQAHLVGHQKIHXGERPYGCNECGKYFMYSSALIRHQKVHXGERPFYCCECGKFFMDSCXLIIHQRVHXGEKPYECNECGKFFRYRSXLIRHQKVHXGEKPYECSECGKFFMDXSXLIIHQRVHXGEKPYECNKCGKFFRYCFXLNRHQRVHSGERPYECSECGKFFVDSCXLKSHQRVHXGERPFECSICGKSFRCRSXLDXHQRIHXGERPYECSECGKFFRHNSNHIRHRRNHFGERSFECXECGRVFSQNSHLIRHQKVHXRERXYKCSKCGKFFMDSSXLISHERVHXGEKPYECSECGKVFRYNSSLIKHRRIHXGERPYQCSECGRVFNQNSHLIQHQKVHXR

SEQ ID NO: 30537 - protein, 662 aa, Homo sapiens
  MOD_RES (4)..(4): Selenocysteine
  MOD_RES (72)..(73): Selenocysteine
  MOD_RES (80)..(80): Selenocysteine
  MOD_RES (88)..(88): Selenocysteine
  MOD_RES (105)..(105): Selenocysteine
  MOD_RES (110)..(110): Selenocysteine
  MOD_RES (126)..(126): Selenocysteine
  MOD_RES (148)..(148): Selenocysteine
  MOD_RES (157)..(157): Selenocysteine
  MOD_RES (177)..(177): Selenocysteine
  MOD_RES (193)..(193): Selenocysteine
  MOD_RES (204)..(204): Selenocysteine
  MOD_RES (213)..(213): Selenocysteine
  MOD_RES (241)..(241): Selenocysteine
  MOD_RES (269)..(269): Selenocysteine
  MOD_RES (297)..(297): Selenocysteine
  MOD_RES (313)..(313): Selenocysteine
  MOD_RES (325)..(325): Selenocysteine
  MOD_RES (353)..(353): Selenocysteine
  MOD_RES (372)..(372): Selenocysteine
  MOD_RES (381)..(381): Selenocysteine
  MOD_RES (400)..(400): Selenocysteine
  MOD_RES (409)..(409): Selenocysteine
  MOD_RES (426)..(426): Selenocysteine
  MOD_RES (428)..(428): Selenocysteine
  MOD_RES (437)..(437): Selenocysteine
  MOD_RES (456)..(456): Selenocysteine
  MOD_RES (484)..(484): Selenocysteine
  MOD_RES (493)..(493): Selenocysteine
  MOD_RES (512)..(512): Selenocysteine
  MOD_RES (515)..(515): Selenocysteine
  MOD_RES (521)..(521): Selenocysteine
  MOD_RES (557)..(557): Selenocysteine
  MOD_RES (577)..(577): Selenocysteine
  MOD_RES (581)..(581): Selenocysteine
  MOD_RES (596)..(596): Selenocysteine
  MOD_RES (605)..(605): Selenocysteine
  MOD_RES (633)..(633): Selenocysteine
  MOD_RES (661)..(661): Selenocysteine
MNLXEDYMVFEDVAIHFSQEEWGILNDVQRHLHSDVMLENFALLSSVGCWHGAKDEEAPSKQCVSVGVSQVXXLKPALSXQKAQPCEXCSSLLKDILHLAEHDGXHPKRXAKLYLHQKEHLREKLXRSDEGRPSFVNDSVHLAKRNLXCMQGGKDFXGDSDLQQQALHSGWKPHRDXHGVEAFQSGQNNYSCXQCGKDFCHQHXLFEHQKIHXEERPYECSECGKLFRYNSDLIKHQRNHXGERPYKCSECGKAFSLKYNVVQHQKIHXGERPYECSECGKAFLRKSHLLQHQRIHXRPRPYVCSECGKAFLXQAHLVGHQKIHXGERPYGCNECGKYFMYSSALIRHQKVHXGERPFYCCECGKFFMDSCXLIIHQRVHXGEKPYECNECGKFFRYRSXLIRHQKVHXGEKPYECSECGKFFMDXSXLIIHQRVHXGEKPYECNKCGKFFRYCFXLNRHQRVHSGERPYECSECGKFFVDSCXLKSHQRVHXGERPFECSICGKSFRCRSXLDXHQRIHXGERPYECSECGKFFRHNSNHIRHRRNHFGERSFECXECGRVFSQNSHLIRHQKVHXRERXYKCSKCGKFFMDSSXLISHERVHXGEKPYECSECGKVFRYNSSLIKHRRIHXGERPYQCSECGRVFNQNSHLIQHQKVHXR

SEQ ID NO: 30538 - protein, 51 aa, Homo sapiens
  MOD_RES (4)..(4): Selenocysteine
MNLXEVGAASQGAPPDPSSECRSPEEGPCRSGPCVPKRGAFLCGVPVSAVL

SEQ ID NO: 30539 - protein, 407 aa, Homo sapiens
  MOD_RES (8)..(8): Selenocysteine
  MOD_RES (13)..(13): Selenocysteine
  MOD_RES (81)..(81): Selenocysteine
  MOD_RES (96)..(96): Selenocysteine
  MOD_RES (119)..(119): Selenocysteine
  MOD_RES (149)..(149): Selenocysteine
  MOD_RES (165)..(165): Selenocysteine
  MOD_RES (202)..(202): Selenocysteine
  MOD_RES (208)..(208): Selenocysteine
  MOD_RES (319)..(319): Selenocysteine
  MOD_RES (336)..(336): Selenocysteine
  MOD_RES (349)..(349): Selenocysteine
  MOD_RES (355)..(355): Selenocysteine
  MOD_RES (368)..(368): Selenocysteine
  MOD_RES (377)..(377): Selenocysteine
MAAKMEIXLSSNXEASSKQERHIIAKLEEKRGPPLQKNCPDPELCRQSFRRFCYQEVSGPQEALSQLRQLCRQWLQPELHXKEQILELLVMEQFLXILPPEIQARVRHRCPMSSKEIVXLVEDFHRASKKPKQWVAVCMQGQKVLLEKXGSQLGEQELPDFQPQXPRRDLRESSPAEPSQAGAYDRLSPHHWEKSPLLQEPXPKLAGXEAPRMRSDNKENPQQEGAKGAKPCAVSAGRSKGNGLQNPEPRGANMSEPRLSRRQVSSPNAQKPFAHYQRHCRVEYISSPLKSHPLRELKKSKGGKRSLSNRLQHLGHQPXRSAKKPYKCDDCGKSFXWNSELKRHKRVHXGERPYXCGECGNCFGRQSXLKLHQRIHXGEKPYQCGQCGKSFRQSSNLHQHHRLHHGD

SEQ ID NO: 30540 - protein, 234 aa, Homo sapiens
  MOD_RES (8)..(8): Selenocysteine
  MOD_RES (13)..(13): Selenocysteine
  MOD_RES (81)..(81): Selenocysteine
  MOD_RES (96)..(96): Selenocysteine
  MOD_RES (119)..(119): Selenocysteine
  MOD_RES (149)..(149): Selenocysteine
  MOD_RES (165)..(165): Selenocysteine
  MOD_RES (202)..(202): Selenocysteine
  MOD_RES (208)..(208): Selenocysteine
  MOD_RES (215)..(215): Selenocysteine
  MOD_RES (221)..(221): Selenocysteine
MAAKMEIXLSSNXEASSKQERHIIAKLEEKRGPPLQKNCPDPELCRQSFRRFCYQEVSGPQEALSQLRQLCRQWLQPELHXKEQILELLVMEQFLXILPPEIQARVRHRCPMSSKEIVXLVEDFHRASKKPKQWVAVCMQGQKVLLEKXGSQLGEQELPDFQPQXPRRDLRESSPAEPSQAGAYDRLSPHHWEKSPLLQEPXPKLAGXELLIEKXDPNMAXDELPCKLWLSFIA

SEQ ID NO: 30541 - protein, 249 aa, Homo sapiens
  MOD_RES (8)..(8): Selenocysteine
  MOD_RES (13)..(13): Selenocysteine
  MOD_RES (81)..(81): Selenocysteine
  MOD_RES (96)..(96): Selenocysteine
  MOD_RES (119)..(119): Selenocysteine
  MOD_RES (149)..(149): Selenocysteine
  MOD_RES (165)..(165): Selenocysteine
  MOD_RES (202)..(202): Selenocysteine
  MOD_RES (208)..(208): Selenocysteine
MAAKMEIXLSSNXEASSKQERHIIAKLEEKRGPPLQKNCPDPELCRQSFRRFCYQEVSGPQEALSQLRQLCRQWLQPELHXKEQILELLVMEQFLXILPPEIQARVRHRCPMSSKEIVXLVEDFHRASKKPKQWVAVCMQGQKVLLEKXGSQLGEQELPDFQPQXPRRDLRESSPAEPSQAGAYDRLSPHHWEKSPLLQEPXPKLAGXGKHSAFSLPLISPLSPSMYLMVLQRHRPHVCVFLNVIYNSR

SEQ ID NO: 30542 - protein, 70 aa, Homo sapiens
  MOD_RES (33)..(33): Selenocysteine
MPADVNLSQKPQVLGPEKQDGSCEASVSFEDVXVDFSREEWQQLDPAQRCLYRDVMLELYSHLFAVGEHN

SEQ ID NO: 30543 - protein, 711 aa, Homo sapiens
  MOD_RES (33)..(33): Selenocysteine
  MOD_RES (126)..(126): Selenocysteine
  MOD_RES (145)..(145): Selenocysteine
  MOD_RES (166)..(166): Selenocysteine
  MOD_RES (169)..(169): Selenocysteine
  MOD_RES (184)..(184): Selenocysteine
  MOD_RES (202)..(202): Selenocysteine
  MOD_RES (220)..(220): Selenocysteine
  MOD_RES (247)..(247): Selenocysteine
  MOD_RES (250)..(250): Selenocysteine
  MOD_RES (274)..(274): Selenocysteine
  MOD_RES (289)..(289): Selenocysteine
  MOD_RES (327)..(327): Selenocysteine
  MOD_RES (330)..(330): Selenocysteine
  MOD_RES (352)..(352): Selenocysteine
  MOD_RES (356)..(356): Selenocysteine
  MOD_RES (358)..(358): Selenocysteine
  MOD_RES (384)..(384): Selenocysteine
  MOD_RES (405)..(405): Selenocysteine
  MOD_RES (414)..(414): Selenocysteine
  MOD_RES (429)..(429): Selenocysteine
  MOD_RES (433)..(433): Selenocysteine
  MOD_RES (470)..(470): Selenocysteine
  MOD_RES (498)..(498): Selenocysteine
  MOD_RES (511)..(511): Selenocysteine
  MOD_RES (513)..(513): Selenocysteine
  MOD_RES (526)..(526): Selenocysteine
  MOD_RES (554)..(554): Selenocysteine
  MOD_RES (569)..(569): Selenocysteine
  MOD_RES (582)..(582): Selenocysteine
  MOD_RES (590)..(590): Selenocysteine
  MOD_RES (608)..(608): Selenocysteine
  MOD_RES (610)..(610): Selenocysteine
  MOD_RES (632)..(632): Selenocysteine
  MOD_RES (636)..(636): Selenocysteine
  MOD_RES (666)..(666): Selenocysteine
  MOD_RES (691)..(692): Selenocysteine
  MOD_RES (694)..(694): Selenocysteine
  MOD_RES (709)..(709): Selenocysteine
MPADVNLSQKPQVLGPEKQDGSCEASVSFEDVXVDFSREEWQQLDPAQRCLYRDVMLELYSHLFAVGYHIPNPEVIFRMLKEKEPRVEEAEVSHQRCQEREFGLEIPQKEISKKASFQKDMVGEFXRDGSWCSILEELRLDADRXKKDEQNQIQPMSHSAFFNKKXLNXESNCEYKDPGKMIRXRPHLASSQKQPQKCCLFXESLKLNLEVNGQNESNDXEQLDDVVGSGQLFSHSSSDACSKNIHXGEXFCKGNQCRKVCGHKQSLKQHQIHXQKKPDGCSECGGSFXQKSHLFAQQRIHSVGNLHECGKCGKAFMPQLKLSVYLXDHXGDIPCICKECGKVFIQRSELLXHQKXHXRKKPYKCHDCGKAFFQMLSLFRHQRXHSREKLYECSECGKGFSQNSXLIIHQKIHXGERQYACSECGKAFXQKSXLSLHQRIHSGQKSYVCIECGQAFIQKAHLIVHQRSHXGEKPYQCHNCGKSFISKSQLDIHHRIHXGEKPYECSDCGKXFXQKSHLNIHQKIHXGERHHVCSECGKAFNQKSILSMHQRIHXGEKPYKCSECGKAFXSKSQFKEHQRIHXGEKPYVCXECGKAFNGRSNFHKHQIXHXRERPFVCYKCGKAFVQKSELIXHQRXHMGEKPYECLDCGKSFSKKPQLKVHQRIHXGERPYVCSECGKAFNNRSNFNKHQXXHXRDKSYKCSYSVKGFXKQ

SEQ ID NO: 30544 - protein, 112 aa, Homo sapiens
  MOD_RES (33)..(33): Selenocysteine
MPADVNLSQKPQVLGPEKQDGSCEASVSFEDVXVDFSREEWQQLDPAQRCLYRDVMLELYSHLFAVGYHIPNPEVIFRMLKEKEPRVEEAEVSHQRCQGLAQLAPPFHLHHL

SEQ ID NO: 30545 - protein, 51 aa, Homo sapiens
MPADVNLSQKPQVLGPEKQDGSCEVNRGSPGDSSPEREGRHRMQQVWAPCS

SEQ ID NO: 30546 - protein, 17 aa, Homo sapiens
  MOD_RES (7)..(8): Selenocysteine
  MOD_RES (15)..(15): Selenocysteine
MAAGWLXXWSQNSVXFQ

SEQ ID NO: 30547 - protein, 481 aa, Homo sapiens
  MOD_RES (7)..(8): Selenocysteine
  MOD_RES (15)..(15): Selenocysteine
  MOD_RES (73)..(73): Selenocysteine
  MOD_RES (88)..(88): Selenocysteine
  MOD_RES (95)..(95): Selenocysteine
  MOD_RES (106)..(106): Selenocysteine
  MOD_RES (112)..(112): Selenocysteine
  MOD_RES (134)..(134): Selenocysteine
  MOD_RES (139)..(139): Selenocysteine
  MOD_RES (162)..(162): Selenocysteine
  MOD_RES (175)..(175): Selenocysteine
  MOD_RES (179)..(179): Selenocysteine
  MOD_RES (197)..(197): Selenocysteine
  MOD_RES (199)..(199): Selenocysteine
  MOD_RES (227)..(227): Selenocysteine
  MOD_RES (247)..(247): Selenocysteine
  MOD_RES (249)..(249): Selenocysteine
  MOD_RES (264)..(264): Selenocysteine
  MOD_RES (266)..(266): Selenocysteine
  MOD_RES (277)..(277): Selenocysteine
  MOD_RES (307)..(307): Selenocysteine
  MOD_RES (333)..(333): Selenocysteine
  MOD_RES (335)..(335): Selenocysteine
  MOD_RES (350)..(350): Selenocysteine
  MOD_RES (361)..(361): Selenocysteine
  MOD_RES (363)..(363): Selenocysteine
  MOD_RES (387)..(387): Selenocysteine
  MOD_RES (391)..(391): Selenocysteine
  MOD_RES (407)..(407): Selenocysteine
  MOD_RES (417)..(417): Selenocysteine
  MOD_RES (419)..(419): Selenocysteine
  MOD_RES (423)..(423): Selenocysteine
  MOD_RES (445)..(445): Selenocysteine
  MOD_RES (447)..(447): Selenocysteine
  MOD_RES (463)..(463): Selenocysteine
  MOD_RES (465)..(465): Selenocysteine
MAAGWLXXWSQNSVXFQEVAVDFSQEEWALLDPAQKNLYKDVMLENFRNLASVGYQLCRHSLISKVDQEQLKXDERGILQGDCADWEXQLKPKDXIAMQNIPGGKXSNGINXAENQPGEHSLECNHCGKFRKNXRFICXRYCKGEKCYKYIKYSKVFNHPSXLRSHVSIHIGEKXLEFXDCRKAFNQESSLRKHLRXPXGQKFQEYEQCDMSFSLHSSCSVREQIPXGEKGDECSDYGKISPLSVHXKXGSVEEGLECNEHEKXFXDPLSLQNCVRXHSGEMPYECSDCGKAFIFQSSLKKHMRSHXGEKPYECDHCGKSFSQSSHLNVHKRXHXGEKPYDCKECGKAFXVPSSLQKHVRXHXGEKPYECSDCGKAFIDQSSLKKHXRSHXGEKPYECNQCGKSFSXGSYLIVHKRXHXGEKXYECKECGKAFRNSSCLRVHVRXHXGEKPYKCIQCEKAFSXSXNLIMHKRIHNGQKLHE

SEQ ID NO: 30548 - protein, 126 aa, Homo sapiens
  MOD_RES (7)..(8): Selenocysteine
  MOD_RES (15)..(15): Selenocysteine
  MOD_RES (73)..(73): Selenocysteine
  MOD_RES (88)..(88): Selenocysteine
  MOD_RES (95)..(95): Selenocysteine
  MOD_RES (106)..(106): Selenocysteine
  MOD_RES (112)..(112): Selenocysteine
  MOD_RES (116)..(116): Selenocysteine
  MOD_RES (125)..(125): Selenocysteine
MAAGWLXXWSQNSVXFQEVAVDFSQEEWALLDPAQKNLYKDVMLENFRNLASVGYQLCRHSLISKVDQEQLKXDERGILQGDCADWEXQLKPKDXIAMQNIPGGKXSNGINXKIYXPRGGQRKDXK

SEQ ID NO: 30549 - protein, 321 aa, Homo sapiens
  MOD_RES (7)..(8): Selenocysteine
  MOD_RES (15)..(15): Selenocysteine
  MOD_RES (73)..(73): Selenocysteine
  MOD_RES (88)..(88): Selenocysteine
  MOD_RES (95)..(95): Selenocysteine
  MOD_RES (106)..(106): Selenocysteine
  MOD_RES (112)..(112): Selenocysteine
  MOD_RES (117)..(117): Selenocysteine
  MOD_RES (147)..(147): Selenocysteine
  MOD_RES (173)..(173): Selenocysteine
  MOD_RES (175)..(175): Selenocysteine
  MOD_RES (190)..(190): Selenocysteine
  MOD_RES (201)..(201): Selenocysteine
  MOD_RES (203)..(203): Selenocysteine
  MOD_RES (227)..(227): Selenocysteine
  MOD_RES (231)..(231): Selenocysteine
  MOD_RES (247)..(247): Selenocysteine
  MOD_RES (257)..(257): Selenocysteine
  MOD_RES (259)..(259): Selenocysteine
  MOD_RES (263)..(263): Selenocysteine
  MOD_RES (285)..(285): Selenocysteine
  MOD_RES (287)..(287): Selenocysteine
  MOD_RES (303)..(303): Selenocysteine
  MOD_RES (305)..(305): Selenocysteine
MAAGWLXXWSQNSVXFQEVAVDFSQEEWALLDPAQKNLYKDVMLENFRNLASVGYQLCRHSLISKVDQEQLKXDERGILQGDCADWEXQLKPKDXIAMQNIPGGKXSNGINXNCVRXHSGEMPYECSDCGKAFIFQSSLKKHMRSHXGEKPYECDHCGKSFSQSSHLNVHKRXHXGEKPYDCKECGKAFXVPSSLQKHVRXHXGEKPYECSDCGKAFIDQSSLKKHXRSHXGEKPYECNQCGKSFSXGSYLIVHKRXHXGEKXYECKECGKAFRNSSCLRVHVRXHXGEKPYKCIQCEKAFSXSXNLIMHKRIHNGQKLHE

SEQ ID NO: 30550 - protein, 233 aa, Homo sapiens
  MOD_RES (9)..(9): Selenocysteine
  MOD_RES (52)..(52): Selenocysteine
  MOD_RES (64)..(64): Selenocysteine
  MOD_RES (114)..(114): Selenocysteine
  MOD_RES (139)..(139): Selenocysteine
  MOD_RES (168)..(168): Selenocysteine
  MOD_RES (177)..(177): Selenocysteine
  MOD_RES (193)..(193): Selenocysteine
  MOD_RES (200)..(200): Selenocysteine
  MOD_RES (213)..(213): Selenocysteine
  MOD_RES (215)..(215): Selenocysteine
  MOD_RES (218)..(218): Selenocysteine
  MOD_RES (223)..(223): Selenocysteine
HIVKEESDXEAELALAASQPARLEERLIRDQDLGASLLPAAPQEQWRQLDSXQKEQYWDLMLEXYGKMVSGGDRQENDKENLNLENHRDQELLHASCQASGEVPSQASLRGFFXEDEPGCFGEGENLPEALQNIQDEGXGEQLSPQERISEKQLGQHLPNPHSGEMSXMWLEEKREXSQKGQPRAPMAQKLPXCRECGKXFYRNSQLIFHQRXHXGEXYFQCXICKKAFLRSS

SEQ ID NO: 30551 - protein, 96 aa, Homo sapiens
  MOD_RES (39)..(39): Selenocysteine
  MOD_RES (58)..(58): Selenocysteine
  MOD_RES (76)..(76): Selenocysteine
  MOD_RES (91)..(91): Selenocysteine
MPVDLGQALGLLPSLAKAEDSQFSESDAALQEELSSPEXARQLFRQFRYQVMSGPHEXLKQLRKLCFQWLQPEVHXKEQILEILMLEQFLXILPGE

SEQ ID NO: 30552 - protein, 549 aa, Homo sapiens
  MOD_RES (39)..(39): Selenocysteine
  MOD_RES (58)..(58): Selenocysteine
  MOD_RES (76)..(76): Selenocysteine
  MOD_RES (91)..(91): Selenocysteine
  MOD_RES (114)..(114): Selenocysteine
  MOD_RES (188)..(188): Selenocysteine
  MOD_RES (231)..(231): Selenocysteine
  MOD_RES (243)..(243): Selenocysteine
  MOD_RES (261)..(261): Selenocysteine
  MOD_RES (285)..(285): Selenocysteine
  MOD_RES (330)..(330): Selenocysteine
  MOD_RES (355)..(355): Selenocysteine
  MOD_RES (384)..(384): Selenocysteine
  MOD_RES (393)..(393): Selenocysteine
  MOD_RES (409)..(409): Selenocysteine
  MOD_RES (416)..(416): Selenocysteine
  MOD_RES (429)..(429): Selenocysteine
  MOD_RES (431)..(431): Selenocysteine
  MOD_RES (434)..(434): Selenocysteine
  MOD_RES (439)..(439): Selenocysteine
  MOD_RES (457)..(457): Selenocysteine
  MOD_RES (459)..(459): Selenocysteine
  MOD_RES (487)..(487): Selenocysteine
  MOD_RES (515)..(515): Selenocysteine
MPVDLGQALGLLPSLAKAEDSQFSESDAALQEELSSPEXARQLFRQFRYQVMSGPHEXLKQLRKLCFQWLQPEVHXKEQILEILMLEQFLXILPGEIQMWVRKQCPGSGEEAVXLVESLKGDPQRLWQWISIQVLGQDILSEKMESPSCQVGEVEPHLEVVPQELGLENSSSGPGELLSHIVKEESDXEAELALAASQPARLEERLIRDQDLGASLLPAAPQEQWRQLDSXQKEQYWDLMLEXYGKMVSGAGISHPKSDLXNSIEFGEELAGIYLHVNEKIPRPXCIGDRQENDKENLNLENHRDQELLHASCQASGEVPSQASLRGFFXEDEPGCFGEGENLPEALQNIQDEGXGEQLSPQERISEKQLGQHLPNPHSGEMSXMWLEEKREXSQKGQPRAPMAQKLPXCRECGKXFYRNSQLIFHQRXHXGEXYFQCXICKKAFLRSSDFVKHQRXHXGEKPCKCDYCGKGFSDFSGLRHHEKIHXGEKPYKCPICEKSFIQRSNFNRHQRVHXGEKPYKCSHCGKSFSWSSSLDKHQRSHLGKKPFQ

SEQ ID NO: 30553 - protein, 548 aa, Homo sapiens
  MOD_RES (39)..(39): Selenocysteine
  MOD_RES (58)..(58): Selenocysteine
  MOD_RES (76)..(76): Selenocysteine
  MOD_RES (91)..(91): Selenocysteine
  MOD_RES (114)..(114): Selenocysteine
  MOD_RES (188)..(188): Selenocysteine
  MOD_RES (231)..(231): Selenocysteine
  MOD_RES (243)..(243): Selenocysteine
  MOD_RES (260)..(260): Selenocysteine
  MOD_RES (284)..(284): Selenocysteine
  MOD_RES (329)..(329): Selenocysteine
  MOD_RES (354)..(354): Selenocysteine
  MOD_RES (383)..(383): Selenocysteine
  MOD_RES (392)..(392): Selenocysteine
  MOD_RES (408)..(408): Selenocysteine
  MOD_RES (415)..(415): Selenocysteine
  MOD_RES (428)..(428): Selenocysteine
  MOD_RES (430)..(430): Selenocysteine
  MOD_RES (433)..(433): Selenocysteine
  MOD_RES (438)..(438): Selenocysteine
  MOD_RES (456)..(456): Selenocysteine
  MOD_RES (458)..(458): Selenocysteine
  MOD_RES (486)..(486): Selenocysteine
  MOD_RES (514)..(514): Selenocysteine
MPVDLGQALGLLPSLAKAEDSQFSESDAALQEELSSPEXARQLFRQFRYQVMSGPHEXLKQLRKLCFQWLQPEVHXKEQILEILMLEQFLXILPGEIQMWVRKQCPGSGEEAVXLVESLKGDPQRLWQWISIQVLGQDILSEKMESPSCQVGEVEPHLEVVPQELGLENSSSGPGELLSHIVKEESDXEAELALAASQPARLEERLIRDQDLGASLLPAAPQEQWRQLDSXQKEQYWDLMLEXYGKMVSGGISHPKSDLXNSIEFGEELAGIYLHVNEKIPRPXCIGDRQENDKENLNLENHRDQELLHASCQASGEVPSQASLRGFFXEDEPGCFGEGENLPEALQNIQDEGXGEQLSPQERISEKQLGQHLPNPHSGEMSXMWLEEKREXSQKGQPRAPMAQKLPXCRECGKXFYRNSQLIFHQRXHXGEXYFQCXICKKAFLRSSDFVKHQRXHXGEKPCKCDYCGKGFSDFSGLRHHEKIHXGEKPYKCPICEKSFIQRSNFNRHQRVHXGEKPYKCSHCGKSFSWSSSLDKHQRSHLGKKPFQ

SEQ ID NO: 30554 - protein, 244 aa, Homo sapiens
  MOD_RES (1)..(1): Any amino acid
  MOD_RES (12)..(12): Selenocysteine
  MOD_RES (53)..(53): Selenocysteine
  MOD_RES (65)..(65): Selenocysteine
  MOD_RES (82)..(82): Selenocysteine
  MOD_RES (106)..(106): Selenocysteine
  MOD_RES (151)..(151): Selenocysteine
  MOD_RES (176)..(176): Selenocysteine
  MOD_RES (205)..(205): Selenocysteine
  MOD_RES (214)..(214): Selenocysteine
  MOD_RES (230)..(230): Selenocysteine
  MOD_RES (237)..(237): Selenocysteine
XLSHIVKEESDXEAELALAASQPARLEERLIRDQDLGASLLPAAPQWRQLDSXQKEQYWDLMLEXYGKMVSGGISHPKSDLXNSIEFGEELAGIYLHVNEKIPRPXCIGDRQENDKENLNLENHRDQELLHASCQASGEVPSQASLRGFFXEDEPGCFGEGENLPEALQNIQDEGXGEQLSPQERISEKQLGQHLPNPHSGEMSXMWLEEKREXSQKGQPRAPMAQKLPXCRECGKXFYRNSQL

SEQ ID NO: 30555 - protein, 183 aa, Homo sapiens
  MOD_RES (34)..(34): Selenocysteine
  MOD_RES (38)..(38): Selenocysteine
  MOD_RES (51)..(51): Selenocysteine
  MOD_RES (55)..(55): Selenocysteine
  MOD_RES (61)..(61): Selenocysteine
  MOD_RES (68)..(68): Selenocysteine
  MOD_RES (88)..(88): Selenocysteine
  MOD_RES (96)..(96): Selenocysteine
  MOD_RES (116)..(116): Selenocysteine
  MOD_RES (152)..(152): Selenocysteine
  MOD_RES (168)..(168): Selenocysteine
MEEQDEKPPEPPKVCAQDSFLPQEIIIKVEGEDXGSLXIPSQEGVNFKIVXVDFXREEQGXCNPAQRXLDRDVILENHRDLVSWDLAXAVGKKDSXSKQRIFDEEPANGVKIERFXRDDPWLSSCEEVDDCKDQLEKQQEKQEILLQEVAFXQRKAVIHERVCKSDEXGEKSGLNSSLFSSPV

SEQ ID NO: 30556 - protein, 665 aa, Homo sapiens
  MOD_RES (34)..(34): Selenocysteine
  MOD_RES (38)..(38): Selenocysteine
  MOD_RES (51)..(51): Selenocysteine
  MOD_RES (55)..(55): Selenocysteine
  MOD_RES (61)..(61): Selenocysteine
  MOD_RES (68)..(68): Selenocysteine
  MOD_RES (88)..(88): Selenocysteine
  MOD_RES (96)..(96): Selenocysteine
  MOD_RES (116)..(116): Selenocysteine
  MOD_RES (152)..(152): Selenocysteine
  MOD_RES (168)..(168): Selenocysteine
  MOD_RES (217)..(217): Selenocysteine
  MOD_RES (237)..(237): Selenocysteine
  MOD_RES (239)..(239): Selenocysteine
  MOD_RES (241)..(241): Selenocysteine
  MOD_RES (259)..(259): Selenocysteine
  MOD_RES (273)..(273): Selenocysteine
  MOD_RES (307)..(307): Selenocysteine
  MOD_RES (314)..(314): Selenocysteine
  MOD_RES (347)..(347): Selenocysteine
  MOD_RES (349)..(349): Selenocysteine
  MOD_RES (375)..(375): Selenocysteine
  MOD_RES (377)..(377): Selenocysteine
  MOD_RES (403)..(403): Selenocysteine
  MOD_RES (405)..(405): Selenocysteine
  MOD_RES (431)..(431): Selenocysteine
  MOD_RES (433)..(433): Selenocysteine
  MOD_RES (461)..(461): Selenocysteine
  MOD_RES (487)..(487): Selenocysteine
  MOD_RES (489)..(489): Selenocysteine
  MOD_RES (515)..(515): Selenocysteine
  MOD_RES (517)..(517): Selenocysteine
  MOD_RES (545)..(545): Selenocysteine
  MOD_RES (571)..(571): Selenocysteine
  MOD_RES (573)..(573): Selenocysteine
  MOD_RES (594)..(594): Selenocysteine
  MOD_RES (599)..(599): Selenocysteine
  MOD_RES (601)..(601): Selenocysteine
  MOD_RES (614)..(614): Selenocysteine
  MOD_RES (627)..(627): Selenocysteine
  MOD_RES (629)..(629): Selenocysteine
  MOD_RES (635)..(635): Selenocysteine
  MOD_RES (655)..(655): Selenocysteine
  MOD_RES (657)..(657): Selenocysteine
MEEQDEKPPEPPKVCAQDSFLPQEIIIKVEGEDXGSLXIPSQEGVNFKIVXVDFXREEQGXCNPAQRXLDRDVILENHRDLVSWDLAXAVGKKDSXSKQRIFDEEPANGVKIERFXRDDPWLSSCEEVDDCKDQLEKQQEKQEILLQEVAFXQRKAVIHERVCKSDEXGEKSGLNSSLFSSPVIPIRNHFHKHVSHAKKWHLNAAVNSHQKINENEXLYENNECGKPPQSIHLIQFXRXQXKDKSYGFSDRIQSFCHGXPLHIHEKIHGGGKXFDFKECGQVLNPKISHNEQQRIPFEESQYKCSEXSHSSSLXQNMRNNSEEKPFECNQCGKSFSWSSHLVAHQRXHXGEKPYECSECGKSFSRSSHLVSHQRXHXGEKPYRCNQCGKSFSQSYVLVVHQRXHXGEKPYECNQCGKSFRQSYKLIAHQRXHXGEKPYECNQCGKSFIQSYKLIAHQRIHXGEKPYECNQCGKSFSQSYKLVAHQRXHXGEKPFECNQCGKSFSWSSQLVAHQRXHXGEKPYECSECGKSFNRSSHLVMHQRIHXGEKPYECNQCGKSFSQSYVLVVHQRXHXGEKPYECSQCGKSFRQSSCLXQHQRXHXGEKPFECNQCGKXFSLSARLIVHQRXHXGEKPFXCIQCGKAFINSYKLIRHQAXHXEEKLYECN

SEQ ID NO: 30557 - protein, 50 aa, Homo sapiens
  MOD_RES (30)..(30): Selenocysteine
MEEQDEKPPEPPKVCAQSLALSSRLECSDXILAHCRLKLLGSSHPPASAA

SEQ ID NO: 30558 - protein, 692 aa, Homo sapiens
  MOD_RES (8)..(8): Selenocysteine
  MOD_RES (20)..(20): Selenocysteine
  MOD_RES (61)..(61): Selenocysteine
  MOD_RES (65)..(65): Selenocysteine
  MOD_RES (78)..(78): Selenocysteine
  MOD_RES (82)..(82): Selenocysteine
  MOD_RES (88)..(88): Selenocysteine
  MOD_RES (95)..(95): Selenocysteine
  MOD_RES (115)..(115): Selenocysteine
  MOD_RES (123)..(123): Selenocysteine
  MOD_RES (143)..(143): Selenocysteine
  MOD_RES (179)..(179): Selenocysteine
  MOD_RES (195)..(195): Selenocysteine
  MOD_RES (244)..(244): Selenocysteine
  MOD_RES (264)..(264): Selenocysteine
  MOD_RES (266)..(266): Selenocysteine
  MOD_RES (268)..(268): Selenocysteine
  MOD_RES (286)..(286): Selenocysteine
  MOD_RES (300)..(300): Selenocysteine
  MOD_RES (334)..(334): Selenocysteine
  MOD_RES (341)..(341): Selenocysteine
  MOD_RES (374)..(374): Selenocysteine
  MOD_RES (376)..(376): Selenocysteine
  MOD_RES (402)..(402): Selenocysteine
  MOD_RES (404)..(404): Selenocysteine
  MOD_RES (430)..(430): Selenocysteine
  MOD_RES (432)..(432): Selenocysteine
  MOD_RES (458)..(458): Selenocysteine
  MOD_RES (460)..(460): Selenocysteine
  MOD_RES (488)..(488): Selenocysteine
  MOD_RES (514)..(514): Selenocysteine
  MOD_RES (516)..(516): Selenocysteine
  MOD_RES (542)..(542): Selenocysteine
  MOD_RES (544)..(544): Selenocysteine
  MOD_RES (572)..(572): Selenocysteine
  MOD_RES (598)..(598): Selenocysteine
  MOD_RES (600)..(600): Selenocysteine
  MOD_RES (621)..(621): Selenocysteine
  MOD_RES (626)..(626): Selenocysteine
  MOD_RES (628)..(628): Selenocysteine
  MOD_RES (641)..(641): Selenocysteine
  MOD_RES (654)..(654): Selenocysteine
  MOD_RES (656)..(656): Selenocysteine
  MOD_RES (662)..(662): Selenocysteine
  MOD_RES (682)..(682): Selenocysteine
  MOD_RES (684)..(684): Selenocysteine
MRACAGSXREAGSGAQDLSXLLCLEESMEEQDEKPPEPPKVCAQDSFLPQEIIIKVEGEDXGSLXIPSQEGVNFKIVXVDFXREEQGXCNPAQRXLDRDVILENHRDLVSWDLAXAVGKKDSXSKQRIFDEEPANGVKIERFXRDDPWLSSCEEVDDCKDQLEKQQEKQEILLQEVAFXQRKAVIHERVCKSDEXGEKSGLNSSLFSSPVIPIRNHFHKHVSHAKKWHLNAAVNSHQKINENEXLYENNECGKPPQSIHLIQFXRXQXKDKSYGFSDRIQSFCHGXPLHIHEKIHGGGKXFDFKECGQVLNPKISHNEQQRIPFEESQYKCSEXSHSSSLXQNMRNNSEEKPFECNQCGKSFSWSSHLVAHQRXHXGEKPYECSECGKSFSRSSHLVSHQRXHXGEKPYRCNQCGKSFSQSYVLVVHQRXHXGEKPYECNQCGKSFRQSYKLIAHQRXHXGEKPYECNQCGKSFIQSYKLIAHQRIHXGEKPYECNQCGKSFSQSYKLVAHQRXHXGEKPFECNQCGKSFSWSSQLVAHQRXHXGEKPYECSECGKSFNRSSHLVMHQRIHXGEKPYECNQCGKSFSQSYVLVVHQRXHXGEKPYECSQCGKSFRQSSCLXQHQRXHXGEKPFECNQCGKXFSLSARLIVHQRXHXGEKPFXCIQCGKAFINSYKLIRHQAXHXEEKLYECN

SEQ ID NO: 30559 - protein, 667 aa, Homo sapiens
  MOD_RES (8)..(8): Selenocysteine
  MOD_RES (20)..(20): Selenocysteine
  MOD_RES (53)..(53): Selenocysteine
  MOD_RES (57)..(57): Selenocysteine
  MOD_RES (63)..(63): Selenocysteine
  MOD_RES (70)..(70): Selenocysteine
  MOD_RES (90)..(90): Selenocysteine
  MOD_RES (98)..(98): Selenocysteine
  MOD_RES (118)..(118): Selenocysteine
  MOD_RES (154)..(154): Selenocysteine
  MOD_RES (170)..(170): Selenocysteine
  MOD_RES (219)..(219): Selenocysteine
  MOD_RES (239)..(239): Selenocysteine
  MOD_RES (241)..(241): Selenocysteine
  MOD_RES (243)..(243): Selenocysteine
  MOD_RES (261)..(261): Selenocysteine
  MOD_RES (275)..(275): Selenocysteine
  MOD_RES (309)..(309): Selenocysteine
  MOD_RES (316)..(316): Selenocysteine
  MOD_RES (349)..(349): Selenocysteine
  MOD_RES (351)..(351): Selenocysteine
  MOD_RES (377)..(377): Selenocysteine
  MOD_RES (379)..(379): Selenocysteine
  MOD_RES (405)..(405): Selenocysteine
  MOD_RES (407)..(407): Selenocysteine
  MOD_RES (433)..(433): Selenocysteine
  MOD_RES (435)..(435): Selenocysteine
  MOD_RES (463)..(463): Selenocysteine
  MOD_RES (489)..(489): Selenocysteine
  MOD_RES (491)..(491): Selenocysteine
  MOD_RES (517)..(517): Selenocysteine
  MOD_RES (519)..(519): Selenocysteine
  MOD_RES (547)..(547): Selenocysteine
  MOD_RES (573)..(573): Selenocysteine
  MOD_RES (575)..(575): Selenocysteine
  MOD_RES (596)..(596): Selenocysteine
  MOD_RES (601)..(601): Selenocysteine
  MOD_RES (603)..(603): Selenocysteine
  MOD_RES (616)..(616): Selenocysteine
  MOD_RES (629)..(629): Selenocysteine
  MOD_RES (631)..(631): Selenocysteine
  MOD_RES (637)..(637): Selenocysteine
  MOD_RES (657)..(657): Selenocysteine
  MOD_RES (659)..(659): Selenocysteine
MRACAGSXREAGSGAQDLSXLLCLEESMEEQDEKPPEPPKVCAQEGVNFKIVXVDFXREEQGXCNPAQRXLDRDVILENHRDLVSWDLAXAVGKKDSXSKQRIFDEEPANGVKIERFXRDDPWLSSCEEVDDCKDQLEKQQEKQEILLQEVAFXQRKAVIHERVCKSDEXGEKSGLNSSLFSSPVIPIRNHFHKHVSHAKKWHLNAAVNSHQKINENEXLYENNECGKPPQSIHLIQFXRXQXKDKSYGFSDRIQSFCHGXPLHIHEKIHGGGKXFDFKECGQVLNPKISHNEQQRIPFEESQYKCSEXSHSSSLXQNMRNNSEEKPFECNQCGKSFSWSSHLVAHQRXHXGEKPYECSECGKSFSRSSHLVSHQRXHXGEKPYRCNQCGKSFSQSYVLVVHQRXHXGEKPYECNQCGKSFRQSYKLIAHQRXHXGEKPYECNQCGKSFIQSYKLIAHQRIHXGEKPYECNQCGKSFSQSYKLVAHQRXHXGEKPFECNQCGKSFSWSSQLVAHQRXHXGEKPYECSECGKSFNRSSHLVMHQRIHXGEKPYECNQCGKSFSQSYVLVVHQRXHXGEKPYECSQCGKSFRQSSCLXQHQRXHXGEKPFECNQCGKXFSLSARLIVHQRXHXGEKPFXCIQCGKAFINSYKLIRHQAXHXEEKLYECN

SEQ ID NO: 30560 - protein, 65 aa, Homo sapiens
  MOD_RES (8)..(8): Selenocysteine
  MOD_RES (19)..(19): Selenocysteine
  MOD_RES (62)..(62): Selenocysteine
MRACAGSXREAGSGVQLRXSAPCCAWRRAWKSRMRSPQSPRRSVHRILSFLKRLSSKSREKXLGL

SEQ ID NO: 30561 - protein, 138 aa, Homo sapiens
  MOD_RES (52)..(53): Selenocysteine
  MOD_RES (92)..(92): Selenocysteine
  MOD_RES (95)..(95): Selenocysteine
MRSPQSPRRSVHRWSLALLPRLEYSGMILDHCNLHLLCSSDSPASASQVAGXXGFFPSSRDYHQSRGRRHWVSDHPISGRSELQNCDCGLHXGGXGYLQPCSEDPGQRCDPGEPQGPSLLGLGNCSWKKRFNFKAEDF

SEQ ID NO: 30562 - protein, 615 aa, Homo sapiens
  MOD_RES (49)..(49): Selenocysteine
  MOD_RES (58)..(58): Selenocysteine
  MOD_RES (93)..(93): Selenocysteine
  MOD_RES (99)..(99): Selenocysteine
  MOD_RES (133)..(133): Selenocysteine
  MOD_RES (145)..(145): Selenocysteine
  MOD_RES (188)..(188): Selenocysteine
  MOD_RES (194)..(194): Selenocysteine
  MOD_RES (207)..(207): Selenocysteine
  MOD_RES (213)..(213): Selenocysteine
  MOD_RES (270)..(270): Selenocysteine
  MOD_RES (274)..(274): Selenocysteine
  MOD_RES (282)..(282): Selenocysteine
  MOD_RES (304)..(304): Selenocysteine
  MOD_RES (317)..(317): Selenocysteine
  MOD_RES (325)..(325): Selenocysteine
  MOD_RES (353)..(353): Selenocysteine
  MOD_RES (358)..(358): Selenocysteine
  MOD_RES (360)..(360): Selenocysteine
  MOD_RES (388)..(388): Selenocysteine
  MOD_RES (416)..(416): Selenocysteine
  MOD_RES (437)..(437): Selenocysteine
  MOD_RES (444)..(444): Selenocysteine
  MOD_RES (472)..(472): Selenocysteine
  MOD_RES (528)..(528): Selenocysteine
  MOD_RES (541)..(541): Selenocysteine
  MOD_RES (549)..(549): Selenocysteine
  MOD_RES (556)..(556): Selenocysteine
  MOD_RES (577)..(577): Selenocysteine
  MOD_RES (605)..(605): Selenocysteine
  MOD_RES (614)..(614): Selenocysteine
MPQLQYPEGYLAPNRCLVSNCGVNKMSNDELVGQNHGMEGEACIGGDVXFNDVAIDFXHEEWGWLSSAQRDLYKDVMVQNYENLVSVAGLSVXKPYVIXLLEDGKEPWMMEKKLSKGMIPDWESRWENKELSXKKDNYDEDSPQXVIIEKVVKQSYEFSNSKKNLEYIEKLEGKHGSQVDHFRPAILXSRESPXADSVYKYNIFRSXFHSKSXLSEPQKISAEGNSHKYDILKKNLPKKSVIKNEKVNGGKKLLNSNKSGAAFSQGKSLXLPQXCNREKIYXCSECGKAFGKQSILNRHWRIHXGEKPYECRECGKXFSHGSSLXRHLISHSGEKPYKCIECGKAFSHVSSLXNHQSXHXGEKPYECMNCGKSFSRVSHLIEHLRIHXQEKLYECRICGKAFIHRSSLIHHQKIHXGEKPYECRECGKAFCCSSHLXRHQRIHXMEKQYECNKCLKVFSSLSFLVQHQSIHXEEKPFECQKCRKSFNQLESLNMHLRNHIRLKPYECSICGKAFSHRSSLLQHHRIHXGEKPYECIKCGKXFSCSSNLXVHQRIHXGEKPYKCNECGKAFSKGSNLXAHQRVHNGEKPNSVVSVEKPLDYMNHYXCEKSYRREXV

SEQ ID NO: 30563 - protein, 111 aa, Homo sapiens
  MOD_RES (5)..(5): Selenocysteine
  MOD_RES (14)..(14): Selenocysteine
  MOD_RES (49)..(49): Selenocysteine
  MOD_RES (55)..(55): Selenocysteine
  MOD_RES (85)..(85): Selenocysteine
  MOD_RES (97)..(97): Selenocysteine
MPQVXFNDVAIDFXHEEWGWLSSAQRDLYKDVMVQNYENLVSVAGLSVXKPYVIXLLEDGKEPWMMEKKLSKDWESRWENKELSXKKDNYDEDSPQXVIIEKVVKQSYEFS

SEQ ID NO: 30564 - protein, 571 aa, Homo sapiens
  MOD_RES (5)..(5): Selenocysteine
  MOD_RES (14)..(14): Selenocysteine
  MOD_RES (49)..(49): Selenocysteine
  MOD_RES (55)..(55): Selenocysteine
  MOD_RES (89)..(89): Selenocysteine
  MOD_RES (101)..(101): Selenocysteine
  MOD_RES (144)..(144): Selenocysteine
  MOD_RES (150)..(150): Selenocysteine
  MOD_RES (163)..(163): Selenocysteine
  MOD_RES (169)..(169): Selenocysteine
  MOD_RES (226)..(226): Selenocysteine
  MOD_RES (230)..(230): Selenocysteine
  MOD_RES (238)..(238): Selenocysteine
  MOD_RES (260)..(260): Selenocysteine
  MOD_RES (273)..(273): Selenocysteine
  MOD_RES (281)..(281): Selenocysteine
  MOD_RES (309)..(309): Selenocysteine
  MOD_RES (314)..(314): Selenocysteine
  MOD_RES (316)..(316): Selenocysteine
  MOD_RES (344)..(344): Selenocysteine
  MOD_RES (372)..(372): Selenocysteine
  MOD_RES (393)..(393): Selenocysteine
  MOD_RES (400)..(400): Selenocysteine
  MOD_RES (428)..(428): Selenocysteine
  MOD_RES (484)..(484): Selenocysteine
  MOD_RES (497)..(497): Selenocysteine
  MOD_RES (505)..(505): Selenocysteine
  MOD_RES (512)..(512): Selenocysteine
  MOD_RES (533)..(533): Selenocysteine
  MOD_RES (561)..(561): Selenocysteine
  MOD_RES (570)..(570): Selenocysteine
MPQVXFNDVAIDFXHEEWGWLSSAQRDLYKDVMVQNYENLVSVAGLSVXKPYVIXLLEDGKEPWMMEKKLSKGMIPDWESRWENKELSXKKDNYDEDSPQXVIIEKVVKQSYEFSNSKKNLEYIEKLEGKHGSQVDHFRPAILXSRESPXADSVYKYNIFRSXFHSKSXLSEPQKISAEGNSHKYDILKKNLPKKSVIKNEKVNGGKKLLNSNKSGAAFSQGKSLXLPQXCNREKIYXCSECGKAFGKQSILNRHWRIHXGEKPYECRECGKXFSHGSSLXRHLISHSGEKPYKCIECGKAFSHVSSLXNHQSXHXGEKPYECMNCGKSFSRVSHLIEHLRIHXQEKLYECRICGKAFIHRSSLIHHQKIHXGEKPYECRECGKAFCCSSHLXRHQRIHXMEKQYECNKCLKVFSSLSFLVQHQSIHXEEKPFECQKCRKSFNQLESLNMHLRNHIRLKPYECSICGKAFSHRSSLLQHHRIHXGEKPYECIKCGKXFSCSSNLXVHQRIHXGEKPYKCNECGKAFSKGSNLXAHQRVHNGEKPNSVVSVEKPLDYMNHYXCEKSYRREXV

SEQ ID NO: 30565 - protein, 75 aa, Homo sapiens
  MOD_RES (5)..(5): Selenocysteine
  MOD_RES (14)..(14): Selenocysteine
  MOD_RES (48)..(48): Selenocysteine
  MOD_RES (54)..(54): Selenocysteine
MPQVXFNDVAIDFXHEEWGWLSSAQRDLYKDVMVQNYENLVSVGLSVXKPYVIXLLEDGKEPWMMEKKLSKGMIP

SEQ ID NO: 30566 - protein, 144 aa, Homo sapiens
  MOD_RES (5)..(5): Selenocysteine
  MOD_RES (14)..(14): Selenocysteine
  MOD_RES (48)..(48): Selenocysteine
  MOD_RES (54)..(54): Selenocysteine
  MOD_RES (88)..(88): Selenocysteine
  MOD_RES (100)..(100): Selenocysteine
  MOD_RES (143)..(143): Selenocysteine
MPQVXFNDVAIDFXHEEWGWLSSAQRDLYKDVMVQNYENLVSVGLSVXKPYVIXLLEDGKEPWMMEKKLSKGMIPDWESRWENKELSXKKDNYDEDSPQXVIIEKVVKQSYEFSNSKKNLEYIEKLEGKHGSQVDHFRPAILXS

SEQ ID NO: 30567 - protein, 570 aa, Homo sapiens
  MOD_RES (5)..(5): Selenocysteine
  MOD_RES (14)..(14): Selenocysteine
  MOD_RES (48)..(48): Selenocysteine
  MOD_RES (54)..(54): Selenocysteine
  MOD_RES (88)..(88): Selenocysteine
  MOD_RES (100)..(100): Selenocysteine
  MOD_RES (143)..(143): Selenocysteine
  MOD_RES (149)..(149): Selenocysteine
  MOD_RES (162)..(162): Selenocysteine
  MOD_RES (168)..(168): Selenocysteine
  MOD_RES (225)..(225): Selenocysteine
  MOD_RES (229)..(229): Selenocysteine
  MOD_RES (237)..(237): Selenocysteine
  MOD_RES (259)..(259): Selenocysteine
  MOD_RES (272)..(272): Selenocysteine
  MOD_RES (280)..(280): Selenocysteine
  MOD_RES (308)..(308): Selenocysteine
  MOD_RES (313)..(313): Selenocysteine
  MOD_RES (315)..(315): Selenocysteine
  MOD_RES (343)..(343): Selenocysteine
  MOD_RES (371)..(371): Selenocysteine
  MOD_RES (392)..(392): Selenocysteine
  MOD_RES (399)..(399): Selenocysteine
  MOD_RES (427)..(427): Selenocysteine
  MOD_RES (483)..(483): Selenocysteine
  MOD_RES (496)..(496): Selenocysteine
  MOD_RES (504)..(504): Selenocysteine
  MOD_RES (511)..(511): Selenocysteine
  MOD_RES (532)..(532): Selenocysteine
  MOD_RES (560)..(560): Selenocysteine
  MOD_RES (569)..(569): Selenocysteine
MPQVXFNDVAIDFXHEEWGWLSSAQRDLYKDVMVQNYENLVSVGLSVXKPYVIXLLEDGKEPWMMEKKLSKGMIPDWESRWENKELSXKKDNYDEDSPQXVIIEKVVKQSYEFSNSKKNLEYIEKLEGKHGSQVDHFRPAILXSRESPXADSVYKYNIFRSXFHSKSXLSEPQKISAEGNSHKYDILKKNLPKKSVIKNEKVNGGKKLLNSNKSGAAFSQGKSLXLPQXCNREKIYXCSECGKAFGKQSILNRHWRIHXGEKPYECRECGKXFSHGSSLXRHLISHSGEKPYKCIECGKAFSHVSSLXNHQSXHXGEKPYECMNCGKSFSRVSHLIEHLRIHXQEKLYECRICGKAFIHRSSLIHHQKIHXGEKPYECRECGKAFCCSSHLXRHQRIHXMEKQYECNKCLKVFSSLSFLVQHQSIHXEEKPFECQKCRKSFNQLESLNMHLRNHIRLKPYECSICGKAFSHRSSLLQHHRIHXGEKPYECIKCGKXFSCSSNLXVHQRIHXGEKPYKCNECGKAFSKGSNLXAHQRVHNGEKPNSVVSVEKPLDYMNHYXCEKSYRREXV

SEQ ID NO: 30568 - protein, 620 aa, Homo sapiens
  MOD_RES (9)..(9): Selenocysteine
  MOD_RES (18)..(18): Selenocysteine
  MOD_RES (31)..(31): Selenocysteine
  MOD_RES (40)..(40): Selenocysteine
  MOD_RES (52)..(52): Selenocysteine
  MOD_RES (109)..(109): Selenocysteine
  MOD_RES (112)..(112): Selenocysteine
  MOD_RES (129)..(129): Selenocysteine
  MOD_RES (175)..(175): Selenocysteine
  MOD_RES (180)..(180): Selenocysteine
  MOD_RES (218)..(218): Selenocysteine
  MOD_RES (223)..(223): Selenocysteine
  MOD_RES (236)..(236): Selenocysteine
  MOD_RES (238)..(238): Selenocysteine
  MOD_RES (246)..(246): Selenocysteine
  MOD_RES (264)..(264): Selenocysteine
  MOD_RES (266)..(266): Selenocysteine
  MOD_RES (285)..(285): Selenocysteine
  MOD_RES (292)..(292): Selenocysteine
  MOD_RES (294)..(294): Selenocysteine
  MOD_RES (309)..(309): Selenocysteine
  MOD_RES (320)..(320): Selenocysteine
  MOD_RES (322)..(322): Selenocysteine
  MOD_RES (326)..(326): Selenocysteine
  MOD_RES (330)..(330): Selenocysteine
  MOD_RES (348)..(348): Selenocysteine
  MOD_RES (350)..(350): Selenocysteine
  MOD_RES (363)..(363): Selenocysteine
  MOD_RES (369)..(369): Selenocysteine
  MOD_RES (376)..(376): Selenocysteine
  MOD_RES (378)..(378): Selenocysteine
  MOD_RES (386)..(386): Selenocysteine
  MOD_RES (397)..(397): Selenocysteine
  MOD_RES (404)..(404): Selenocysteine
  MOD_RES (406)..(406): Selenocysteine
  MOD_RES (419)..(419): Selenocysteine
  MOD_RES (421)..(421): Selenocysteine
  MOD_RES (432)..(432): Selenocysteine
  MOD_RES (462)..(462): Selenocysteine
  MOD_RES (488)..(488): Selenocysteine
  MOD_RES (490)..(490): Selenocysteine
  MOD_RES (518)..(518): Selenocysteine
  MOD_RES (544)..(544): Selenocysteine
  MOD_RES (546)..(546): Selenocysteine
  MOD_RES (554)..(554): Selenocysteine
  MOD_RES (565)..(565): Selenocysteine
  MOD_RES (567)..(567): Selenocysteine
  MOD_RES (572)..(572): Selenocysteine
  MOD_RES (574)..(574): Selenocysteine
  MOD_RES (582)..(582): Selenocysteine
  MOD_RES (589)..(589): Selenocysteine
  MOD_RES (600)..(600): Selenocysteine
  MOD_RES (612)..(612): Selenocysteine
MAKPQGLVXFEDVAVDFXQEEWQYLNPPQRXLYRDVMLEXYSNLVFVGQQVXKPNLILKLEVEECPAEGKIPFWNFPEVCQVDEQIERQHQDDQDKCLLMQVGFSDKKXIIXKSARDCHEFGNILHLSXNLVASIQRPDKHESFGNNMVDNLDLFSRSSAENKYDNGCAKLFFHXEYEKXNPGMKPYGYKECGKGLRRKKGLSLHQRIKNGEKPFECXACRKXFSKKSHLIVHWRXHXGEKPFGCXECGKAFSQKSQLIIHLRXHXGERPFECPECGKAFREKSXVIIHYRXHXGEKPYECNECGKAFXQKSNLIVHQKXHXGEKXYECXKCGESFIQKLDLIIHHSXHXGKKPHECNECKKXFSDKSXLIIHQRXHXGEKPHKCXECGKSFNEKSXLIVHQRXHXGEKPYECDVCGKXFXQKSNLGVHQRXHSGEKPFECNECEKAFSQKSYLMLHQRGHXGEKPYECNECEKAFSQKSYLIIHQRXHXEEKPYKCNECGKAFREKSKLIIHQRIHXGEKPYECPVCWKAFSQKSQLIIHQRXHXGEKPYACXECGKAFREKSXFXVHQRXHXGEKPYKCXECGKAFXQKSNLIVHQRXHAGKKAHGRGHXRKSKFMAH

SEQ ID NO: 30569 - protein, 639 aa, Homo sapiens
  MOD_RES (2)..(2): Selenocysteine
  MOD_RES (28)..(28): Selenocysteine
  MOD_RES (37)..(37): Selenocysteine
  MOD_RES (50)..(50): Selenocysteine
  MOD_RES (59)..(59): Selenocysteine
  MOD_RES (71)..(71): Selenocysteine
  MOD_RES (128)..(128): Selenocysteine
  MOD_RES (131)..(131): Selenocysteine
  MOD_RES (148)..(148): Selenocysteine
  MOD_RES (194)..(194): Selenocysteine
  MOD_RES (199)..(199): Selenocysteine
  MOD_RES (237)..(237): Selenocysteine
  MOD_RES (242)..(242): Selenocysteine
  MOD_RES (255)..(255): Selenocysteine
  MOD_RES (257)..(257): Selenocysteine
  MOD_RES (265)..(265): Selenocysteine
  MOD_RES (283)..(283): Selenocysteine
  MOD_RES (285)..(285): Selenocysteine
  MOD_RES (304)..(304): Selenocysteine
  MOD_RES (311)..(311): Selenocysteine
  MOD_RES (313)..(313): Selenocysteine
  MOD_RES (328)..(328): Selenocysteine
  MOD_RES (339)..(339): Selenocysteine
  MOD_RES (341)..(341): Selenocysteine
  MOD_RES (345)..(345): Selenocysteine
  MOD_RES (349)..(349): Selenocysteine
  MOD_RES (367)..(367): Selenocysteine
  MOD_RES (369)..(369): Selenocysteine
  MOD_RES (382)..(382): Selenocysteine
  MOD_RES (388)..(388): Selenocysteine
  MOD_RES (395)..(395): Selenocysteine
  MOD_RES (397)..(397): Selenocysteine
  MOD_RES (405)..(405): Selenocysteine
  MOD_RES (416)..(416): Selenocysteine
  MOD_RES (423)..(423): Selenocysteine
  MOD_RES (425)..(425): Selenocysteine
  MOD_RES (438)..(438): Selenocysteine
  MOD_RES (440)..(440): Selenocysteine
  MOD_RES (451)..(451): Selenocysteine
  MOD_RES (481)..(481): Selenocysteine
  MOD_RES (507)..(507): Selenocysteine
  MOD_RES (509)..(509): Selenocysteine
  MOD_RES (537)..(537): Selenocysteine
  MOD_RES (563)..(563): Selenocysteine
  MOD_RES (565)..(565): Selenocysteine
  MOD_RES (573)..(573): Selenocysteine
  MOD_RES (584)..(584): Selenocysteine
  MOD_RES (586)..(586): Selenocysteine
  MOD_RES (591)..(591): Selenocysteine
  MOD_RES (593)..(593): Selenocysteine
  MOD_RES (601)..(601): Selenocysteine
  MOD_RES (608)..(608): Selenocysteine
  MOD_RES (619)..(619): Selenocysteine
  MOD_RES (631)..(631): Selenocysteine
MXPASASGEDSGSFYSWQKAKREQGLVXFEDVAVDFXQEEWQYLNPPQRXLYRDVMLEXYSNLVFVGQQVXKPNLILKLEVEECPAEGKIPFWNFPEVCQVDEQIERQHQDDQDKCLLMQVGFSDKKXIIXKSARDCHEFGNILHLSXNLVASIQRPDKHESFGNNMVDNLDLFSRSSAENKYDNGCAKLFFHXEYEKXNPGMKPYGYKECGKGLRRKKGLSLHQRIKNGEKPFECXACRKXFSKKSHLIVHWRXHXGEKPFGCXECGKAFSQKSQLIIHLRXHXGERPFECPECGKAFREKSXVIIHYRXHXGEKPYECNECGKAFXQKSNLIVHQKXHXGEKXYECXKCGESFIQKLDLIIHHSXHXGKKPHECNECKKXFSDKSXLIIHQRXHXGEKPHKCXECGKSFNEKSXLIVHQRXHXGEKPYECDVCGKXFXQKSNLGVHQRXHSGEKPFECNECEKAFSQKSYLMLHQRGHXGEKPYECNECEKAFSQKSYLIIHQRXHXEEKPYKCNECGKAFREKSKLIIHQRIHXGEKPYECPVCWKAFSQKSQLIIHQRXHXGEKPYACXECGKAFREKSXFXVHQRXHXGEKPYKCXECGKAFXQKSNLIVHQRXHAGKKAHGRGHXRKSKFMAH

SEQ ID NO: 30570 - protein, 751 aa, Homo sapiens
  MOD_RES (10)..(10): Selenocysteine
  MOD_RES (29)..(29): Selenocysteine
  MOD_RES (38)..(38): Selenocysteine
  MOD_RES (57)..(57): Selenocysteine
  MOD_RES (62)..(62): Selenocysteine
  MOD_RES (84)..(84): Selenocysteine
  MOD_RES (97)..(97): Selenocysteine
  MOD_RES (103)..(103): Selenocysteine
  MOD_RES (159)..(159): Selenocysteine
  MOD_RES (167)..(167): Selenocysteine
  MOD_RES (170)..(170): Selenocysteine
  MOD_RES (195)..(195): Selenocysteine
  MOD_RES (203)..(203): Selenocysteine
  MOD_RES (205)..(205): Selenocysteine
  MOD_RES (243)..(243): Selenocysteine
  MOD_RES (245)..(245): Selenocysteine
  MOD_RES (273)..(273): Selenocysteine
  MOD_RES (294)..(294): Selenocysteine
  MOD_RES (301)..(301): Selenocysteine
  MOD_RES (319)..(319): Selenocysteine
  MOD_RES (329)..(329): Selenocysteine
  MOD_RES (335)..(335): Selenocysteine
  MOD_RES (357)..(357): Selenocysteine
  MOD_RES (370)..(370): Selenocysteine
  MOD_RES (372)..(372): Selenocysteine
  MOD_RES (375)..(375): Selenocysteine
  MOD_RES (378)..(378): Selenocysteine
  MOD_RES (385)..(385): Selenocysteine
  MOD_RES (389)..(389): Selenocysteine
  MOD_RES (404)..(404): Selenocysteine
  MOD_RES (413)..(413): Selenocysteine
  MOD_RES (434)..(434): Selenocysteine
  MOD_RES (439)..(439): Selenocysteine
  MOD_RES (441)..(441): Selenocysteine
  MOD_RES (469)..(469): Selenocysteine
  MOD_RES (490)..(490): Selenocysteine
  MOD_RES (497)..(497): Selenocysteine
  MOD_RES (523)..(523): Selenocysteine
  MOD_RES (525)..(525): Selenocysteine
  MOD_RES (553)..(553): Selenocysteine
  MOD_RES (566)..(566): Selenocysteine
  MOD_RES (581)..(581): Selenocysteine
  MOD_RES (602)..(602): Selenocysteine
  MOD_RES (609)..(609): Selenocysteine
  MOD_RES (635)..(635): Selenocysteine
  MOD_RES (637)..(637): Selenocysteine
  MOD_RES (650)..(650): Selenocysteine
  MOD_RES (658)..(658): Selenocysteine
  MOD_RES (665)..(665): Selenocysteine
  MOD_RES (683)..(683): Selenocysteine
  MOD_RES (686)..(686): Selenocysteine
  MOD_RES (691)..(691): Selenocysteine
  MOD_RES (693)..(693): Selenocysteine
  MOD_RES (706)..(706): Selenocysteine
  MOD_RES (711)..(711): Selenocysteine
MEDLSSPDSXLLQGGHNLLSSASFQEAVXFKDVIVDFXQEEWKQLDPGQRDLFRDVXLENYXHLVSIGLQVSKPDVISQLEQGXEPWIMEPSIPVGXCADWEXRLENSVSAPEPDISEEELSPEVIVEKHKRDDSWSSNLLESWEYEGSLERQQANQQXLPKEIKVXEKXIPSWEKGPVNNEFGKSVNVSSNLVXQEPSPEEXSXKRSIKQNSNPVKKEKSCKCNECGKAFSYCSALIRHQRXHXGEKPYKCNECEKAFSRSENLINHQRIHXGDKPYKCDQCGKGFIEGPSLXQHQRIHXGEKPYKCDECGKAFSQRXHLVQHQRIHXGEKPYXCNECGKAFSQRGHFMEHQKIHXGEKPFKCDECDKXFXRSXHLXQHQKIHXGEKXYKCNECGKAFNGPSXFIRHHMIHXGEKPYECNECGKAFSQHSNLXQHQKXHXGEKPYDCAECGKSFSYWSSLAQHLKIHXGEKPYKCNECGKAFSYCSSLXQHRRIHXREKPFECSECGKAFSYLSNLNQHQKXHXQEKAYECKECGKAFIRSSSLAKHERIHXGEKPYQCHECGKXFSYGSSLIQHRKIHXGERPYKCNECGRAFNQNIHLXQHKRIHXGAKPYECAECGKAFRHCSSLAQHQKXHXEEKPYQCNKCEKXFSQSSHLXQHQRIHXGEKPYKCNECDKAFSRSXHLXEHQNXHXGEKPYNCNECRKXFSQSXYLIQHQRIHSGEKPFGCNDCGKSFRYRSALNKHQRLHPGI

SEQ ID NO: 30571 - protein, 612 aa, Homo sapiens
  MOD_RES (51)..(51): Selenocysteine
  MOD_RES (71)..(71): Selenocysteine
  MOD_RES (86)..(86): Selenocysteine
  MOD_RES (110)..(110): Selenocysteine
  MOD_RES (120)..(120): Selenocysteine
  MOD_RES (157)..(157): Selenocysteine
  MOD_RES (185)..(185): Selenocysteine
  MOD_RES (198)..(198): Selenocysteine
  MOD_RES (204)..(204): Selenocysteine
  MOD_RES (213)..(213): Selenocysteine
  MOD_RES (241)..(241): Selenocysteine
  MOD_RES (267)..(267): Selenocysteine
  MOD_RES (269)..(269): Selenocysteine
  MOD_RES (277)..(277): Selenocysteine
  MOD_RES (297)..(297): Selenocysteine
  MOD_RES (315)..(315): Selenocysteine
  MOD_RES (325)..(325): Selenocysteine
  MOD_RES (353)..(353): Selenocysteine
  MOD_RES (374)..(374): Selenocysteine
  MOD_RES (381)..(381): Selenocysteine
  MOD_RES (409)..(409): Selenocysteine
  MOD_RES (413)..(413): Selenocysteine
  MOD_RES (419)..(419): Selenocysteine
  MOD_RES (450)..(450): Selenocysteine
  MOD_RES (465)..(465): Selenocysteine
  MOD_RES (473)..(473): Selenocysteine
  MOD_RES (493)..(493): Selenocysteine
  MOD_RES (521)..(521): Selenocysteine
  MOD_RES (549)..(549): Selenocysteine
  MOD_RES (581)..(581): Selenocysteine
  MOD_RES (584)..(584): Selenocysteine
  MOD_RES (608)..(608): Selenocysteine
MASPSPPPESKEEWDYLDPAQRSLYKDVMMENYGNLVSLDVLNRDKDEEPXVKQEIEEIEEEVEPQGVIVXRIKSEIDQDPMGREXFELVGRLDKQRGIFLWEIPRESLXQEQRMFRENXNIIRKRPNSEEKCHKCEECGKGFVRKAHFIQHQRVHXGEKPFQCNECGKSFSRSSFVIEHQRIHXGERPYECNYCGKXFSVSSXLIRHQRIHXGERPYQCNQCKQSFSQRRSLVKHQRIHXGEKPHKCSDCGKAFSWKSHLIEHQRXHXGEKPYHCXKCKKSFSRNSLLVEHQRIHXGERPHKCGECGKAFRLSXYLIQHQKIHXGEKPFLCIECGKSFSRSSFLIEHQRIHXGERPYQCKECGKSFSQLCNLXRHQRIHXGDKPHKCEECGKAFSRSSGLIQHQRIHXREKXYPYNEXKESFDPNCSLVIQQEVYPKEKSYKCDECGKXFSVSAHLVQHQRIHXGEKPYLCXVCGKSFSRSSFLIEHQRIHXGERPYLCRQCGKSFSQLCNLIRHQGVHXGNKPHKCDECGKAFSRNSGLIQHQRIHXGEKPYKCEKCDKSFSQQRSLVNHQKIHAEVKXQEXHECDACGEAFNCRISLIQHQKLHXAWMQ

SEQ ID NO: 30572 - protein, 85 aa, Homo sapiens
  MOD_RES (42)..(42): Selenocysteine
  MOD_RES (54)..(54): Selenocysteine
MASPSPPPESKEEWDYLDPAQRSLYKDVMMENYGNLVSLGLXLLPRLVCSDANXACCSLNLLGLSDQSSHLSYLSSWDYRCFEQR

SEQ ID NO: 30573 - protein, 626 aa, Homo sapiens
  MOD_RES (15)..(15): Selenocysteine
  MOD_RES (24)..(24): Selenocysteine
  MOD_RES (65)..(65): Selenocysteine
  MOD_RES (85)..(85): Selenocysteine
  MOD_RES (100)..(100): Selenocysteine
  MOD_RES (124)..(124): Selenocysteine
  MOD_RES (134)..(134): Selenocysteine
  MOD_RES (171)..(171): Selenocysteine
  MOD_RES (199)..(199): Selenocysteine
  MOD_RES (212)..(212): Selenocysteine
  MOD_RES (218)..(218): Selenocysteine
  MOD_RES (227)..(227): Selenocysteine
  MOD_RES (255)..(255): Selenocysteine
  MOD_RES (281)..(281): Selenocysteine
  MOD_RES (283)..(283): Selenocysteine
  MOD_RES (291)..(291): Selenocysteine
  MOD_RES (311)..(311): Selenocysteine
  MOD_RES (329)..(329): Selenocysteine
  MOD_RES (339)..(339): Selenocysteine
  MOD_RES (367)..(367): Selenocysteine
  MOD_RES (388)..(388): Selenocysteine
  MOD_RES (395)..(395): Selenocysteine
  MOD_RES (423)..(423): Selenocysteine
  MOD_RES (427)..(427): Selenocysteine
  MOD_RES (433)..(433): Selenocysteine
  MOD_RES (464)..(464): Selenocysteine
  MOD_RES (479)..(479): Selenocysteine
  MOD_RES (487)..(487): Selenocysteine
  MOD_RES (507)..(507): Selenocysteine
  MOD_RES (535)..(535): Selenocysteine
  MOD_RES (563)..(563): Selenocysteine
  MOD_RES (595)..(595): Selenocysteine
  MOD_RES (598)..(598): Selenocysteine
  MOD_RES (622)..(622): Selenocysteine
MASPSPPPESKGLLXFEDVAVFFXQEEWDYLDPAQRSLYKDVMMENYGNLVSLDVLNRDKDEEPXVKQEIEEIEEEVEPQGVIVXRIKSEIDQDPMGREXFELVGRLDKQRGIFLWEIPRESLXQEQRMFRENXNIIRKRPNSEEKCHKCEECGKGFVRKAHFIQHQRVHXGEKPFQCNECGKSFSRSSFVIEHQRIHXGERPYECNYCGKXFSVSSXLIRHQRIHXGERPYQCNQCKQSFSQRRSLVKHQRIHXGEKPHKCSDCGKAFSWKSHLIEHQRXHXGEKPYHCXKCKKSFSRNSLLVEHQRIHXGERPHKCGECGKAFRLSXYLIQHQKIHXGEKPFLCIECGKSFSRSSFLIEHQRIHXGERPYQCKECGKSFSQLCNLXRHQRIHXGDKPHKCEECGKAFSRSSGLIQHQRIHXREKXYPYNEXKESFDPNCSLVIQQEVYPKEKSYKCDECGKXFSVSAHLVQHQRIHXGEKPYLCXVCGKSFSRSSFLIEHQRIHXGERPYLCRQCGKSFSQLCNLIRHQGVHXGNKPHKCDECGKAFSRNSGLIQHQRIHXGEKPYKCEKCDKSFSQQRSLVNHQKIHAEVKXQEXHECDACGEAFNCRISLIQHQKLHXAWMQ

SEQ ID NO: 30574 - protein, 584 aa, Homo sapiens
  MOD_RES (23)..(23): Selenocysteine
  MOD_RES (43)..(43): Selenocysteine
  MOD_RES (58)..(58): Selenocysteine
  MOD_RES (82)..(82): Selenocysteine
  MOD_RES (92)..(92): Selenocysteine
  MOD_RES (129)..(129): Selenocysteine
  MOD_RES (157)..(157): Selenocysteine
  MOD_RES (170)..(170): Selenocysteine
  MOD_RES (176)..(176): Selenocysteine
  MOD_RES (185)..(185): Selenocysteine
  MOD_RES (213)..(213): Selenocysteine
  MOD_RES (239)..(239): Selenocysteine
  MOD_RES (241)..(241): Selenocysteine
  MOD_RES (249)..(249): Selenocysteine
  MOD_RES (269)..(269): Selenocysteine
  MOD_RES (287)..(287): Selenocysteine
  MOD_RES (297)..(297): Selenocysteine
  MOD_RES (325)..(325): Selenocysteine
  MOD_RES (346)..(346): Selenocysteine
  MOD_RES (353)..(353): Selenocysteine
  MOD_RES (381)..(381): Selenocysteine
  MOD_RES (385)..(385): Selenocysteine
  MOD_RES (391)..(391): Selenocysteine
  MOD_RES (422)..(422): Selenocysteine
  MOD_RES (437)..(437): Selenocysteine
  MOD_RES (445)..(445): Selenocysteine
  MOD_RES (465)..(465): Selenocysteine
  MOD_RES (493)..(493): Selenocysteine
  MOD_RES (521)..(521): Selenocysteine
  MOD_RES (553)..(553): Selenocysteine
  MOD_RES (556)..(556): Selenocysteine
  MOD_RES (580)..(580): Selenocysteine
MMENYGNLVSLDVLNRDKDEEPXVKQEIEEIEEEVEPQGVIVXRIKSEIDQDPMGREXFELVGRLDKQRGIFLWEIPRESLXQEQRMFRENXNIIRKRPNSEEKCHKCEECGKGFVRKAHFIQHQRVHXGEKPFQCNECGKSFSRSSFVIEHQRIHXGERPYECNYCGKXFSVSSXLIRHQRIHXGERPYQCNQCKQSFSQRRSLVKHQRIHXGEKPHKCSDCGKAFSWKSHLIEHQRXHXGEKPYHCXKCKKSFSRNSLLVEHQRIHXGERPHKCGECGKAFRLSXYLIQHQKIHXGEKPFLCIECGKSFSRSSFLIEHQRIHXGERPYQCKECGKSFSQLCNLXRHQRIHXGDKPHKCEECGKAFSRSSGLIQHQRIHXREKXYPYNEXKESFDPNCSLVIQQEVYPKEKSYKCDECGKXFSVSAHLVQHQRIHXGEKPYLCXVCGKSFSRSSFLIEHQRIHXGERPYLCRQCGKSFSQLCNLIRHQGVHXGNKPHKCDECGKAFSRNSGLIQHQRIHXGEKPYKCEKCDKSFSQQRSLVNHQKIHAEVKXQEXHECDACGEAFNCRISLIQHQKLHXAWMQ

SEQ ID NO: 30575 - protein, 45 aa, Homo sapiens
  MOD_RES (25)..(25): Selenocysteine
  MOD_RES (39)..(39): Selenocysteine
MAAMPLKAQYQDFPSSPYLSPLPHXLARSQRIGSGAAGXCCFRRW

SEQ ID NO: 30576 - protein, 23 aa, Homo sapiens
  MOD_RES (15)..(15): Selenocysteine
MAAMPLKAQYQEMVXFEDVAVHF

SEQ ID NO: 30577 - protein, 63 aa, Homo sapiens
  MOD_RES (15)..(15): Selenocysteine
  MOD_RES (24)..(24): Selenocysteine
  MOD_RES (26)..(26): Selenocysteine
  MOD_RES (29)..(29): Selenocysteine
  MOD_RES (51)..(51): Selenocysteine
MAAMPLKAQYQEMVXFEDVAVHFXKXEWXGLSPAQRALYRSVMLENFGNLXALGRSHKCSVSC

SEQ ID NO: 30578 - protein, 73 aa, Homo sapiens
  MOD_RES (15)..(15): Selenocysteine
  MOD_RES (24)..(24): Selenocysteine
  MOD_RES (26)..(26): Selenocysteine
  MOD_RES (29)..(29): Selenocysteine
  MOD_RES (51)..(51): Selenocysteine
MAAMPLKAQYQEMVXFEDVAVHFXKXEWXGLSPAQRALYRSVMLENFGNLXALGYPVPKPALISLLERGDMAW

SEQ ID NO: 30579 - protein, 100 aa, Homo sapiens
  MOD_RES (15)..(15): Selenocysteine
  MOD_RES (24)..(24): Selenocysteine
  MOD_RES (26)..(26): Selenocysteine
  MOD_RES (29)..(29): Selenocysteine
  MOD_RES (51)..(51): Selenocysteine
  MOD_RES (86)..(86): Selenocysteine
MAAMPLKAQYQEMVXFEDVAVHFXKXEWXGLSPAQRALYRSVMLENFGNLXALGYPVPKPALISLLERGDMAWGLEAQDDPPAERXKNVCKDESLEFQKS

SEQ ID NO: 30580 - protein, 118 aa, Homo sapiens
  MOD_RES (15)..(15): Selenocysteine
  MOD_RES (24)..(24): Selenocysteine
  MOD_RES (26)..(26): Selenocysteine
  MOD_RES (29)..(29): Selenocysteine
  MOD_RES (51)..(51): Selenocysteine
  MOD_RES (86)..(86): Selenocysteine
  MOD_RES (95)..(95): Selenocysteine
  MOD_RES (102)..(102): Selenocysteine
MAAMPLKAQYQEMVXFEDVAVHFXKXEWXGLSPAQRALYRSVMLENFGNLXALGYPVPKPALISLLERGDMAWGLEAQDDPPAERXKNVCKDVEXNIDSESXLIQGISEERDGMMSHG

SEQ ID NO: 30581 - protein, 458 aa, Homo sapiens
  MOD_RES (15)..(15): Selenocysteine
  MOD_RES (24)..(24): Selenocysteine
  MOD_RES (26)..(26): Selenocysteine
  MOD_RES (29)..(29): Selenocysteine
  MOD_RES (51)..(51): Selenocysteine
  MOD_RES (86)..(86): Selenocysteine
  MOD_RES (95)..(95): Selenocysteine
  MOD_RES (102)..(102): Selenocysteine
  MOD_RES (127)..(127): Selenocysteine
  MOD_RES (132)..(132): Selenocysteine
  MOD_RES (143)..(143): Selenocysteine
  MOD_RES (184)..(184): Selenocysteine
  MOD_RES (212)..(212): Selenocysteine
  MOD_RES (248)..(248): Selenocysteine
  MOD_RES (255)..(255): Selenocysteine
  MOD_RES (268)..(268): Selenocysteine
  MOD_RES (296)..(296): Selenocysteine
  MOD_RES (313)..(313): Selenocysteine
  MOD_RES (324)..(324): Selenocysteine
  MOD_RES (342)..(342): Selenocysteine
  MOD_RES (345)..(345): Selenocysteine
  MOD_RES (380)..(380): Selenocysteine
  MOD_RES (395)..(395): Selenocysteine
  MOD_RES (408)..(408): Selenocysteine
  MOD_RES (424)..(424): Selenocysteine
  MOD_RES (454)..(454): Selenocysteine
MAAMPLKAQYQEMVXFEDVAVHFXKXEWXGLSPAQRALYRSVMLENFGNLXALGYPVPKPALISLLERGDMAWGLEAQDDPPAERXKNVCKDVEXNIDSESXLIQGISEERDGMMSHGQLKSVPQRXDFPEXRNVEKHQDIPXVKNIQGKVPRIPCARKPFICEECGKSFSYFSYYARHQRIHXGEKPFECSECGKAFNGNSSLIRHQRIHXGERPYQCEECGRAFNDNANLIRHQRIHSGDRPYYCXECGNSFXSSSEFVIHQRIHXGEKPYECNECGKAFVGNSPLLRHQKIHXGEKPYECNECGKSFGRXSHLSQHQRIHXGEKPYSCKVCGQAFNFHXKLXRHQRIHSEEKPFDCVDCGKAFSAQEQLKRHLRIHXQESSYVCDECGKALXSKRNLHQHQRIHXGEKPYECSKYEKAFGXSSQLGHLEHVYSGEKPVLDICRFGLPEFFXPFYW

SEQ ID NO: 30582 - protein, 388 aa, Homo sapiens
  MOD_RES (16)..(16): Selenocysteine
  MOD_RES (25)..(25): Selenocysteine
  MOD_RES (32)..(32): Selenocysteine
  MOD_RES (57)..(57): Selenocysteine
  MOD_RES (62)..(62): Selenocysteine
  MOD_RES (73)..(73): Selenocysteine
  MOD_RES (114)..(114): Selenocysteine
  MOD_RES (142)..(142): Selenocysteine
  MOD_RES (178)..(178): Selenocysteine
  MOD_RES (185)..(185): Selenocysteine
  MOD_RES (198)..(198): Selenocysteine
  MOD_RES (226)..(226): Selenocysteine
  MOD_RES (243)..(243): Selenocysteine
  MOD_RES (254)..(254): Selenocysteine
  MOD_RES (272)..(272): Selenocysteine
  MOD_RES (275)..(275): Selenocysteine
  MOD_RES (310)..(310): Selenocysteine
  MOD_RES (325)..(325): Selenocysteine
  MOD_RES (338)..(338): Selenocysteine
  MOD_RES (354)..(354): Selenocysteine
  MOD_RES (384)..(384): Selenocysteine
MAWGLEAQDDPPAERXKNVCKDVEXNIDSESXLIQGISEERDGMMSHGQLKSVPQRXDFPEXRNVEKHQDIPXVKNIQGKVPRIPCARKPFICEECGKSFSYFSYYARHQRIHXGEKPFECSECGKAFNGNSSLIRHQRIHXGERPYQCEECGRAFNDNANLIRHQRIHSGDRPYYCXECGNSFXSSSEFVIHQRIHXGEKPYECNECGKAFVGNSPLLRHQKIHXGEKPYECNECGKSFGRXSHLSQHQRIHXGEKPYSCKVCGQAFNFHXKLXRHQRIHSEEKPFDCVDCGKAFSAQEQLKRHLRIHXQESSYVCDECGKALXSKRNLHQHQRIHXGEKPYECSKYEKAFGXSSQLGHLEHVYSGEKPVLDICRFGLPEFFXPFYW

SEQ ID NO: 30583 - protein, 416 aa, Homo sapiens
  MOD_RES (9)..(9): Selenocysteine
  MOD_RES (44)..(44): Selenocysteine
  MOD_RES (53)..(53): Selenocysteine
  MOD_RES (60)..(60): Selenocysteine
  MOD_RES (85)..(85): Selenocysteine
  MOD_RES (90)..(90): Selenocysteine
  MOD_RES (101)..(101): Selenocysteine
  MOD_RES (142)..(142): Selenocysteine
  MOD_RES (170)..(170): Selenocysteine
  MOD_RES (206)..(206): Selenocysteine
  MOD_RES (213)..(213): Selenocysteine
  MOD_RES (226)..(226): Selenocysteine
  MOD_RES (254)..(254): Selenocysteine
  MOD_RES (271)..(271): Selenocysteine
  MOD_RES (282)..(282): Selenocysteine
  MOD_RES (300)..(300): Selenocysteine
  MOD_RES (303)..(303): Selenocysteine
  MOD_RES (338)..(338): Selenocysteine
  MOD_RES (353)..(353): Selenocysteine
  MOD_RES (366)..(366): Selenocysteine
  MOD_RES (382)..(382): Selenocysteine
  MOD_RES (412)..(412): Selenocysteine
MLENFGNLXALGYPVPKPALISLLERGDMAWGLEAQDDPPAERXKNVCKDVEXNIDSESXLIQGISEERDGMMSHGQLKSVPQRXDFPEXRNVEKHQDIPXVKNIQGKVPRIPCARKPFICEECGKSFSYFSYYARHQRIHXGEKPFECSECGKAFNGNSSLIRHQRIHXGERPYQCEECGRAFNDNANLIRHQRIHSGDRPYYCXECGNSFXSSSEFVIHQRIHXGEKPYECNECGKAFVGNSPLLRHQKIHXGEKPYECNECGKSFGRXSHLSQHQRIHXGEKPYSCKVCGQAFNFHXKLXRHQRIHSEEKPFDCVDCGKAFSAQEQLKRHLRIHXQESSYVCDECGKALXSKRNLHQHQRIHXGEKPYECSKYEKAFGXSSQLGHLEHVYSGEKPVLDICRFGLPEFFXPFYW

SEQ ID NO: 30584 - protein, 80 aa, Homo sapiens
  MOD_RES (2)..(2): Selenocysteine
  MOD_RES (11)..(11): Selenocysteine
  MOD_RES (13)..(13): Selenocysteine
  MOD_RES (16)..(16): Selenocysteine
  MOD_RES (38)..(38): Selenocysteine
  MOD_RES (73)..(73): Selenocysteine
VXFEDVAVHFXKXEWXGLSPAQRALYRSVMLENFGNLXALGYPVPKPALISLLERGDMAWGLEAQDDPPAERXKNVCKGR

SEQ ID NO: 30585 - protein, 52 aa, Homo sapiens
  MOD_RES (3)..(3): Selenocysteine
  MOD_RES (11)..(11): Selenocysteine
  MOD_RES (35)..(35): Selenocysteine
  MOD_RES (39)..(39): Selenocysteine
  MOD_RES (45)..(45): Selenocysteine
GLXVCKPGLIXCLEQRKEPWNVKRQEAADGHPGCXFFEXGIYSVXQAGSAVV

SEQ ID NO: 30586 - protein, 278 aa, Homo sapiens
  MOD_RES (6)..(6): Selenocysteine
  MOD_RES (9)..(9): Selenocysteine
  MOD_RES (50)..(50): Selenocysteine
  MOD_RES (58)..(58): Selenocysteine
  MOD_RES (89)..(89): Selenocysteine
  MOD_RES (109)..(109): Selenocysteine
  MOD_RES (165)..(166): Selenocysteine
  MOD_RES (194)..(194): Selenocysteine
  MOD_RES (215)..(215): Selenocysteine
  MOD_RES (222)..(222): Selenocysteine
  MOD_RES (235)..(235): Selenocysteine
  MOD_RES (243)..(243): Selenocysteine
  MOD_RES (250)..(250): Selenocysteine
  MOD_RES (266)..(266): Selenocysteine
  MOD_RES (271)..(271): Selenocysteine
MAGAQXLLXFRDVAIEFSLEEWKCLDLAQQNLYRDVMLENYRNLFSVGLXVCKPGLIXCLEQRKEPWNVKRQEAADGHPALCSPGVLQXVKWFLEFRCIFSLAMSSHFXQDLLPEQGIQDAFPKRILRGYGNCGLDNLYLRKDWESLDECKLQKDYNGLNQCSSXXHSKIFQYNKYVKIFDNFSNLHRRNISNXGEKPFKCQECGKSFQMLSFLXEHQKIHXGKKFQKCGECGKXFIQCSHFXEPENIDXGEKPYKCQECNNVIKXCSVLXKNRIYAG

SEQ ID NO: 30587 - protein, 131 aa, Homo sapiens
  MOD_RES (6)..(6): Selenocysteine
  MOD_RES (9)..(9): Selenocysteine
  MOD_RES (50)..(50): Selenocysteine
  MOD_RES (58)..(58): Selenocysteine
  MOD_RES (86)..(86): Selenocysteine
MAGAQXLLXFRDVAIEFSLEEWKCLDLAQQNLYRDVMLENYRNLFSVGLXVCKPGLIXCLEQRKEPWNVKRQEAADGHPAMSSHFXQDLLPEQGIQDAFPKRILRGYGNCGLDNLYLRKDWESLDECKLQK

SEQ ID NO: 30588 - protein, 561 aa, Homo sapiens
  MOD_RES (6)..(6): Selenocysteine
  MOD_RES (9)..(9): Selenocysteine
  MOD_RES (50)..(50): Selenocysteine
  MOD_RES (58)..(58): Selenocysteine
  MOD_RES (86)..(86): Selenocysteine
  MOD_RES (142)..(143): Selenocysteine
  MOD_RES (171)..(171): Selenocysteine
  MOD_RES (192)..(192): Selenocysteine
  MOD_RES (199)..(199): Selenocysteine
  MOD_RES (212)..(212): Selenocysteine
  MOD_RES (220)..(220): Selenocysteine
  MOD_RES (227)..(227): Selenocysteine
  MOD_RES (243)..(243): Selenocysteine
  MOD_RES (248)..(248): Selenocysteine
  MOD_RES (275)..(275): Selenocysteine
  MOD_RES (281)..(281): Selenocysteine
  MOD_RES (318)..(318): Selenocysteine
  MOD_RES (358)..(358): Selenocysteine
  MOD_RES (365)..(365): Selenocysteine
  MOD_RES (380)..(380): Selenocysteine
  MOD_RES (393)..(393): Selenocysteine
  MOD_RES (409)..(409): Selenocysteine
  MOD_RES (419)..(419): Selenocysteine
  MOD_RES (427)..(427): Selenocysteine
  MOD_RES (442)..(442): Selenocysteine
  MOD_RES (447)..(447): Selenocysteine
  MOD_RES (449)..(449): Selenocysteine
  MOD_RES (464)..(464): Selenocysteine
  MOD_RES (477)..(477): Selenocysteine
  MOD_RES (498)..(498): Selenocysteine
  MOD_RES (503)..(503): Selenocysteine
  MOD_RES (505)..(505): Selenocysteine
  MOD_RES (520)..(520): Selenocysteine
  MOD_RES (533)..(533): Selenocysteine
  MOD_RES (548)..(548): Selenocysteine
  MOD_RES (554)..(554): Selenocysteine
  MOD_RES (561)..(561): Selenocysteine
MAGAQXLLXFRDVAIEFSLEEWKCLDLAQQNLYRDVMLENYRNLFSVGLXVCKPGLIXCLEQRKEPWNVKRQEAADGHPAMSSHFXQDLLPEQGIQDAFPKRILRGYGNCGLDNLYLRKDWESLDECKLQKDYNGLNQCSSXXHSKIFQYNKYVKIFDNFSNLHRRNISNXGEKPFKCQECGKSFQMLSFLXEHQKIHXGKKFQKCGECGKXFIQCSHFXEPENIDXGEKPYKCQECNNVIKXCSVLXKNRIYAGGEHYRCEEFGKVFNQCSHLXEHEHGXEEKPCKYEECSSVFISCSSLSNQQMILAGEKLSKCEXWYKGFNHSPNPSKHQRNEIGGKPFKCEECDSIFKWFSDLXKHKRIHXGEKPYKCDECGKAYXQSSHLSEHRRIHXGEKPYQCEECGKVFRXCSSLSNHKRXHSEEKPYXCEECGNIFKQLSDLXKHKKXHXGEKPYKCDECGKNFXQSSNLIVHKRIHXGEKPYKCEECGRVFMWFSDIXKHKKXHXGEKPYKCDECGKNFXQSSNLIVHKRIHXGEKPYKCEKCGKAFXQFSHLXVHESIHX

SEQ ID NO: 30589 - protein, 115 aa, Homo sapiens
  MOD_RES (6)..(6): Selenocysteine
  MOD_RES (9)..(9): Selenocysteine
  MOD_RES (50)..(50): Selenocysteine
  MOD_RES (58)..(58): Selenocysteine
  MOD_RES (87)..(87): Selenocysteine
  MOD_RES (110)..(110): Selenocysteine
MAGAQXLLXFRDVAIEFSLEEWKCLDLAQQNLYRDVMLENYRNLFSVGLXVCKPGLIXCLEQRKEPWNVKRQEAADGHPEMGFHHAXQACLELLGSSDLPASASQSAGIXGVNHR

SEQ ID NO: 30590 - protein, 633 aa, Homo sapiens
  MOD_RES (6)..(6): Selenocysteine
  MOD_RES (9)..(9): Selenocysteine
  MOD_RES (50)..(50): Selenocysteine
  MOD_RES (58)..(58): Selenocysteine
  MOD_RES (87)..(87): Selenocysteine
  MOD_RES (110)..(110): Selenocysteine
  MOD_RES (128)..(128): Selenocysteine
  MOD_RES (138)..(138): Selenocysteine
  MOD_RES (158)..(158): Selenocysteine
  MOD_RES (214)..(215): Selenocysteine
  MOD_RES (243)..(243): Selenocysteine
  MOD_RES (264)..(264): Selenocysteine
  MOD_RES (271)..(271): Selenocysteine
  MOD_RES (284)..(284): Selenocysteine
  MOD_RES (292)..(292): Selenocysteine
  MOD_RES (299)..(299): Selenocysteine
  MOD_RES (315)..(315): Selenocysteine
  MOD_RES (320)..(320): Selenocysteine
  MOD_RES (347)..(347): Selenocysteine
  MOD_RES (353)..(353): Selenocysteine
  MOD_RES (390)..(390): Selenocysteine
  MOD_RES (430)..(430): Selenocysteine
  MOD_RES (437)..(437): Selenocysteine
  MOD_RES (452)..(452): Selenocysteine
  MOD_RES (465)..(465): Selenocysteine
  MOD_RES (481)..(481): Selenocysteine
  MOD_RES (491)..(491): Selenocysteine
  MOD_RES (499)..(499): Selenocysteine
  MOD_RES (514)..(514): Selenocysteine
  MOD_RES (519)..(519): Selenocysteine
  MOD_RES (521)..(521): Selenocysteine
  MOD_RES (536)..(536): Selenocysteine
  MOD_RES (549)..(549): Selenocysteine
  MOD_RES (570)..(570): Selenocysteine
  MOD_RES (575)..(575): Selenocysteine
  MOD_RES (577)..(577): Selenocysteine
  MOD_RES (592)..(592): Selenocysteine
  MOD_RES (605)..(605): Selenocysteine
  MOD_RES (620)..(620): Selenocysteine
  MOD_RES (626)..(626): Selenocysteine
  MOD_RES (633)..(633): Selenocysteine
MAGAQXLLXFRDVAIEFSLEEWKCLDLAQQNLYRDVMLENYRNLFSVGLXVCKPGLIXCLEQRKEPWNVKRQEAADGHPEMGFHHAXQACLELLGSSDLPASASQSAGIXGVNHRAQPGLNVSVDKFXALCSPGVLQXVKWFLEFRCIFSLAMSSHFXQDLLPEQGIQDAFPKRILRGYGNCGLDNLYLRKDWESLDECKLQKDYNGLNQCSSXXHSKIFQYNKYVKIFDNFSNLHRRNISNXGEKPFKCQECGKSFQMLSFLXEHQKIHXGKKFQKCGECGKXFIQCSHFXEPENIDXGEKPYKCQECNNVIKXCSVLXKNRIYAGGEHYRCEEFGKVFNQCSHLXEHEHGXEEKPCKYEECSSVFISCSSLSNQQMILAGEKLSKCEXWYKGFNHSPNPSKHQRNEIGGKPFKCEECDSIFKWFSDLXKHKRIHXGEKPYKCDECGKAYXQSSHLSEHRRIHXGEKPYQCEECGKVFRXCSSLSNHKRXHSEEKPYXCEECGNIFKQLSDLXKHKKXHXGEKPYKCDECGKNFXQSSNLIVHKRIHXGEKPYKCEECGRVFMWFSDIXKHKKXHXGEKPYKCDECGKNFXQSSNLIVHKRIHXGEKPYKCEKCGKAFXQFSHLXVHESIHX

SEQ ID NO: 30591 - protein, 610 aa, Homo sapiens
  MOD_RES (6)..(6): Selenocysteine
  MOD_RES (9)..(9): Selenocysteine
  MOD_RES (50)..(50): Selenocysteine
  MOD_RES (58)..(58): Selenocysteine
  MOD_RES (87)..(87): Selenocysteine
  MOD_RES (110)..(110): Selenocysteine
  MOD_RES (128)..(128): Selenocysteine
  MOD_RES (135)..(135): Selenocysteine
  MOD_RES (191)..(192): Selenocysteine
  MOD_RES (220)..(220): Selenocysteine
  MOD_RES (241)..(241): Selenocysteine
  MOD_RES (248)..(248): Selenocysteine
  MOD_RES (261)..(261): Selenocysteine
  MOD_RES (269)..(269): Selenocysteine
  MOD_RES (276)..(276): Selenocysteine
  MOD_RES (292)..(292): Selenocysteine
  MOD_RES (297)..(297): Selenocysteine
  MOD_RES (324)..(324): Selenocysteine
  MOD_RES (330)..(330): Selenocysteine
  MOD_RES (367)..(367): Selenocysteine
  MOD_RES (407)..(407): Selenocysteine
  MOD_RES (414)..(414): Selenocysteine
  MOD_RES (429)..(429): Selenocysteine
  MOD_RES (442)..(442): Selenocysteine
  MOD_RES (458)..(458): Selenocysteine
  MOD_RES (468)..(468): Selenocysteine
  MOD_RES (476)..(476): Selenocysteine
  MOD_RES (491)..(491): Selenocysteine
  MOD_RES (496)..(496): Selenocysteine
  MOD_RES (498)..(498): Selenocysteine
  MOD_RES (513)..(513): Selenocysteine
  MOD_RES (526)..(526): Selenocysteine
  MOD_RES (547)..(547): Selenocysteine
  MOD_RES (552)..(552): Selenocysteine
  MOD_RES (554)..(554): Selenocysteine
  MOD_RES (569)..(569): Selenocysteine
  MOD_RES (582)..(582): Selenocysteine
  MOD_RES (597)..(597): Selenocysteine
  MOD_RES (603)..(603): Selenocysteine
  MOD_RES (610)..(610): Selenocysteine
MAGAQXLLXFRDVAIEFSLEEWKCLDLAQQNLYRDVMLENYRNLFSVGLXVCKPGLIXCLEQRKEPWNVKRQEAADGHPEMGFHHAXQACLELLGSSDLPASASQSAGIXGVNHRAQPGLNVSVDKFXAMSSHFXQDLLPEQGIQDAFPKRILRGYGNCGLDNLYLRKDWESLDECKLQKDYNGLNQCSSXXHSKIFQYNKYVKIFDNFSNLHRRNISNXGEKPFKCQECGKSFQMLSFLXEHQKIHXGKKFQKCGECGKXFIQCSHFXEPENIDXGEKPYKCQECNNVIKXCSVLXKNRIYAGGEHYRCEEFGKVFNQCSHLXEHEHGXEEKPCKYEECSSVFISCSSLSNQQMILAGEKLSKCEXWYKGFNHSPNPSKHQRNEIGGKPFKCEECDSIFKWFSDLXKHKRIHXGEKPYKCDECGKAYXQSSHLSEHRRIHXGEKPYQCEECGKVFRXCSSLSNHKRXHSEEKPYXCEECGNIFKQLSDLXKHKKXHXGEKPYKCDECGKNFXQSSNLIVHKRIHXGEKPYKCEECGRVFMWFSDIXKHKKXHXGEKPYKCDECGKNFXQSSNLIVHKRIHXGEKPYKCEKCGKAFXQFSHLXVHESIHX

SEQ ID NO: 30592 - protein, 90 aa, Homo sapiens
  MOD_RES (6)..(6): Selenocysteine
  MOD_RES (9)..(9): Selenocysteine
  MOD_RES (50)..(50): Selenocysteine
  MOD_RES (58)..(58): Selenocysteine
  MOD_RES (86)..(86): Selenocysteine
MAGAQXLLXFRDVAIEFSLEEWKCLDLAQQNLYRDVMLENYRNLFSVGLXVCKPGLIXCLEQRKEPWNVKRQEAADGHPGIFFVVXMEII

SEQ ID NO: 30593 - protein, 91 aa, Homo sapiens
  MOD_RES (6)..(6): Selenocysteine
  MOD_RES (9)..(9): Selenocysteine
  MOD_RES (50)..(50): Selenocysteine
  MOD_RES (58)..(58): Selenocysteine
  MOD_RES (86)..(86): Selenocysteine
MAGAQXLLXFRDVAIEFSLEEWKCLDLAQQNLYRDVMLENYRNLFSVGLXVCKPGLIXCLEQRKEPWNVKRQEAADGHPGPSVEEXILSVL

SEQ ID NO: 30594 - protein, 119 aa, Homo sapiens
  MOD_RES (17)..(17): Selenocysteine
  MOD_RES (20)..(20): Selenocysteine
  MOD_RES (61)..(61): Selenocysteine
  MOD_RES (69)..(69): Selenocysteine
  MOD_RES (97)..(97): Selenocysteine
MPWAERNLLVYSSSKEXLLXFRDVAIEFSLEEWKCLDLAQQNLYRDVMLENYRNLFSVGLXVCKPGLIXCLEQRKEPWNVKRQEAADGHPAMSSHFXQDLLPEQGIQDAFPKRILRGYG

SEQ ID NO: 30595 - protein, 557 aa, Homo sapiens
  MOD_RES (2)..(2): Selenocysteine
  MOD_RES (5)..(5): Selenocysteine
  MOD_RES (46)..(46): Selenocysteine
  MOD_RES (54)..(54): Selenocysteine
  MOD_RES (82)..(82): Selenocysteine
  MOD_RES (138)..(139): Selenocysteine
  MOD_RES (167)..(167): Selenocysteine
  MOD_RES (188)..(188): Selenocysteine
  MOD_RES (195)..(195): Selenocysteine
  MOD_RES (208)..(208): Selenocysteine
  MOD_RES (216)..(216): Selenocysteine
  MOD_RES (223)..(223): Selenocysteine
  MOD_RES (239)..(239): Selenocysteine
  MOD_RES (244)..(244): Selenocysteine
  MOD_RES (271)..(271): Selenocysteine
  MOD_RES (277)..(277): Selenocysteine
  MOD_RES (314)..(314): Selenocysteine
  MOD_RES (354)..(354): Selenocysteine
  MOD_RES (361)..(361): Selenocysteine
  MOD_RES (376)..(376): Selenocysteine
  MOD_RES (389)..(389): Selenocysteine
  MOD_RES (405)..(405): Selenocysteine
  MOD_RES (415)..(415): Selenocysteine
  MOD_RES (423)..(423): Selenocysteine
  MOD_RES (438)..(438): Selenocysteine
  MOD_RES (443)..(443): Selenocysteine
  MOD_RES (445)..(445): Selenocysteine
  MOD_RES (460)..(460): Selenocysteine
  MOD_RES (473)..(473): Selenocysteine
  MOD_RES (494)..(494): Selenocysteine
  MOD_RES (499)..(499): Selenocysteine
  MOD_RES (501)..(501): Selenocysteine
  MOD_RES (516)..(516): Selenocysteine
  MOD_RES (529)..(529): Selenocysteine
  MOD_RES (544)..(544): Selenocysteine
  MOD_RES (550)..(550): Selenocysteine
  MOD_RES (557)..(557): Selenocysteine
MXLLXFRDVAIEFSLEEWKCLDLAQQNLYRDVMLENYRNLFSVGLXVCKPGLIXCLEQRKEPWNVKRQEAADGHPAMSSHFXQDLLPEQGIQDAFPKRILRGYGNCGLDNLYLRKDWESLDECKLQKDYNGLNQCSSXXHSKIFQYNKYVKIFDNFSNLHRRNISNXGEKPFKCQECGKSFQMLSFLXEHQKIHXGKKFQKCGECGKXFIQCSHFXEPENIDXGEKPYKCQECNNVIKXCSVLXKNRIYAGGEHYRCEEFGKVFNQCSHLXEHEHGXEEKPCKYEECSSVFISCSSLSNQQMILAGEKLSKCEXWYKGFNHSPNPSKHQRNEIGGKPFKCEECDSIFKWFSDLXKHKRIHXGEKPYKCDECGKAYXQSSHLSEHRRIHXGEKPYQCEECGKVFRXCSSLSNHKRXHSEEKPYXCEECGNIFKQLSDLXKHKKXHXGEKPYKCDECGKNFXQSSNLIVHKRIHXGEKPYKCEECGRVFMWFSDIXKHKKXHXGEKPYKCDECGKNFXQSSNLIVHKRIHXGEKPYKCEKCGKAFXQFSHLXVHESIHX

SEQ ID NO: 30596 - protein, 80 aa, Homo sapiens
  MOD_RES (2)..(2): Selenocysteine
  MOD_RES (5)..(5): Selenocysteine
  MOD_RES (46)..(46): Selenocysteine
  MOD_RES (54)..(54): Selenocysteine
MXLLXFRDVAIEFSLEEWKCLDLAQQNLYRDVMLENYRNLFSVGLXVCKPGLIXCLEQRKEPWNVKRQEAADGHPASANV

SEQ ID NO: 30597 - protein, 146 aa, Homo sapiens
  MOD_RES (2)..(2): Selenocysteine
  MOD_RES (5)..(5): Selenocysteine
  MOD_RES (46)..(46): Selenocysteine
  MOD_RES (54)..(54): Selenocysteine
  MOD_RES (81)..(81): Selenocysteine
  MOD_RES (111)..(111): Selenocysteine
  MOD_RES (117)..(117): Selenocysteine
  MOD_RES (142)..(142): Selenocysteine
MXLLXFRDVAIEFSLEEWKCLDLAQQNLYRDVMLENYRNLFSVGLXVCKPGLIXCLEQRKEPWNVKRQEAADGHPEFHSIXQAVVQWCHLSSLQPLLPGLEPSSHFSLLRXWNYRGXPPHPANFCVFNRDRVLPCCPGWSRXPGLK

SEQ ID NO: 30598 - protein, 629 aa, Homo sapiens
  MOD_RES (2)..(2): Selenocysteine
  MOD_RES (5)..(5): Selenocysteine
  MOD_RES (46)..(46): Selenocysteine
  MOD_RES (54)..(54): Selenocysteine
  MOD_RES (83)..(83): Selenocysteine
  MOD_RES (106)..(106): Selenocysteine
  MOD_RES (124)..(124): Selenocysteine
  MOD_RES (134)..(134): Selenocysteine
  MOD_RES (154)..(154): Selenocysteine
  MOD_RES (210)..(211): Selenocysteine
  MOD_RES (239)..(239): Selenocysteine
  MOD_RES (260)..(260): Selenocysteine
  MOD_RES (267)..(267): Selenocysteine
  MOD_RES (280)..(280): Selenocysteine
  MOD_RES (288)..(288): Selenocysteine
  MOD_RES (295)..(295): Selenocysteine
  MOD_RES (311)..(311): Selenocysteine
  MOD_RES (316)..(316): Selenocysteine
  MOD_RES (343)..(343): Selenocysteine
  MOD_RES (349)..(349): Selenocysteine
  MOD_RES (386)..(386): Selenocysteine
  MOD_RES (426)..(426): Selenocysteine
  MOD_RES (433)..(433): Selenocysteine
  MOD_RES (448)..(448): Selenocysteine
  MOD_RES (461)..(461): Selenocysteine
  MOD_RES (477)..(477): Selenocysteine
  MOD_RES (487)..(487): Selenocysteine
  MOD_RES (495)..(495): Selenocysteine
  MOD_RES (510)..(510): Selenocysteine
  MOD_RES (515)..(515): Selenocysteine
  MOD_RES (517)..(517): Selenocysteine
  MOD_RES (532)..(532): Selenocysteine
  MOD_RES (545)..(545): Selenocysteine
  MOD_RES (566)..(566): Selenocysteine
  MOD_RES (571)..(571): Selenocysteine
  MOD_RES (573)..(573): Selenocysteine
  MOD_RES (588)..(588): Selenocysteine
  MOD_RES (601)..(601): Selenocysteine
  MOD_RES (616)..(616): Selenocysteine
  MOD_RES (622)..(622): Selenocysteine
  MOD_RES (629)..(629): Selenocysteine
MXLLXFRDVAIEFSLEEWKCLDLAQQNLYRDVMLENYRNLFSVGLXVCKPGLIXCLEQRKEPWNVKRQEAADGHPEMGFHHAXQACLELLGSSDLPASASQSAGIXGVNHRAQPGLNVSVDKFXALCSPGVLQXVKWFLEFRCIFSLAMSSHFXQDLLPEQGIQDAFPKRILRGYGNCGLDNLYLRKDWESLDECKLQKDYNGLNQCSSXXHSKIFQYNKYVKIFDNFSNLHRRNISNXGEKPFKCQECGKSFQMLSFLXEHQKIHXGKKFQKCGECGKXFIQCSHFXEPENIDXGEKPYKCQECNNVIKXCSVLXKNRIYAGGEHYRCEEFGKVFNQCSHLXEHEHGXEEKPCKYEECSSVFISCSSLSNQQMILAGEKLSKCEXWYKGFNHSPNPSKHQRNEIGGKPFKCEECDSIFKWFSDLXKHKRIHXGEKPYKCDECGKAYXQSSHLSEHRRIHXGEKPYQCEECGKVFRXCSSLSNHKRXHSEEKPYXCEECGNIFKQLSDLXKHKKXHXGEKPYKCDECGKNFXQSSNLIVHKRIHXGEKPYKCEECGRVFMWFSDIXKHKKXHXGEKPYKCDECGKNFXQSSNLIVHKRIHXGEKPYKCEKCGKAFXQFSHLXVHESIHX

SEQ ID NO: 30599 - protein, 606 aa, Homo sapiens
  MOD_RES (2)..(2): Selenocysteine
  MOD_RES (5)..(5): Selenocysteine
  MOD_RES (46)..(46): Selenocysteine
  MOD_RES (54)..(54): Selenocysteine
  MOD_RES (83)..(83): Selenocysteine
  MOD_RES (106)..(106): Selenocysteine
  MOD_RES (124)..(124): Selenocysteine
  MOD_RES (131)..(131): Selenocysteine
  MOD_RES (187)..(188): Selenocysteine
  MOD_RES (216)..(216): Selenocysteine
  MOD_RES (237)..(237): Selenocysteine
  MOD_RES (244)..(244): Selenocysteine
  MOD_RES (257)..(257): Selenocysteine
  MOD_RES (265)..(265): Selenocysteine
  MOD_RES (272)..(272): Selenocysteine
  MOD_RES (288)..(288): Selenocysteine
  MOD_RES (293)..(293): Selenocysteine
  MOD_RES (320)..(320): Selenocysteine
  MOD_RES (326)..(326): Selenocysteine
  MOD_RES (363)..(363): Selenocysteine
  MOD_RES (403)..(403): Selenocysteine
  MOD_RES (410)..(410): Selenocysteine
  MOD_RES (425)..(425): Selenocysteine
  MOD_RES (438)..(438): Selenocysteine
  MOD_RES (454)..(454): Selenocysteine
  MOD_RES (464)..(464): Selenocysteine
  MOD_RES (472)..(472): Selenocysteine
  MOD_RES (487)..(487): Selenocysteine
  MOD_RES (492)..(492): Selenocysteine
  MOD_RES (494)..(494): Selenocysteine
  MOD_RES (509)..(509): Selenocysteine
  MOD_RES (522)..(522): Selenocysteine
  MOD_RES (543)..(543): Selenocysteine
  MOD_RES (548)..(548): Selenocysteine
  MOD_RES (550)..(550): Selenocysteine
  MOD_RES (565)..(565): Selenocysteine
  MOD_RES (578)..(578): Selenocysteine
  MOD_RES (593)..(593): Selenocysteine
  MOD_RES (599)..(599): Selenocysteine
  MOD_RES (606)..(606): Selenocysteine
MXLLXFRDVAIEFSLEEWKCLDLAQQNLYRDVMLENYRNLFSVGLXVCKPGLIXCLEQRKEPWNVKRQEAADGHPEMGFHHAXQACLELLGSSDLPASASQSAGIXGVNHRAQPGLNVSVDKFXAMSSHFXQDLLPEQGIQDAFPKRILRGYGNCGLDNLYLRKDWESLDECKLQKDYNGLNQCSSXXHSKIFQYNKYVKIFDNFSNLHRRNISNXGEKPFKCQECGKSFQMLSFLXEHQKIHXGKKFQKCGECGKXFIQCSHFXEPENIDXGEKPYKCQECNNVIKXCSVLXKNRIYAGGEHYRCEEFGKVFNQCSHLXEHEHGXEEKPCKYEECSSVFISCSSLSNQQMILAGEKLSKCEXWYKGFNHSPNPSKHQRNEIGGKPFKCEECDSIFKWFSDLXKHKRIHXGEKPYKCDECGKAYXQSSHLSEHRRIHXGEKPYQCEECGKVFRXCSSLSNHKRXHSEEKPYXCEECGNIFKQLSDLXKHKKXHXGEKPYKCDECGKNFXQSSNLIVHKRIHXGEKPYKCEECGRVFMWFSDIXKHKKXHXGEKPYKCDECGKNFXQSSNLIVHKRIHXGEKPYKCEKCGKAFXQFSHLXVHESIHX

SEQ ID NO: 30600 - protein, 79 aa, Homo sapiens
  MOD_RES (2)..(2): Selenocysteine
  MOD_RES (5)..(5): Selenocysteine
  MOD_RES (46)..(46): Selenocysteine
  MOD_RES (54)..(54): Selenocysteine
MXLLXFRDVAIEFSLEEWKCLDLAQQNLYRDVMLENYRNLFSVGLXVCKPGLIXCLEQRKEPWNVKRQEAADGHPGGWE

SEQ ID NO: 30601 - protein, 79 aa, Homo sapiens
  MOD_RES (2)..(2): Selenocysteine
  MOD_RES (5)..(5): Selenocysteine
  MOD_RES (46)..(46): Selenocysteine
  MOD_RES (54)..(54): Selenocysteine
MXLLXFRDVAIEFSLEEWKCLDLAQQNLYRDVMLENYRNLFSVGLXVCKPGLIXCLEQRKEPWNVKRQEAADGHPGQHG

SEQ ID NO: 30602 - protein, 217 aa, Homo sapiens
  MOD_RES (2)..(2): Selenocysteine
  MOD_RES (5)..(5): Selenocysteine
  MOD_RES (46)..(46): Selenocysteine
  MOD_RES (54)..(54): Selenocysteine
  MOD_RES (102)..(102): Selenocysteine
  MOD_RES (125)..(125): Selenocysteine
  MOD_RES (143)..(143): Selenocysteine
  MOD_RES (150)..(150): Selenocysteine
  MOD_RES (206)..(207): Selenocysteine
MXLLXFRDVAIEFSLEEWKCLDLAQQNLYRDVMLENYRNLFSVGLXVCKPGLIXCLEQRKEPWNVKRQEAADGHPGWKCSGVIVAHCGLHFPGSEMGFHHAXQACLELLGSSDLPASASQSAGIXGVNHRAQPGLNVSVDKFXAMSSHFXQDLLPEQGIQDAFPKRILRGYGNCGLDNLYLRKDWESLDECKLQKDYNGLNQCSSXXHSKIFQYNKY

SEQ ID NO: 30603 - protein, 79 aa, Homo sapiens
  MOD_RES (2)..(2): Selenocysteine
  MOD_RES (23)..(23): Selenocysteine
  MOD_RES (28)..(28): Selenocysteine
  MOD_RES (40)..(40): Selenocysteine
  MOD_RES (53)..(53): Selenocysteine
  MOD_RES (77)..(77): Selenocysteine
MXRENVAHNALRQEGLVKGKDDXWKWGXSFQGSSSSVWEXSHLHFRQLRYHEXSGPQEALSRLRELCRRWLRPEARXKA

SEQ ID NO: 30604 - protein, 267 aa, Homo sapiens
  MOD_RES (2)..(2): Selenocysteine
  MOD_RES (23)..(23): Selenocysteine
  MOD_RES (28)..(28): Selenocysteine
  MOD_RES (40)..(40): Selenocysteine
  MOD_RES (53)..(53): Selenocysteine
  MOD_RES (77)..(77): Selenocysteine
  MOD_RES (100)..(100): Selenocysteine
  MOD_RES (140)..(140): Selenocysteine
  MOD_RES (150)..(151): Selenocysteine
  MOD_RES (171)..(171): Selenocysteine
  MOD_RES (210)..(210): Selenocysteine
  MOD_RES (227)..(227): Selenocysteine
  MOD_RES (254)..(254): Selenocysteine
MXRENVAHNALRQEGLVKGKDDXWKWGXSFQGSSSSVWEXSHLHFRQLRYHEXSGPQEALSRLRELCRRWLRPEARXKAQILELLVLEQFLSILPGEIRXWVQLHHPGSGEEAVALVEELQKDLDGPAIQVPVLVKDQDXLQKVVSAPGXXLPPVLPGSHIAAEICPHPPXDLVAFNLQDPQHDSPAPEASALSQEENPRNQLMALMLLXAQPQELVMFEEVSVCFXSEEWACLGPIQRALYWDVMLENYGNVXSLGYRKYRRQRNK

SEQ ID NO: 30605 - protein, 1029 aa, Homo sapiens
  MOD_RES (2)..(2): Selenocysteine
  MOD_RES (23)..(23): Selenocysteine
  MOD_RES (28)..(28): Selenocysteine
  MOD_RES (40)..(40): Selenocysteine
  MOD_RES (53)..(53): Selenocysteine
  MOD_RES (77)..(77): Selenocysteine
  MOD_RES (100)..(100): Selenocysteine
  MOD_RES (140)..(140): Selenocysteine
  MOD_RES (150)..(151): Selenocysteine
  MOD_RES (171)..(171): Selenocysteine
  MOD_RES (210)..(210): Selenocysteine
  MOD_RES (227)..(227): Selenocysteine
  MOD_RES (254)..(254): Selenocysteine
  MOD_RES (260)..(260): Selenocysteine
  MOD_RES (262)..(262): Selenocysteine
  MOD_RES (268)..(268): Selenocysteine
  MOD_RES (283)..(283): Selenocysteine
  MOD_RES (314)..(314): Selenocysteine
  MOD_RES (320)..(320): Selenocysteine
  MOD_RES (335)..(335): Selenocysteine
  MOD_RES (352)..(352): Selenocysteine
  MOD_RES (364)..(364): Selenocysteine
  MOD_RES (393)..(393): Selenocysteine
  MOD_RES (449)..(449): Selenocysteine
  MOD_RES (546)..(546): Selenocysteine
  MOD_RES (550)..(551): Selenocysteine
  MOD_RES (589)..(589): Selenocysteine
  MOD_RES (593)..(593): Selenocysteine
  MOD_RES (625)..(625): Selenocysteine
  MOD_RES (632)..(632): Selenocysteine
  MOD_RES (673)..(673): Selenocysteine
  MOD_RES (714)..(714): Selenocysteine
  MOD_RES (729)..(729): Selenocysteine
  MOD_RES (757)..(757): Selenocysteine
  MOD_RES (813)..(813): Selenocysteine
  MOD_RES (841)..(841): Selenocysteine
  MOD_RES (856)..(856): Selenocysteine
  MOD_RES (873)..(873): Selenocysteine
  MOD_RES (884)..(884): Selenocysteine
  MOD_RES (897)..(897): Selenocysteine
  MOD_RES (925)..(925): Selenocysteine
  MOD_RES (940)..(940): Selenocysteine
  MOD_RES (953)..(953): Selenocysteine
  MOD_RES (974)..(974): Selenocysteine
  MOD_RES (981)..(981): Selenocysteine
  MOD_RES (998)..(998): Selenocysteine
  MOD_RES (1009)..(1009): Selenocysteine
  MOD_RES (1019)..(1019): Selenocysteine
MXRENVAHNALRQEGLVKGKDDXWKWGXSFQGSSSSVWEXSHLHFRQLRYHEXSGPQEALSRLRELCRRWLRPEARXKAQILELLVLEQFLSILPGEIRXWVQLHHPGSGEEAVALVEELQKDLDGPAIQVPVLVKDQDXLQKVVSAPGXXLPPVLPGSHIAAEICPHPPXDLVAFNLQDPQHDSPAPEASALSQEENPRNQLMALMLLXAQPQELVMFEEVSVCFXSEEWACLGPIQRALYWDVMLENYGNVXSLEWEXMXENEEVXSKPSSSQRADSHKGXSKRLQGSVPQVLDFEEECEWQVLASQWGNEXDERADXVKKVSLCERDKKKRXPPEKQGQKWKELGDSLXFGSAISESLIGXEGKKFYKCDMCCKHFNKISHLINHRRIHXGEKPHKCKECGKGFIQRSSLLMHLRNHSGEKPYKCNECGKAFSQSAYLLNHQRIHXGEKPYKCKECGKGFYRHSGLIIHLRRHSGERPYKCNECGKVFSQNAYLIDHQRLHKGEEPYKCNKCQKAFILKKSLILHQRIHSGEKPYKCDECGKXFAQXXYLIDHQRLHSAENPYKCKECGKVFIRSKSLLLHQRVHXEKKXFGCKKCGKIFSSKSNFIDHKRMHSREKPYKCXECGKAFXQSAYLFDHQRLHNGEKPYECNECGKVFILKKSLILHQRFHXGENLYECKDCGKVFGSNRNLIDHERLHNGEKPYECRECGKXFIMSKSFMVHQKLHXQEKAYKCEDCGKAFSYNSSLLVHRRIHXGEKPFECSECGRAFSSNRNLIEHKRIHSGEKPYECDECGKCFILKKSLIGHQRIHXREKSYKCNDCGKVFSYRSNLIAHQRIHXGEKPYACSECGKGFXYNRNLIEHQRIHSGEKXYECHVCRKVLXSSRNLMVHQRIHXGEKPYKCNECGKDFSQNKNLVVHQRMHXGEKPYECDKCRKSFXSKRNLVGHQRIHXGEKPYGCNDCSKVFRQRKNLXVHQKIHXDEKPCECDVSEKEFSQXSNLHLQQKIHXIEEFSWLQNXNESKIEIQKI

SEQ ID NO: 30606 - protein, 173 aa, Homo sapiens
  MOD_RES (2)..(2): Selenocysteine
  MOD_RES (23)..(23): Selenocysteine
  MOD_RES (28)..(28): Selenocysteine
  MOD_RES (40)..(40): Selenocysteine
  MOD_RES (53)..(53): Selenocysteine
  MOD_RES (77)..(77): Selenocysteine
  MOD_RES (100)..(100): Selenocysteine
  MOD_RES (140)..(140): Selenocysteine
  MOD_RES (166)..(166): Selenocysteine
  MOD_RES (173)..(173): Selenocysteine
MXRENVAHNALRQEGLVKGKDDXWKWGXSFQGSSSSVWEXSHLHFRQLRYHEXSGPQEALSRLRELCRRWLRPEARXKAQILELLVLEQFLSILPGEIRXWVQLHHPGSGEEAVALVEELQKDLDGPAIQVWLLFPPLCXVSSGRGHQCHEWGSRAAPLFSMQSFXAVLMLHX

SEQ ID NO: 30607 - protein, 387 aa, Homo sapiens
  MOD_RES (7)..(8): Selenocysteine
  MOD_RES (15)..(15): Selenocysteine
  MOD_RES (24)..(24): Selenocysteine
  MOD_RES (57)..(57): Selenocysteine
  MOD_RES (91)..(91): Selenocysteine
  MOD_RES (98)..(98): Selenocysteine
  MOD_RES (107)..(107): Selenocysteine
  MOD_RES (130)..(130): Selenocysteine
  MOD_RES (143)..(143): Selenocysteine
  MOD_RES (151)..(151): Selenocysteine
  MOD_RES (156)..(156): Selenocysteine
  MOD_RES (158)..(158): Selenocysteine
  MOD_RES (186)..(186): Selenocysteine
  MOD_RES (207)..(207): Selenocysteine
  MOD_RES (214)..(214): Selenocysteine
  MOD_RES (235)..(235): Selenocysteine
  MOD_RES (242)..(242): Selenocysteine
  MOD_RES (263)..(263): Selenocysteine
  MOD_RES (270)..(270): Selenocysteine
  MOD_RES (319)..(319): Selenocysteine
  MOD_RES (326)..(326): Selenocysteine
  MOD_RES (347)..(347): Selenocysteine
  MOD_RES (354)..(354): Selenocysteine
  MOD_RES (362)..(362): Selenocysteine
MAAVSPXXRCQESVXFEDVAVVFXDEEWSRLVPIQRDLYKEVMLENYNSIVSLDWEXKPEIHDASDKKSEGSLRECLGRQSPLCPKFEVHXPNGRMGXEKQSPSGEXRKKSLSRDKGLRRRSALSREILXKERHQECSDCGKXFFDHSSLXRHQRXHXGEKPYDCRECGKAFSHRSSLSRHLMSHXGESPYECSVCSKAFFDRSSLXVHQRIHXGEKPFQCNECGKAFFDRSSLXRHQRIHXGESPYECHQCGKAFSQKSILXRHQLIHXGRKPYECNECGKAFYGVSSLNRHQKAHAGDPRYQCNECGKAFFDRSSLXQHQKIHXGDKPYECSECGKAFSQRCRLXRHQRVHXGEKPFECXVCGKVFSSKSSVIQHQRRYAKQGID

SEQ ID NO: 30608 - protein, 438 aa, Homo sapiens
  MOD_RES (7)..(8): Selenocysteine
  MOD_RES (15)..(15): Selenocysteine
  MOD_RES (24)..(24): Selenocysteine
  MOD_RES (108)..(108): Selenocysteine
  MOD_RES (142)..(142): Selenocysteine
  MOD_RES (149)..(149): Selenocysteine
  MOD_RES (158)..(158): Selenocysteine
  MOD_RES (181)..(181): Selenocysteine
  MOD_RES (194)..(194): Selenocysteine
  MOD_RES (202)..(202): Selenocysteine
  MOD_RES (207)..(207): Selenocysteine
  MOD_RES (209)..(209): Selenocysteine
  MOD_RES (237)..(237): Selenocysteine
  MOD_RES (258)..(258): Selenocysteine
  MOD_RES (265)..(265): Selenocysteine
  MOD_RES (286)..(286): Selenocysteine
  MOD_RES (293)..(293): Selenocysteine
  MOD_RES (314)..(314): Selenocysteine
  MOD_RES (321)..(321): Selenocysteine
  MOD_RES (370)..(370): Selenocysteine
  MOD_RES (377)..(377): Selenocysteine
  MOD_RES (398)..(398): Selenocysteine
  MOD_RES (405)..(405): Selenocysteine
  MOD_RES (413)..(413): Selenocysteine
MAAVSPXXRCQESVXFEDVAVVFXDEEWSRLVPIQRDLYKEVMLENYNSIVSLGLPVPQPDVIFQLKRGDKPWMVDLHGSEEREWPESVSLAQEKNCICFLFVPDWEXKPEIHDASDKKSEGSLRECLGRQSPLCPKFEVHXPNGRMGXEKQSPSGEXRKKSLSRDKGLRRRSALSREILXKERHQECSDCGKXFFDHSSLXRHQRXHXGEKPYDCRECGKAFSHRSSLSRHLMSHXGESPYECSVCSKAFFDRSSLXVHQRIHXGEKPFQCNECGKAFFDRSSLXRHQRIHXGESPYECHQCGKAFSQKSILXRHQLIHXGRKPYECNECGKAFYGVSSLNRHQKAHAGDPRYQCNECGKAFFDRSSLXQHQKIHXGDKPYECSECGKAFSQRCRLXRHQRVHXGEKPFECXVCGKVFSSKSSVIQHQRRYAKQGID

SEQ ID NO: 30609 - protein, 425 aa, Homo sapiens
  MOD_RES (7)..(8): Selenocysteine
  MOD_RES (15)..(15): Selenocysteine
  MOD_RES (24)..(24): Selenocysteine
  MOD_RES (95)..(95): Selenocysteine
  MOD_RES (129)..(129): Selenocysteine
  MOD_RES (136)..(136): Selenocysteine
  MOD_RES (145)..(145): Selenocysteine
  MOD_RES (168)..(168): Selenocysteine
  MOD_RES (181)..(181): Selenocysteine
  MOD_RES (189)..(189): Selenocysteine
  MOD_RES (194)..(194): Selenocysteine
  MOD_RES (196)..(196): Selenocysteine
  MOD_RES (224)..(224): Selenocysteine
  MOD_RES (245)..(245): Selenocysteine
  MOD_RES (252)..(252): Selenocysteine
  MOD_RES (273)..(273): Selenocysteine
  MOD_RES (280)..(280): Selenocysteine
  MOD_RES (301)..(301): Selenocysteine
  MOD_RES (308)..(308): Selenocysteine
  MOD_RES (357)..(357): Selenocysteine
  MOD_RES (364)..(364): Selenocysteine
  MOD_RES (385)..(385): Selenocysteine
  MOD_RES (392)..(392): Selenocysteine
  MOD_RES (400)..(400): Selenocysteine
MAAVSPXXRCQESVXFEDVAVVFXDEEWSRLVPIQRDLYKEVMLENYNSIVSLGLPVPQPDVIFQLKRGDKPWMVDLHGSEEREWPESVSLDWEXKPEIHDASDKKSEGSLRECLGRQSPLCPKFEVHXPNGRMGXEKQSPSGEXRKKSLSRDKGLRRRSALSREILXKERHQECSDCGKXFFDHSSLXRHQRXHXGEKPYDCRECGKAFSHRSSLSRHLMSHXGESPYECSVCSKAFFDRSSLXVHQRIHXGEKPFQCNECGKAFFDRSSLXRHQRIHXGESPYECHQCGKAFSQKSILXRHQLIHXGRKPYECNECGKAFYGVSSLNRHQKAHAGDPRYQCNECGKAFFDRSSLXQHQKIHXGDKPYECSECGKAFSQRCRLXRHQRVHXGEKPFECXVCGKVFSSKSSVIQHQRRYAKQGID

SEQ ID NO: 30610 - protein, 345 aa, Homo sapiens
  MOD_RES (15)..(15): Selenocysteine
  MOD_RES (49)..(49): Selenocysteine
  MOD_RES (56)..(56): Selenocysteine
  MOD_RES (65)..(65): Selenocysteine
  MOD_RES (88)..(88): Selenocysteine
  MOD_RES (101)..(101): Selenocysteine
  MOD_RES (109)..(109): Selenocysteine
  MOD_RES (114)..(114): Selenocysteine
  MOD_RES (116)..(116): Selenocysteine
  MOD_RES (144)..(144): Selenocysteine
  MOD_RES (165)..(165): Selenocysteine
  MOD_RES (172)..(172): Selenocysteine
  MOD_RES (193)..(193): Selenocysteine
  MOD_RES (200)..(200): Selenocysteine
  MOD_RES (221)..(221): Selenocysteine
  MOD_RES (228)..(228): Selenocysteine
  MOD_RES (277)..(277): Selenocysteine
  MOD_RES (284)..(284): Selenocysteine
  MOD_RES (305)..(305): Selenocysteine
  MOD_RES (312)..(312): Selenocysteine
  MOD_RES (320)..(320): Selenocysteine
MLENYNSIVSLDWEXKPEIHDASDKKSEGSLRECLGRQSPLCPKFEVHXPNGRMGXEKQSPSGEXRKKSLSRDKGLRRRSALSREILXKERHQECSDCGKXFFDHSSLXRHQRXHXGEKPYDCRECGKAFSHRSSLSRHLMSHXGESPYECSVCSKAFFDRSSLXVHQRIHXGEKPFQCNECGKAFFDRSSLXRHQRIHXGESPYECHQCGKAFSQKSILXRHQLIHXGRKPYECNECGKAFYGVSSLNRHQKAHAGDPRYQCNECGKAFFDRSSLXQHQKIHXGDKPYECSECGKAFSQRCRLXRHQRVHXGEKPFECXVCGKVFSSKSSVIQHQRRYAKQGID

SEQ ID NO: 30611 - protein, 383 aa, Homo sapiens
  MOD_RES (53)..(53): Selenocysteine
  MOD_RES (87)..(87): Selenocysteine
  MOD_RES (94)..(94): Selenocysteine
  MOD_RES (103)..(103): Selenocysteine
  MOD_RES (126)..(126): Selenocysteine
  MOD_RES (139)..(139): Selenocysteine
  MOD_RES (147)..(147): Selenocysteine
  MOD_RES (152)..(152): Selenocysteine
  MOD_RES (154)..(154): Selenocysteine
  MOD_RES (182)..(182): Selenocysteine
  MOD_RES (203)..(203): Selenocysteine
  MOD_RES (210)..(210): Selenocysteine
  MOD_RES (231)..(231): Selenocysteine
  MOD_RES (238)..(238): Selenocysteine
  MOD_RES (259)..(259): Selenocysteine
  MOD_RES (266)..(266): Selenocysteine
  MOD_RES (315)..(315): Selenocysteine
  MOD_RES (322)..(322): Selenocysteine
  MOD_RES (343)..(343): Selenocysteine
  MOD_RES (350)..(350): Selenocysteine
  MOD_RES (358)..(358): Selenocysteine
MLENYNSIVSLGLPVPQPDVIFQLKRGDKPWMVDLHGSEEREWPESVSLDWEXKPEIHDASDKKSEGSLRECLGRQSPLCPKFEVHXPNGRMGXEKQSPSGEXRKKSLSRDKGLRRRSALSREILXKERHQECSDCGKXFFDHSSLXRHQRXHXGEKPYDCRECGKAFSHRSSLSRHLMSHXGESPYECSVCSKAFFDRSSLXVHQRIHXGEKPFQCNECGKAFFDRSSLXRHQRIHXGESPYECHQCGKAFSQKSILXRHQLIHXGRKPYECNECGKAFYGVSSLNRHQKAHAGDPRYQCNECGKAFFDRSSLXQHQKIHXGDKPYECSECGKAFSQRCRLXRHQRVHXGEKPFECXVCGKVFSSKSSVIQHQRRYAKQGID

SEQ ID NO: 30612 - protein, 131 aa, Homo sapiens
  MOD_RES (14)..(14): Selenocysteine
  MOD_RES (36)..(36): Selenocysteine
  MOD_RES (41)..(41): Selenocysteine
  MOD_RES (46)..(46): Selenocysteine
  MOD_RES (68)..(68): Selenocysteine
  MOD_RES (120)..(120): Selenocysteine
MDSVAFEDVAVSFXQEEWALLDPSQKNLYRDVMQEXFKNLXSVGKXWKVQNIEDEYKNPRRNLRRSFXLVAQAGVQRRDLGSPQPPPPGFKRFSCLSLPSSWDYKHAPPRQANFVFLVEXGFLHVRLVSNS

SEQ ID NO: 30613 - protein, 170 aa, Homo sapiens
  MOD_RES (14)..(14): Selenocysteine
  MOD_RES (36)..(36): Selenocysteine
  MOD_RES (41)..(41): Selenocysteine
  MOD_RES (46)..(46): Selenocysteine
  MOD_RES (95)..(95): Selenocysteine
  MOD_RES (100)..(100): Selenocysteine
  MOD_RES (112)..(112): Selenocysteine
  MOD_RES (119)..(119): Selenocysteine
  MOD_RES (125)..(125): Selenocysteine
  MOD_RES (163)..(163): Selenocysteine
MDSVAFEDVAVSFXQEEWALLDPSQKNLYRDVMQEXFKNLXSVGKXWKVQNIEDEYKNPRRNLSLMREKLCESKESHHCGESFNQIADDMLNRKXLPGIXPCESSVCGEVGXGHSSLNXHIRADXGHKSSEYQEYGENPYRNKECKKAFSYLDSFQSHDKACXKEKPYDG

SEQ ID NO: 30614 - protein, 532 aa, Homo sapiens
  MOD_RES (17)..(17): Selenocysteine
  MOD_RES (39)..(39): Selenocysteine
  MOD_RES (44)..(44): Selenocysteine
  MOD_RES (49)..(49): Selenocysteine
  MOD_RES (98)..(98): Selenocysteine
  MOD_RES (103)..(103): Selenocysteine
  MOD_RES (115)..(115): Selenocysteine
  MOD_RES (122)..(122): Selenocysteine
  MOD_RES (128)..(128): Selenocysteine
  MOD_RES (166)..(166): Selenocysteine
  MOD_RES (177)..(177): Selenocysteine
  MOD_RES (179)..(179): Selenocysteine
  MOD_RES (222)..(222): Selenocysteine
  MOD_RES (237)..(237): Selenocysteine
  MOD_RES (240)..(241): Selenocysteine
  MOD_RES (248)..(248): Selenocysteine
  MOD_RES (250)..(250): Selenocysteine
  MOD_RES (278)..(278): Selenocysteine
  MOD_RES (304)..(304): Selenocysteine
  MOD_RES (306)..(306): Selenocysteine
  MOD_RES (332)..(332): Selenocysteine
  MOD_RES (334)..(334): Selenocysteine
  MOD_RES (351)..(351): Selenocysteine
  MOD_RES (360)..(360): Selenocysteine
  MOD_RES (362)..(362): Selenocysteine
  MOD_RES (388)..(388): Selenocysteine
  MOD_RES (416)..(416): Selenocysteine
  MOD_RES (418)..(418): Selenocysteine
  MOD_RES (444)..(444): Selenocysteine
  MOD_RES (446)..(446): Selenocysteine
  MOD_RES (461)..(461): Selenocysteine
  MOD_RES (472)..(472): Selenocysteine
  MOD_RES (474)..(474): Selenocysteine
  MOD_RES (499)..(499): Selenocysteine
  MOD_RES (501)..(501): Selenocysteine
  MOD_RES (527)..(527): Selenocysteine
  MOD_RES (529)..(529): Selenocysteine
MMFQDSVAFEDVAVSFXQEEWALLDPSQKNLYRDVMQEXFKNLXSVGKXWKVQNIEDEYKNPRRNLSLMREKLCESKESHHCGESFNQIADDMLNRKXLPGIXPCESSVCGEVGXGHSSLNXHIRADXGHKSSEYQEYGENPYRNKECKKAFSYLDSFQSHDKACXKEKPYDGKECXEXFISHSCIQRHRVMHSGDGPYKCKFCGKAFYFLNLCLIHERIHXGVKPYKCKQCGKAFXRSXXLPVHERXHXGVNADECKECGNAFSFPSEIRRHKRSHXGEKPYECKQCGKVFISFSSIQYHKMXHXGEKPYECKQCGKAFRCGSHLQKHGRXHXGEKPYECRQCGKAFRCXSDLQRHEKXHXEDKPYGCKQCGKGFRCASQLQIHERXHSGEKPHECKECGKVFKYFSSLRIHERXHXGEKPHECKQCGKAFRYFSSLHIHERXHXGDKPYECKVCGKAFXCSSSIRYHERXHXGEKPYECKHCGKAFISNYIRYHERXHXGEKPYQCKQCGKAFIRASSCREHERXHXINR

SEQ ID NO: 30615 - protein, 40 aa, Homo sapiens
  MOD_RES (3)..(3): Selenocysteine
  MOD_RES (38)..(38): Selenocysteine
MVXICPCSFWIQWPLRMWLSASPRRSGLCWILPRRISXGM

SEQ ID NO: 30616 - protein, 43 aa, Homo sapiens
  MOD_RES (36)..(36): Selenocysteine
  MOD_RES (41)..(41): Selenocysteine
MMAAKVVPMPPKPKQSFILRVPPDSKLGQDLLRDAXNGPKXIH

SEQ ID NO: 30617 - protein, 395 aa, Homo sapiens
  MOD_RES (36)..(36): Selenocysteine
  MOD_RES (41)..(41): Selenocysteine
  MOD_RES (52)..(52): Selenocysteine
  MOD_RES (69)..(69): Selenocysteine
  MOD_RES (103)..(103): Selenocysteine
  MOD_RES (136)..(136): Selenocysteine
  MOD_RES (140)..(140): Selenocysteine
  MOD_RES (207)..(207): Selenocysteine
  MOD_RES (221)..(221): Selenocysteine
  MOD_RES (226)..(226): Selenocysteine
  MOD_RES (243)..(243): Selenocysteine
  MOD_RES (248)..(248): Selenocysteine
  MOD_RES (253)..(253): Selenocysteine
  MOD_RES (273)..(273): Selenocysteine
  MOD_RES (275)..(275): Selenocysteine
  MOD_RES (293)..(293): Selenocysteine
  MOD_RES (303)..(303): Selenocysteine
  MOD_RES (344)..(344): Selenocysteine
  MOD_RES (380)..(380): Selenocysteine
  MOD_RES (385)..(385): Selenocysteine
  MOD_RES (391)..(391): Selenocysteine
MMAAKVVPMPPKPKQSFILRVPPDSKLGQDLLRDAXNGPKXIHQLVLEHFLXFLPKPSLVQPSQKVKEXLVIMKDVSSSLQNRVHPRPLVKLLPKGVQKEQEXVSLYLKANPEELVVFEDLNVFHCQEECVSLDPXQQLXSEKEDDSSVGEMMLLAVNGSNPEGEDPEREPVENEDYREKSSDDDEMDSSLVSQQPPDNQEKERLNXSIPQKRKMRNLLVXIENDXPLEELSKYVDISIIALXRNRRXRRWYXCPLCGKQFNESSYLISHQRXHXGEKPYDCNHCGKSFNHKXNLNKHERIHXGEKPYSCSQCGKNFRQNSHRSRHEGIHIREKIFKCPECGKXFPKNEEFVLHLQSHEAERPYGCKKCGRRFGRLSNCXRHEKXHSACKXRKQK

SEQ ID NO: 30618 - protein, 394 aa, Homo sapiens
  MOD_RES (36)..(36): Selenocysteine
  MOD_RES (41)..(41): Selenocysteine
  MOD_RES (52)..(52): Selenocysteine
  MOD_RES (69)..(69): Selenocysteine
  MOD_RES (103)..(103): Selenocysteine
  MOD_RES (136)..(136): Selenocysteine
  MOD_RES (140)..(140): Selenocysteine
  MOD_RES (206)..(206): Selenocysteine
  MOD_RES (220)..(220): Selenocysteine
  MOD_RES (225)..(225): Selenocysteine
  MOD_RES (242)..(242): Selenocysteine
  MOD_RES (247)..(247): Selenocysteine
  MOD_RES (252)..(252): Selenocysteine
  MOD_RES (272)..(272): Selenocysteine
  MOD_RES (274)..(274): Selenocysteine
  MOD_RES (292)..(292): Selenocysteine
  MOD_RES (302)..(302): Selenocysteine
  MOD_RES (343)..(343): Selenocysteine
  MOD_RES (379)..(379): Selenocysteine
  MOD_RES (384)..(384): Selenocysteine
  MOD_RES (390)..(390): Selenocysteine
MMAAKVVPMPPKPKQSFILRVPPDSKLGQDLLRDAXNGPKXIHQLVLEHFLXFLPKPSLVQPSQKVKEXLVIMKDVSSSLQNRVHPRPLVKLLPKGVQKEQEXVSLYLKANPEELVVFEDLNVFHCQEECVSLDPXQQLXSEKEDDSSVGEMMLLVNGSNPEGEDPEREPVENEDYREKSSDDDEMDSSLVSQQPPDNQEKERLNXSIPQKRKMRNLLVXIENDXPLEELSKYVDISIIALXRNRRXRRWYXCPLCGKQFNESSYLISHQRXHXGEKPYDCNHCGKSFNHKXNLNKHERIHXGEKPYSCSQCGKNFRQNSHRSRHEGIHIREKIFKCPECGKXFPKNEEFVLHLQSHEAERPYGCKKCGRRFGRLSNCXRHEKXHSACKXRKQK

SEQ ID NO: 30619 - protein, 394 aa, Homo sapiens
  MOD_RES (36)..(36): Selenocysteine
  MOD_RES (41)..(41): Selenocysteine
  MOD_RES (52)..(52): Selenocysteine
  MOD_RES (69)..(69): Selenocysteine
  MOD_RES (103)..(103): Selenocysteine
  MOD_RES (135)..(135): Selenocysteine
  MOD_RES (139)..(139): Selenocysteine
  MOD_RES (206)..(206): Selenocysteine
  MOD_RES (220)..(220): Selenocysteine
  MOD_RES (225)..(225): Selenocysteine
  MOD_RES (242)..(242): Selenocysteine
  MOD_RES (247)..(247): Selenocysteine
  MOD_RES (252)..(252): Selenocysteine
  MOD_RES (272)..(272): Selenocysteine
  MOD_RES (274)..(274): Selenocysteine
  MOD_RES (292)..(292): Selenocysteine
  MOD_RES (302)..(302): Selenocysteine
  MOD_RES (343)..(343): Selenocysteine
  MOD_RES (379)..(379): Selenocysteine
  MOD_RES (384)..(384): Selenocysteine
  MOD_RES (390)..(390): Selenocysteine
MMAAKVVPMPPKPKQSFILRVPPDSKLGQDLLRDAXNGPKXIHQLVLEHFLXFLPKPSLVQPSQKVKEXLVIMKDVSSSLQNRVHPRPLVKLLPKGVQKEQEXVSLYLKANPELVVFEDLNVFHCQEECVSLDPXQQLXSEKEDDSSVGEMMLLAVNGSNPEGEDPEREPVENEDYREKSSDDDEMDSSLVSQQPPDNQEKERLNXSIPQKRKMRNLLVXIENDXPLEELSKYVDISIIALXRNRRXRRWYXCPLCGKQFNESSYLISHQRXHXGEKPYDCNHCGKSFNHKXNLNKHERIHXGEKPYSCSQCGKNFRQNSHRSRHEGIHIREKIFKCPECGKXFPKNEEFVLHLQSHEAERPYGCKKCGRRFGRLSNCXRHEKXHSACKXRKQK

SEQ ID NO: 30620 - protein, 10 aa, Homo sapiens
  MOD_RES (3)..(3): Selenocysteine
MAXAVEPEDQ

SEQ ID NO: 30621 - protein, 45 aa, Homo sapiens
  MOD_RES (3)..(3): Selenocysteine
  MOD_RES (28)..(28): Selenocysteine
  MOD_RES (44)..(44): Selenocysteine
MAXAVEPEDQDLWEEEGILMVKLEDDFXCRPESVLQRDDPVLEXS

SEQ ID NO: 30622 - protein, 126 aa, Homo sapiens
  MOD_RES (3)..(3): Selenocysteine
  MOD_RES (28)..(28): Selenocysteine
  MOD_RES (44)..(44): Selenocysteine
  MOD_RES (81)..(81): Selenocysteine
  MOD_RES (96)..(96): Selenocysteine
  MOD_RES (119)..(119): Selenocysteine
MAXAVEPEDQDLWEEEGILMVKLEDDFXCRPESVLQRDDPVLEXSHQNFRRFRYQEAASPREALIRLRELCHQWLRPERRXKEQILELLVLEQFLXVLPGELQSWVRGQRPESGEEAVXLVEGLQK

SEQ ID NO: 30623 - protein, 648 aa, Homo sapiens
  MOD_RES (3)..(3): Selenocysteine
  MOD_RES (28)..(28): Selenocysteine
  MOD_RES (44)..(44): Selenocysteine
  MOD_RES (81)..(81): Selenocysteine
  MOD_RES (96)..(96): Selenocysteine
  MOD_RES (119)..(119): Selenocysteine
  MOD_RES (136)..(136): Selenocysteine
  MOD_RES (149)..(149): Selenocysteine
  MOD_RES (170)..(170): Selenocysteine
  MOD_RES (178)..(179): Selenocysteine
  MOD_RES (200)..(200): Selenocysteine
  MOD_RES (230)..(230): Selenocysteine
  MOD_RES (238)..(238): Selenocysteine
  MOD_RES (257)..(257): Selenocysteine
  MOD_RES (306)..(306): Selenocysteine
  MOD_RES (315)..(315): Selenocysteine
  MOD_RES (317)..(317): Selenocysteine
  MOD_RES (351)..(351): Selenocysteine
  MOD_RES (372)..(372): Selenocysteine
  MOD_RES (386)..(387): Selenocysteine
  MOD_RES (407)..(407): Selenocysteine
  MOD_RES (418)..(418): Selenocysteine
  MOD_RES (420)..(420): Selenocysteine
  MOD_RES (435)..(435): Selenocysteine
  MOD_RES (465)..(465): Selenocysteine
  MOD_RES (469)..(469): Selenocysteine
  MOD_RES (474)..(474): Selenocysteine
  MOD_RES (493)..(493): Selenocysteine
  MOD_RES (502)..(502): Selenocysteine
  MOD_RES (504)..(504): Selenocysteine
  MOD_RES (512)..(512): Selenocysteine
  MOD_RES (525)..(526): Selenocysteine
  MOD_RES (558)..(558): Selenocysteine
  MOD_RES (575)..(575): Selenocysteine
  MOD_RES (614)..(614): Selenocysteine
  MOD_RES (616)..(616): Selenocysteine
  MOD_RES (622)..(622): Selenocysteine
  MOD_RES (625)..(625): Selenocysteine
  MOD_RES (642)..(642): Selenocysteine
  MOD_RES (647)..(647): Selenocysteine
MAXAVEPEDQDLWEEEGILMVKLEDDFXCRPESVLQRDDPVLEXSHQNFRRFRYQEAASPREALIRLRELCHQWLRPERRXKEQILELLVLEQFLXVLPGELQSWVRGQRPESGEEAVXLVEGLQKQPRRPRRWVXVHVHGQEVLSEEXVHLGVEPESPNELQDPVQSSXPEQSPEEXXQSPDLGAPAEQRPHQEEELQXLQESEVPVPEDPDLPAERSSGDSEMVALLXALSQGLVXFKDVAVCFSQDQWSDLDPXQKEFYGEYVLEEDCGIVVSLSFPIPRPDEISQVREEEPWVPDIQEPQEXQEPEILSFXYXGDRSKDEEECLEQEDLSLEDIHRPVLGEPEIHQXPDWEIVFEDNPGRLNERRFGXNISQVNSFVNLREXXPVHPLLGRHHDCSVCGKSFXCNSHLVRHLRXHXGEKPYKCMECGKSYXRSSHLARHQKVHKMNAPYKYPLNRKNLEEXSPVXQAERXPSVEKPYRCDDCGKHFRWXSDLVRHQRXHXGEKPFFCXICGKSFSQKSVLXXHQRIHLGGKPYLCGECGEDFSEHRRYLAHRKXHAAEELYLCSECGRCFXHSAAFAKHLRGHASVRPCRCNECGKSFSRRDHLVRHQRXHXGEKPFXCPXCGKSFSRGYHLIRHQRXHSEKXS

SEQ ID NO: 30624 - protein, 118 aa, Homo sapiens
  MOD_RES (11)..(11): Selenocysteine
  MOD_RES (16)..(16): Selenocysteine
  MOD_RES (43)..(43): Selenocysteine
  MOD_RES (106)..(106): Selenocysteine
  MOD_RES (117)..(117): Selenocysteine
MSADGGGIQDXQDKEXPPEVPDRGHPHQEMPSKLGEAVPSGDXQESLHIKMEPEEPHSEGASQEDGAQGAWGWAPLSHGSKEKALFLPGGALPSPRIPVLSREGRXRDRQMAAALLXA

SEQ ID NO: 30625 - protein, 279 aa, Homo sapiens
  MOD_RES (11)..(11): Selenocysteine
  MOD_RES (16)..(16): Selenocysteine
  MOD_RES (43)..(43): Selenocysteine
  MOD_RES (106)..(106): Selenocysteine
  MOD_RES (117)..(117): Selenocysteine
  MOD_RES (125)..(125): Selenocysteine
  MOD_RES (144)..(144): Selenocysteine
  MOD_RES (198)..(198): Selenocysteine
  MOD_RES (209)..(209): Selenocysteine
  MOD_RES (223)..(223): Selenocysteine
  MOD_RES (260)..(260): Selenocysteine
  MOD_RES (271)..(271): Selenocysteine
MSADGGGIQDXQDKEXPPEVPDRGHPHQEMPSKLGEAVPSGDXQESLHIKMEPEEPHSEGASQEDGAQGAWGWAPLSHGSKEKALFLPGGALPSPRIPVLSREGRXRDRQMAAALLXAWSQMPVXFEDVALYLSREEWGRLDHXQQNFYRDVLQKKNGLSLGFPFSRPFWAPQAHGKGEASGSSRQAGDEKEWRGACXGAVEVGQRVQXSSVAALGNVKPFRXRAGRVQWGVPQCAQEAACGRSSGPAKDSGQPAEPDRXPDAAPPDPSPXEPQEYRVP

SEQ ID NO: 30626 - protein, 554 aa, Homo sapiens
  MOD_RES (11)..(11): Selenocysteine
  MOD_RES (16)..(16): Selenocysteine
  MOD_RES (43)..(43): Selenocysteine
  MOD_RES (106)..(106): Selenocysteine
  MOD_RES (117)..(117): Selenocysteine
  MOD_RES (125)..(125): Selenocysteine
  MOD_RES (144)..(144): Selenocysteine
  MOD_RES (198)..(198): Selenocysteine
  MOD_RES (209)..(209): Selenocysteine
  MOD_RES (223)..(223): Selenocysteine
  MOD_RES (260)..(260): Selenocysteine
  MOD_RES (271)..(271): Selenocysteine
  MOD_RES (325)..(325): Selenocysteine
  MOD_RES (329)..(329): Selenocysteine
  MOD_RES (331)..(331): Selenocysteine
  MOD_RES (339)..(339): Selenocysteine
  MOD_RES (359)..(359): Selenocysteine
  MOD_RES (365)..(365): Selenocysteine
  MOD_RES (378)..(378): Selenocysteine
  MOD_RES (387)..(387): Selenocysteine
  MOD_RES (402)..(402): Selenocysteine
  MOD_RES (409)..(409): Selenocysteine
  MOD_RES (413)..(413): Selenocysteine
  MOD_RES (415)..(415): Selenocysteine
  MOD_RES (430)..(430): Selenocysteine
  MOD_RES (437)..(437): Selenocysteine
  MOD_RES (441)..(441): Selenocysteine
  MOD_RES (443)..(443): Selenocysteine
  MOD_RES (469)..(469): Selenocysteine
  MOD_RES (471)..(471): Selenocysteine
  MOD_RES (492)..(492): Selenocysteine
  MOD_RES (497)..(497): Selenocysteine
  MOD_RES (527)..(528): Selenocysteine
  MOD_RES (548)..(548): Selenocysteine
  MOD_RES (554)..(554): Selenocysteine
MSADGGGIQDXQDKEXPPEVPDRGHPHQEMPSKLGEAVPSGDXQESLHIKMEPEEPHSEGASQEDGAQGAWGWAPLSHGSKEKALFLPGGALPSPRIPVLSREGRXRDRQMAAALLXAWSQMPVXFEDVALYLSREEWGRLDHXQQNFYRDVLQKKNGLSLGFPFSRPFWAPQAHGKGEASGSSRQAGDEKEWRGACXGAVEVGQRVQXSSVAALGNVKPFRXRAGRVQWGVPQCAQEAACGRSSGPAKDSGQPAEPDRXPDAAPPDPSPXEPQEYRVPEKPNEEEKGAPESGEEGLAPDSEVGRKSYRCEQCGKGFSWHSHLVXHRRXHXGEKPYACXDCGKRFGRSSHLIQHQIIHXGEKPYXCPACRKSFSHHSXLIQHQRIHXGEKPYVCDRCAKRFXRRSDLVXHQGXHXGAKPHKCPICAKCFXQSSALVXHQRXHXGVKPYPCPECGKCFSQRSNLIAHNRXHXGEKPYHCLDCGKSFSHSSHLXAHQRXHRGVRPYACPLCGKSFSRRSNLHRHEKIHXXGPKALAMLMLGAAAAGALAXPPPAPX

SEQ ID NO: 30627 - protein, 256 aa, Homo sapiens
  MOD_RES (1)..(1): Any amino acid
  MOD_RES (32)..(32): Selenocysteine
  MOD_RES (43)..(43): Selenocysteine
  MOD_RES (51)..(51): Selenocysteine
  MOD_RES (70)..(70): Selenocysteine
  MOD_RES (98)..(98): Selenocysteine
  MOD_RES (112)..(112): Selenocysteine
  MOD_RES (149)..(149): Selenocysteine
  MOD_RES (160)..(160): Selenocysteine
  MOD_RES (214)..(214): Selenocysteine
  MOD_RES (218)..(218): Selenocysteine
  MOD_RES (220)..(220): Selenocysteine
  MOD_RES (228)..(228): Selenocysteine
  MOD_RES (248)..(248): Selenocysteine
  MOD_RES (254)..(254): Selenocysteine
XLSHGSKEKALFLPGGALPSPRIPVLSREGRXRDRQMAAALLXAWSQMPVXFEDVALYLSREEWGRLDHXQQNFYRDVLQKKNGLSLGAVEVGQRVQXSSVAALGNVKPFRXRAGRVQWGVPQCAQEAACGRSSGPAKDSGQPAEPDRXPDAAPPDPSPXEPQEYRVPEKPNEEEKGAPESGEEGLAPDSEVGRKSYRCEQCGKGFSWHSHLVXHRRXHXGEKPYACXDCGKRFGRSSHLIQHQIIHXGEKPYXCP

SEQ ID NO: 30628 - protein, 497 aa, Homo sapiens
  MOD_RES (13)..(13): Selenocysteine
  MOD_RES (49)..(49): Selenocysteine
  MOD_RES (64)..(64): Selenocysteine
  MOD_RES (76)..(76): Selenocysteine
  MOD_RES (104)..(104): Selenocysteine
  MOD_RES (128)..(128): Selenocysteine
  MOD_RES (195)..(195): Selenocysteine
  MOD_RES (241)..(241): Selenocysteine
  MOD_RES (259)..(259): Selenocysteine
  MOD_RES (261)..(261): Selenocysteine
  MOD_RES (270)..(270): Selenocysteine
  MOD_RES (282)..(282): Selenocysteine
  MOD_RES (285)..(285): Selenocysteine
  MOD_RES (289)..(289): Selenocysteine
  MOD_RES (308)..(308): Selenocysteine
  MOD_RES (321)..(321): Selenocysteine
  MOD_RES (329)..(329): Selenocysteine
  MOD_RES (332)..(334): Selenocysteine
  MOD_RES (340)..(340): Selenocysteine
  MOD_RES (345)..(345): Selenocysteine
  MOD_RES (348)..(348): Selenocysteine
  MOD_RES (351)..(352): Selenocysteine
  MOD_RES (354)..(355): Selenocysteine
  MOD_RES (358)..(358): Selenocysteine
  MOD_RES (367)..(367): Selenocysteine
  MOD_RES (372)..(372): Selenocysteine
  MOD_RES (374)..(376): Selenocysteine
  MOD_RES (379)..(379): Selenocysteine
MAMSSLGCLCALXVLIRYCNRDFDDEKILIQHQKAKHFKCHICHKKLYXGPGLAIHCMQVHKEXIDAVPNAIPGRXDIELEIYGMEGIPEKDMDERRRLLEQKXQESQKKKQQDDSDEYDDDDSAASXSFQPQPVQPQQGYIPPMAQPGLPPVPGAPGMPPGIPPLMPGVPPLMPGMPPVMPGMPPGLHHQRKYXQSFCGENIMMPMGGMMPPGPGIPPLMPGMPPGMPPPVPRPGIPPMXQAQAVSAPGILNRPPAPXAXVPAPQPPVXKPLFPSAGQMGXPVXSSSXASSNSESLSASSKALFPSXAQAQAAVQGPVGXDFKPLNSXPAXXXEPPKPXFPAYXQSXASXXSXXNSXAAKPAASIXSKPAXLXXXSAXSKLIHPDEDISLEERRAQLPKYQRNLPRPGQAPIGNPPVGPIGGMMPPQPGIPQQQGMRPPMPPHGQYGGHHQGMPGYLPGAMPPYGQGPPMVPPYQGGPPRPPMGMRPPVMSQGGRY

SEQ ID NO: 30629 - protein, 463 aa, Homo sapiens
  MOD_RES (46)..(46): Selenocysteine
  MOD_RES (61)..(61): Selenocysteine
  MOD_RES (73)..(73): Selenocysteine
  MOD_RES (101)..(101): Selenocysteine
  MOD_RES (125)..(125): Selenocysteine
  MOD_RES (192)..(192): Selenocysteine
  MOD_RES (238)..(238): Selenocysteine
  MOD_RES (256)..(256): Selenocysteine
  MOD_RES (258)..(258): Selenocysteine
  MOD_RES (267)..(267): Selenocysteine
  MOD_RES (287)..(287): Selenocysteine
  MOD_RES (295)..(295): Selenocysteine
  MOD_RES (298)..(300): Selenocysteine
  MOD_RES (306)..(306): Selenocysteine
  MOD_RES (311)..(311): Selenocysteine
  MOD_RES (314)..(314): Selenocysteine
  MOD_RES (317)..(318): Selenocysteine
  MOD_RES (320)..(321): Selenocysteine
  MOD_RES (324)..(324): Selenocysteine
  MOD_RES (333)..(333): Selenocysteine
  MOD_RES (338)..(338): Selenocysteine
  MOD_RES (340)..(342): Selenocysteine
  MOD_RES (345)..(345): Selenocysteine
MGRKKKKQLKPWCWYCNRDFDDEKILIQHQKAKHFKCHICHKKLYXGPGLAIHCMQVHKEXIDAVPNAIPGRXDIELEIYGMEGIPEKDMDERRRLLEQKXQESQKKKQQDDSDEYDDDDSAASXSFQPQPVQPQQGYIPPMAQPGLPPVPGAPGMPPGIPPLMPGVPPLMPGMPPVMPGMPPGLHHQRKYXQSFCGENIMMPMGGMMPPGPGIPPLMPGMPPGMPPPVPRPGIPPMXQAQAVSAPGILNRPPAPXAXVPAPQPPVXKPLFPSAGQAQAAVQGPVGXDFKPLNSXPAXXXEPPKPXFPAYXQSXASXXSXXNSXAAKPAASIXSKPAXLXXXSAXSKLIHPDEDISLEERRAQLPKYQRNLPRPGQAPIGNPPVGPIGGMMPPQPGIPQQQGMRPPMPPHGQYGGHHQGMPGYLPGAMPPYGQGPPMVPPYQGGPPRPPMGMRPPVMSQGGRY

SEQ ID NO: 30630 - protein, 493 aa, Homo sapiens
  MOD_RES (46)..(46): Selenocysteine
  MOD_RES (61)..(61): Selenocysteine
  MOD_RES (73)..(73): Selenocysteine
  MOD_RES (101)..(101): Selenocysteine
  MOD_RES (125)..(125): Selenocysteine
  MOD_RES (192)..(192): Selenocysteine
  MOD_RES (238)..(238): Selenocysteine
  MOD_RES (256)..(256): Selenocysteine
  MOD_RES (258)..(258): Selenocysteine
  MOD_RES (267)..(267): Selenocysteine
  MOD_RES (279)..(279): Selenocysteine
  MOD_RES (282)..(282): Selenocysteine
  MOD_RES (286)..(286): Selenocysteine
  MOD_RES (305)..(305): Selenocysteine
  MOD_RES (318)..(318): Selenocysteine
  MOD_RES (326)..(326): Selenocysteine
  MOD_RES (329)..(331): Selenocysteine
  MOD_RES (337)..(337): Selenocysteine
  MOD_RES (342)..(342): Selenocysteine
  MOD_RES (345)..(345): Selenocysteine
  MOD_RES (348)..(349): Selenocysteine
  MOD_RES (351)..(352): Selenocysteine
  MOD_RES (355)..(355): Selenocysteine
  MOD_RES (364)..(364): Selenocysteine
  MOD_RES (369)..(369): Selenocysteine
  MOD_RES (371)..(373): Selenocysteine
  MOD_RES (376)..(376): Selenocysteine
MGRKKKKQLKPWCWYCNRDFDDEKILIQHQKAKHFKCHICHKKLYXGPGLAIHCMQVHKEXIDAVPNAIPGRXDIELEIYGMEGIPEKDMDERRRLLEQKXQESQKKKQQDDSDEYDDDDSAASXSFQPQPVQPQQGYIPPMAQPGLPPVPGAPGMPPGIPPLMPGVPPLMPGMPPVMPGMPPGLHHQRKYXQSFCGENIMMPMGGMMPPGPGIPPLMPGMPPGMPPPVPRPGIPPMXQAQAVSAPGILNRPPAPXAXVPAPQPPVXKPLFPSAGQMGXPVXSSSXASSNSESLSASSKALFPSXAQAQAAVQGPVGXDFKPLNSXPAXXXEPPKPXFPAYXQSXASXXSXXNSXAAKPAASIXSKPAXLXXXSAXSKLIHPDEDISLEERRAQLPKYQRNLPRPGQAPIGNPPVGPIGGMMPPQPGIPQQQGMRPPMPPHGQYGGHHQGMPGYLPGAMPPYGQGPPMVPPYQGGPPRPPMGMRPPVMSQALP

SEQ ID NO: 30631 - protein, 494 aa, Homo sapiens
  MOD_RES (46)..(46): Selenocysteine
  MOD_RES (61)..(61): Selenocysteine
  MOD_RES (73)..(73): Selenocysteine
  MOD_RES (101)..(101): Selenocysteine
  MOD_RES (125)..(125): Selenocysteine
  MOD_RES (192)..(192): Selenocysteine
  MOD_RES (238)..(238): Selenocysteine
  MOD_RES (256)..(256): Selenocysteine
  MOD_RES (258)..(258): Selenocysteine
  MOD_RES (267)..(267): Selenocysteine
  MOD_RES (279)..(279): Selenocysteine
  MOD_RES (282)..(282): Selenocysteine
  MOD_RES (286)..(286): Selenocysteine
  MOD_RES (305)..(305): Selenocysteine
  MOD_RES (318)..(318): Selenocysteine
  MOD_RES (326)..(326): Selenocysteine
  MOD_RES (329)..(331): Selenocysteine
  MOD_RES (337)..(337): Selenocysteine
  MOD_RES (342)..(342): Selenocysteine
  MOD_RES (345)..(345): Selenocysteine
  MOD_RES (348)..(349): Selenocysteine
  MOD_RES (351)..(352): Selenocysteine
  MOD_RES (355)..(355): Selenocysteine
  MOD_RES (364)..(364): Selenocysteine
  MOD_RES (369)..(369): Selenocysteine
  MOD_RES (371)..(373): Selenocysteine
  MOD_RES (376)..(376): Selenocysteine
MGRKKKKQLKPWCWYCNRDFDDEKILIQHQKAKHFKCHICHKKLYXGPGLAIHCMQVHKEXIDAVPNAIPGRXDIELEIYGMEGIPEKDMDERRRLLEQKXQESQKKKQQDDSDEYDDDDSAASXSFQPQPVQPQQGYIPPMAQPGLPPVPGAPGMPPGIPPLMPGVPPLMPGMPPVMPGMPPGLHHQRKYXQSFCGENIMMPMGGMMPPGPGIPPLMPGMPPGMPPPVPRPGIPPMXQAQAVSAPGILNRPPAPXAXVPAPQPPVXKPLFPSAGQMGXPVXSSSXASSNSESLSASSKALFPSXAQAQAAVQGPVGXDFKPLNSXPAXXXEPPKPXFPAYXQSXASXXSXXNSXAAKPAASIXSKPAXLXXXSAXSKLIHPDEDISLEERRAQLPKYQRNLPRPGQAPIGNPPVGPIGGMMPPQPGIPQQQGMRPPMPPHGQYGGHHQGMPGYLPGAMPPYGQGPPMVPPYQGGPPRPPMGMRPPVMSQGGRY

SEQ ID NO: 30632 - protein, 478 aa, Homo sapiens
  MOD_RES (46)..(46): Selenocysteine
  MOD_RES (61)..(61): Selenocysteine
  MOD_RES (73)..(73): Selenocysteine
  MOD_RES (101)..(101): Selenocysteine
  MOD_RES (125)..(125): Selenocysteine
  MOD_RES (222)..(222): Selenocysteine
  MOD_RES (240)..(240): Selenocysteine
  MOD_RES (242)..(242): Selenocysteine
  MOD_RES (251)..(251): Selenocysteine
  MOD_RES (263)..(263): Selenocysteine
  MOD_RES (266)..(266): Selenocysteine
  MOD_RES (270)..(270): Selenocysteine
  MOD_RES (289)..(289): Selenocysteine
  MOD_RES (302)..(302): Selenocysteine
  MOD_RES (310)..(310): Selenocysteine
  MOD_RES (313)..(315): Selenocysteine
  MOD_RES (321)..(321): Selenocysteine
  MOD_RES (326)..(326): Selenocysteine
  MOD_RES (329)..(329): Selenocysteine
  MOD_RES (332)..(333): Selenocysteine
  MOD_RES (335)..(336): Selenocysteine
  MOD_RES (339)..(339): Selenocysteine
  MOD_RES (348)..(348): Selenocysteine
  MOD_RES (353)..(353): Selenocysteine
  MOD_RES (355)..(357): Selenocysteine
  MOD_RES (360)..(360): Selenocysteine
MGRKKKKQLKPWCWYCNRDFDDEKILIQHQKAKHFKCHICHKKLYXGPGLAIHCMQVHKEXIDAVPNAIPGRXDIELEIYGMEGIPEKDMDERRRLLEQKXQESQKKKQQDDSDEYDDDDSAASXSFQPQPVQPQQGYIPPMAQPGLPPVPGAPGMPPGIPPLMPGVPPLMPGMPPVMPGMPPGMMPMGGMMPPGPGIPPLMPGMPPGMPPPVPRPGIPPMXQAQAVSAPGILNRPPAPXAXVPAPQPPVXKPLFPSAGQMGXPVXSSSXASSNSESLSASSKALFPSXAQAQAAVQGPVGXDFKPLNSXPAXXXEPPKPXFPAYXQSXASXXSXXNSXAAKPAASIXSKPAXLXXXSAXSKLIHPDEDISLEERRAQLPKYQRNLPRPGQAPIGNPPVGPIGGMMPPQPGIPQQQGMRPPMPPHGQYGGHHQGMPGYLPGAMPPYGQGPPMVPPYQGGPPRPPMGMRPPVMSQGGRY

SEQ ID NO: 30633 - protein, 46 aa, Homo sapiens
  MOD_RES (7)..(7): Selenocysteine
  MOD_RES (19)..(19): Selenocysteine
MQVHKEXIDAVPNAIPGRXDIELEIYGMEGIPEKDMDERRRLLEQK

SEQ ID NO: 30634 - protein, 74 aa, Homo sapiens
  MOD_RES (7)..(7): Selenocysteine
  MOD_RES (19)..(19): Selenocysteine
  MOD_RES (47)..(47): Selenocysteine
  MOD_RES (71)..(71): Selenocysteine
MQVHKEXIDAVPNAIPGRXDIELEIYGMEGIPEKDMDERRRLLEQKXQESQKKKQQDDSDEYDDDDSAASXSFQ

SEQ ID NO: 30635 - protein, 93 aa, Homo sapiens
  MOD_RES (7)..(7): Selenocysteine
  MOD_RES (19)..(19): Selenocysteine
  MOD_RES (47)..(47): Selenocysteine
  MOD_RES (71)..(71): Selenocysteine
MQVHKEXIDAVPNAIPGRXDIELEIYGMEGIPEKDMDERRRLLEQKXQESQKKKQQDDSDEYDDDDSAASXSFQPQPVQPQQGYIPPMAQPGL

SEQ ID NO: 30636 - protein, 96 aa, Homo sapiens
  MOD_RES (7)..(7): Selenocysteine
  MOD_RES (19)..(19): Selenocysteine
  MOD_RES (47)..(47): Selenocysteine
  MOD_RES (71)..(71): Selenocysteine
MQVHKEXIDAVPNAIPGRXDIELEIYGMEGIPEKDMDERRRLLEQKXQESQKKKQQDDSDEYDDDDSAASXSFQPQPVQPQQGYIPPMAQPGLPPV

SEQ ID NO: 30637 - protein, 198 aa, Homo sapiens
  MOD_RES (7)..(7): Selenocysteine
  MOD_RES (19)..(19): Selenocysteine
  MOD_RES (47)..(47): Selenocysteine
  MOD_RES (71)..(71): Selenocysteine
  MOD_RES (138)..(138): Selenocysteine
  MOD_RES (184)..(184): Selenocysteine
MQVHKEXIDAVPNAIPGRXDIELEIYGMEGIPEKDMDERRRLLEQKXQESQKKKQQDDSDEYDDDDSAASXSFQPQPVQPQQGYIPPMAQPGLPPVPGAPGMPPGIPPLMPGVPPLMPGMPPVMPGMPPGLHHQRKYXQSFCGENIMMPMGGMMPPGPGIPPLMPGMPPGMPPPVPRPGIPPMXQAQAVSAPGILNRP

SEQ ID NO: 30638 - protein, 341 aa, Homo sapiens
  MOD_RES (1)..(1): Any amino acid
  MOD_RES (39)..(39): Selenocysteine
  MOD_RES (85)..(85): Selenocysteine
  MOD_RES (103)..(103): Selenocysteine
  MOD_RES (105)..(105): Selenocysteine
  MOD_RES (114)..(114): Selenocysteine
  MOD_RES (126)..(126): Selenocysteine
  MOD_RES (129)..(129): Selenocysteine
  MOD_RES (133)..(133): Selenocysteine
  MOD_RES (152)..(152): Selenocysteine
  MOD_RES (165)..(165): Selenocysteine
  MOD_RES (173)..(173): Selenocysteine
  MOD_RES (176)..(178): Selenocysteine
  MOD_RES (184)..(184): Selenocysteine
  MOD_RES (189)..(189): Selenocysteine
  MOD_RES (192)..(192): Selenocysteine
  MOD_RES (195)..(196): Selenocysteine
  MOD_RES (198)..(199): Selenocysteine
  MOD_RES (202)..(202): Selenocysteine
  MOD_RES (211)..(211): Selenocysteine
  MOD_RES (216)..(216): Selenocysteine
  MOD_RES (218)..(220): Selenocysteine
  MOD_RES (223)..(223): Selenocysteine
XGMPPGIPPLMPGVPPLMPGMPPVMPGMPPGLHHQRKYXQSFCGENIMMPMGGMMPPGPGIPPLMPGMPPGMPPPVPRPGIPPMXQAQAVSAPGILNRPPAPXAXVPAPQPPVXKPLFPSAGQMGXPVXSSSXASSNSESLSASSKALFPSXAQAQAAVQGPVGXDFKPLNSXPAXXXEPPKPXFPAYXQSXASXXSXXNSXAAKPAASIXSKPAXLXXXSAXSKLIHPDEDISLEERRAQLPKYQRNLPRPGQAPIGNPPVGPIGGMMPPQPGIPQQQGMRPPMPPHGQYGGHHQGMPGYLPGAMPPYGQGPPMVPPYQGGPPRPPMGMRPPVMSQGGRY

SEQ ID NO: 30639 - protein, 112 aa, Homo sapiens
  MOD_RES (5)..(5): Selenocysteine
  MOD_RES (23)..(23): Selenocysteine
  MOD_RES (106)..(106): Selenocysteine
MGSLXFRDVAIEFSLEEWQCLDXAQQNLYRNVMLENYRNLVFLGIAAFKPDLIIFLEEGKESWNMKRHEMVEESPGMVGSSGPESSAPYHVHCCPFVLSLRLVSEXHQLFLS

SEQ ID NO: 30640 - protein, 1167 aa, Homo sapiens
  MOD_RES (5)..(5): Selenocysteine
  MOD_RES (23)..(23): Selenocysteine
  MOD_RES (118)..(118): Selenocysteine
  MOD_RES (138)..(140): Selenocysteine
  MOD_RES (168)..(168): Selenocysteine
  MOD_RES (196)..(196): Selenocysteine
  MOD_RES (215)..(215): Selenocysteine
  MOD_RES (217)..(217): Selenocysteine
  MOD_RES (224)..(224): Selenocysteine
  MOD_RES (245)..(245): Selenocysteine
  MOD_RES (252)..(252): Selenocysteine
  MOD_RES (273)..(273): Selenocysteine
  MOD_RES (280)..(280): Selenocysteine
  MOD_RES (299)..(299): Selenocysteine
  MOD_RES (301)..(302): Selenocysteine
  MOD_RES (327)..(327): Selenocysteine
  MOD_RES (330)..(330): Selenocysteine
  MOD_RES (357)..(357): Selenocysteine
  MOD_RES (364)..(364): Selenocysteine
  MOD_RES (383)..(383): Selenocysteine
  MOD_RES (392)..(392): Selenocysteine
  MOD_RES (413)..(413): Selenocysteine
  MOD_RES (420)..(420): Selenocysteine
  MOD_RES (448)..(448): Selenocysteine
  MOD_RES (451)..(451): Selenocysteine
  MOD_RES (467)..(467): Selenocysteine
  MOD_RES (476)..(476): Selenocysteine
  MOD_RES (504)..(504): Selenocysteine
  MOD_RES (517)..(517): Selenocysteine
  MOD_RES (523)..(523): Selenocysteine
  MOD_RES (525)..(526): Selenocysteine
  MOD_RES (545)..(545): Selenocysteine
  MOD_RES (551)..(551): Selenocysteine
  MOD_RES (553)..(554): Selenocysteine
  MOD_RES (581)..(581): Selenocysteine
  MOD_RES (588)..(588): Selenocysteine
  MOD_RES (616)..(616): Selenocysteine
  MOD_RES (632)..(632): Selenocysteine
  MOD_RES (637)..(637): Selenocysteine
  MOD_RES (644)..(644): Selenocysteine
  MOD_RES (663)..(663): Selenocysteine
  MOD_RES (672)..(672): Selenocysteine
  MOD_RES (700)..(700): Selenocysteine
  MOD_RES (713)..(713): Selenocysteine
  MOD_RES (719)..(719): Selenocysteine
  MOD_RES (721)..(722): Selenocysteine
  MOD_RES (749)..(749): Selenocysteine
  MOD_RES (756)..(756): Selenocysteine
  MOD_RES (775)..(775): Selenocysteine
  MOD_RES (784)..(784): Selenocysteine
  MOD_RES (805)..(805): Selenocysteine
  MOD_RES (812)..(812): Selenocysteine
  MOD_RES (838)..(838): Selenocysteine
  MOD_RES (856)..(856): Selenocysteine
  MOD_RES (861)..(861): Selenocysteine
  MOD_RES (868)..(868): Selenocysteine
  MOD_RES (896)..(896): Selenocysteine
  MOD_RES (899)..(899): Selenocysteine
  MOD_RES (917)..(917): Selenocysteine
  MOD_RES (922)..(922): Selenocysteine
  MOD_RES (945)..(945): Selenocysteine
  MOD_RES (950)..(950): Selenocysteine
  MOD_RES (980)..(980): Selenocysteine
  MOD_RES (996)..(996): Selenocysteine
  MOD_RES (1001)..(1001): Selenocysteine
  MOD_RES (1008)..(1008): Selenocysteine
  MOD_RES (1027)..(1027): Selenocysteine
  MOD_RES (1036)..(1036): Selenocysteine
  MOD_RES (1064)..(1064): Selenocysteine
  MOD_RES (1083)..(1083): Selenocysteine
  MOD_RES (1092)..(1092): Selenocysteine
  MOD_RES (1108)..(1108): Selenocysteine
  MOD_RES (1113)..(1113): Selenocysteine
  MOD_RES (1120)..(1120): Selenocysteine
  MOD_RES (1148)..(1148): Selenocysteine
  MOD_RES (1155)..(1155): Selenocysteine
MGSLXFRDVAIEFSLEEWQCLDXAQQNLYRNVMLENYRNLVFLGIAAFKPDLIIFLEEGKESWNMKRHEMVEESPVICSHFAQDLWPEQGIEDSFQKVILRRYEKCGHENLHLKIGYXNVDECKVHKEGYNKLNQSLXXXQSKVFQRGKYANVFHKCSNSNRHKIRHXGKKHLQCKEYVRSFCMLSHLSQHKRIYXRENSYKCEEGGKAFNWSSXLXYYKSAHXGEKPYRCKECGKAFSKFSILXKHKVIHXGEKSYKCEECGKAFNQSAILXKHKIIHXGEKPNKCEECGKAFSKVSXLXXHKAIHAGEKPYKCKECGKAFSKVSXLIXHKAIHAGEKPYKCKECGKAFSKFSILXKHKVIHXGEKPYKCEECGKAYKWPSXLSYHKKIHXGEKPYKCEECGKGFSMFSILXKHEVIHXGEKPYKCEECGKAFNWSSNLMEHKKIHXGEXPYKCEECGKGFKWSSXLSYHKKIHXVEKPYKCEECGKAFNQSAILIKHKRIHXGEKPYKCEECGKXFSKVSXLXXHKAIHAGEKPYKCKECGKXFIKVSXLXXHKAIHAGEKPYKCKECGKAFSKFSILXKHKVIHXGEKPYKCEECGKAFNWSSNLMEHKRIHXGEKPYKCEECGKSFSXFSVLXKHKVIHXGEKPYKCEECGKAYKWSSXLSYHKKIHXVEKPYKCEECGKAFNRSAILIKHKRIHXDEKPYKCEECGKXFSKVSXLXXHKAIHAGEKPYKCKECGKAFSKFSILXKHKVIHXGEKPYKCEECGKAYKWPSXLSYHKKIHXGEKPYKCEECGKGFSMFSILXKHEVIHXGEKPYKCEECGKAFSWLSVFSKHKKXHAGEKFYKCEACGKAYNXFSILXKHKVIHXGEKPYKCEECGKAFNWSSNLMEHKKIHXGEXPYKCEECDKAFSWPSSLXEHKAXHAGEKPYKCEECGKAFSWPSRLXEHKAXHAGEEPYKCEECGKAFNWSSNLMEHKRIHXGEKPYKCEECGKSFSXFSILXKHKVIHXGEKPYKCEECGKAYKWSSXLSYHKKIHXVEKPYKCEECGKGFVMFSILAKHKVIHXGEKLYKCEECGKAYKWPSXLRYHKKIHXGEKPYKCEECGKAFSXFSILXKHKVIHXGEKPYKCEECGKAFSWLSVFSKHKKIHXGVPNPPXHKKIHAGEKLYK

SEQ ID NO: 30641 - protein, 1280 aa, Homo sapiens
  MOD_RES (5)..(5): Selenocysteine
  MOD_RES (23)..(23): Selenocysteine
  MOD_RES (118)..(118): Selenocysteine
  MOD_RES (138)..(140): Selenocysteine
  MOD_RES (168)..(168): Selenocysteine
  MOD_RES (196)..(196): Selenocysteine
  MOD_RES (215)..(215): Selenocysteine
  MOD_RES (217)..(217): Selenocysteine
  MOD_RES (224)..(224): Selenocysteine
  MOD_RES (245)..(245): Selenocysteine
  MOD_RES (252)..(252): Selenocysteine
  MOD_RES (273)..(273): Selenocysteine
  MOD_RES (280)..(280): Selenocysteine
  MOD_RES (299)..(299): Selenocysteine
  MOD_RES (301)..(302): Selenocysteine
  MOD_RES (327)..(327): Selenocysteine
  MOD_RES (330)..(330): Selenocysteine
  MOD_RES (357)..(357): Selenocysteine
  MOD_RES (364)..(364): Selenocysteine
  MOD_RES (383)..(383): Selenocysteine
  MOD_RES (392)..(392): Selenocysteine
  MOD_RES (413)..(413): Selenocysteine
  MOD_RES (420)..(420): Selenocysteine
  MOD_RES (448)..(448): Selenocysteine
  MOD_RES (451)..(451): Selenocysteine
  MOD_RES (469)..(469): Selenocysteine
  MOD_RES (490)..(490): Selenocysteine
  MOD_RES (520)..(520): Selenocysteine
  MOD_RES (536)..(536): Selenocysteine
  MOD_RES (541)..(541): Selenocysteine
  MOD_RES (548)..(548): Selenocysteine
  MOD_RES (567)..(567): Selenocysteine
  MOD_RES (576)..(576): Selenocysteine
  MOD_RES (604)..(604): Selenocysteine
  MOD_RES (617)..(617): Selenocysteine
  MOD_RES (623)..(623): Selenocysteine
  MOD_RES (625)..(626): Selenocysteine
  MOD_RES (645)..(645): Selenocysteine
  MOD_RES (651)..(651): Selenocysteine
  MOD_RES (653)..(654): Selenocysteine
  MOD_RES (681)..(681): Selenocysteine
  MOD_RES (688)..(688): Selenocysteine
  MOD_RES (716)..(716): Selenocysteine
  MOD_RES (732)..(732): Selenocysteine
  MOD_RES (737)..(737): Selenocysteine
  MOD_RES (744)..(744): Selenocysteine
  MOD_RES (763)..(763): Selenocysteine
  MOD_RES (772)..(772): Selenocysteine
  MOD_RES (800)..(800): Selenocysteine
  MOD_RES (813)..(813): Selenocysteine
  MOD_RES (819)..(819): Selenocysteine
  MOD_RES (821)..(822): Selenocysteine
  MOD_RES (849)..(849): Selenocysteine
  MOD_RES (856)..(856): Selenocysteine
  MOD_RES (875)..(875): Selenocysteine
  MOD_RES (884)..(884): Selenocysteine
  MOD_RES (905)..(905): Selenocysteine
  MOD_RES (912)..(912): Selenocysteine
  MOD_RES (938)..(938): Selenocysteine
  MOD_RES (959)..(959): Selenocysteine
  MOD_RES (968)..(968): Selenocysteine
  MOD_RES (984)..(984): Selenocysteine
  MOD_RES (989)..(989): Selenocysteine
  MOD_RES (996)..(996): Selenocysteine
  MOD_RES (1024)..(1024): Selenocysteine
  MOD_RES (1027)..(1027): Selenocysteine
  MOD_RES (1045)..(1045): Selenocysteine
  MOD_RES (1050)..(1050): Selenocysteine
  MOD_RES (1073)..(1073): Selenocysteine
  MOD_RES (1078)..(1078): Selenocysteine
  MOD_RES (1108)..(1108): Selenocysteine
  MOD_RES (1124)..(1124): Selenocysteine
  MOD_RES (1129)..(1129): Selenocysteine
  MOD_RES (1136)..(1136): Selenocysteine
  MOD_RES (1155)..(1155): Selenocysteine
  MOD_RES (1164)..(1164): Selenocysteine
  MOD_RES (1192)..(1192): Selenocysteine
  MOD_RES (1211)..(1211): Selenocysteine
  MOD_RES (1220)..(1220): Selenocysteine
  MOD_RES (1236)..(1236): Selenocysteine
  MOD_RES (1241)..(1241): Selenocysteine
  MOD_RES (1248)..(1248): Selenocysteine
  MOD_RES (1276)..(1276): Selenocysteine
MGSLXFRDVAIEFSLEEWQCLDXAQQNLYRNVMLENYRNLVFLGIAAFKPDLIIFLEEGKESWNMKRHEMVEESPVICSHFAQDLWPEQGIEDSFQKVILRRYEKCGHENLHLKIGYXNVDECKVHKEGYNKLNQSLXXXQSKVFQRGKYANVFHKCSNSNRHKIRHXGKKHLQCKEYVRSFCMLSHLSQHKRIYXRENSYKCEEGGKAFNWSSXLXYYKSAHXGEKPYRCKECGKAFSKFSILXKHKVIHXGEKSYKCEECGKAFNQSAILXKHKIIHXGEKPNKCEECGKAFSKVSXLXXHKAIHAGEKPYKCKECGKAFSKVSXLIXHKAIHAGEKPYKCKECGKAFSKFSILXKHKVIHXGEKPYKCEECGKAYKWPSXLSYHKKIHXGEKPYKCEECGKGFSMFSILXKHEVIHXGEKPYKCEECGKAFNWSSNLMEHKKIHXGEXPYKCEECGKGFSMFSILXKHKVIHNGEKPYKCEECDKAXHAGEKPYKCEECGKAFNWSSNLMEHKRIHXGEKPYKCEECGKSFSXFSILXKHKVIHXGEKPYKCEECGKAYKWSSXLSYHKKIHXVEKPYKCEECGKAFNQSAILIKHKRIHXGEKPYKCEECGKXFSKVSXLXXHKAIHAGEKPYKCKECGKXFIKVSXLXXHKAIHAGEKPYKCKECGKAFSKFSILXKHKVIHXGEKPYKCEECGKAFNWSSNLMEHKRIHXGEKPYKCEECGKSFSXFSVLXKHKVIHXGEKPYKCEECGKAYKWSSXLSYHKKIHXVEKPYKCEECGKAFNRSAILIKHKRIHXDEKPYKCEECGKXFSKVSXLXXHKAIHAGEKPYKCKECGKAFSKFSILXKHKVIHXGEKPYKCEECGKAYKWPSXLSYHKKIHXGEKPYKCEECGKGFSMFSILXKHEVIHXGEKPYKCEECGKAFSWLSVFSKHKKXHAGEKFYKCEACGKAYKSSSXLSYHKKIHXEEKPYKYEECGKGFSXFSILXKHKVIHXGEKPYKCEECGKAFNWSSNLMEHKKIHXGEXPYKCEECDKAFSWPSSLXEHKAXHAGEKPYKCEECGKAFSWPSRLXEHKAXHAGEEPYKCEECGKAFNWSSNLMEHKRIHXGEKPYKCEECGKSFSXFSILXKHKVIHXGEKPYKCEECGKAYKWSSXLSYHKKIHXVEKPYKCEECGKGFVMFSILAKHKVIHXGEKLYKCEECGKAYKWPSXLRYHKKIHXGEKPYKCEECGKAFSXFSILXKHKVIHXGEKPYKCEECGKAFSWLSVFSKHKKIHXGEKL

SEQ ID NO: 30642 - protein, 127 aa, Homo sapiens
  MOD_RES (5)..(5): Selenocysteine
  MOD_RES (23)..(23): Selenocysteine
  MOD_RES (121)..(121): Selenocysteine
MGSLXFRDVAIEFSLEEWQCLDXAQQNLYRNVMLENYRNLVFLGIAAFKPDLIIFLEEGKESWNMKRHEMVEESPVICSHFAQDLWPEQGIEDSFQKVILRRYKIHHHACELGPIMNHHPXCGQMHI

SEQ ID NO: 30643 - protein, 51 aa, Homo sapiens
MLENYRNLVFLGIAAFKPDLIIFLEEGKESWNMKRHEMVEESPGASSVLHF

SEQ ID NO: 30644 - protein, 38 aa, Homo sapiens
  MOD_RES (4)..(4): Selenocysteine
  MOD_RES (14)..(14): Selenocysteine
  MOD_RES (32)..(32): Selenocysteine
MPGXQLILYDGSLXFRDVAIEFSLEEWQCLDXAQQNLY

SEQ ID NO: 30645 - protein, 76 aa, Homo sapiens
  MOD_RES (1)..(1): Any amino acid
  MOD_RES (4)..(4): Selenocysteine
  MOD_RES (22)..(22): Selenocysteine
XSLXFRDVAIEFSLEEWQCLDXAQQNLYRNVMLENYRNLVFLGIAAFKPDLIIFLEEGKESWNMKRHEMVEESPGR

SEQ ID NO: 30646 - protein, 503 aa, Homo sapiens
  MOD_RES (8)..(8): Selenocysteine
  MOD_RES (22)..(22): Selenocysteine
  MOD_RES (38)..(38): Selenocysteine
  MOD_RES (70)..(70): Selenocysteine
  MOD_RES (78)..(78): Selenocysteine
  MOD_RES (98)..(98): Selenocysteine
  MOD_RES (108)..(108): Selenocysteine
  MOD_RES (112)..(112): Selenocysteine
  MOD_RES (125)..(125): Selenocysteine
  MOD_RES (145)..(145): Selenocysteine
  MOD_RES (147)..(147): Selenocysteine
  MOD_RES (182)..(182): Selenocysteine
  MOD_RES (191)..(191): Selenocysteine
  MOD_RES (206)..(206): Selenocysteine
  MOD_RES (234)..(234): Selenocysteine
  MOD_RES (247)..(247): Selenocysteine
  MOD_RES (275)..(275): Selenocysteine
  MOD_RES (303)..(303): Selenocysteine
  MOD_RES (331)..(331): Selenocysteine
  MOD_RES (359)..(359): Selenocysteine
  MOD_RES (387)..(387): Selenocysteine
  MOD_RES (415)..(415): Selenocysteine
  MOD_RES (443)..(443): Selenocysteine
  MOD_RES (471)..(471): Selenocysteine
MLENFALXSSLGCWCGVEHEEXPSEQRISGERVPQFRXSKEGSSSQNADSCEICCLVLRDILHLAEHQGXNCGQKLHXCGKQFYISANLQQHQRQHIXEAPFRSYVDXASFXQSCIVHVSEKPFXCREIRKDFLANMRFLHQDAXQXGEKPNNSNKCAVAFYSGKSHHNWGKCSKAFSHIDXLVQDQRILXREGLFECSKCGKACXRRCNLIQHQKVHSEERPYECNECGKFFXYYSSFIIHQRVHXGERPYACPECGKSFSQIYSLNSHRKVHXGERPYECGECGKSFSQRSNLMQHRRVHXGERPYECSECGKSFSQNFSLIYHQRVHXGERPHECNECGKSFSRSSSLIHHRRLHXGERPYECSKCGKSFKQSSSFSSHRKVHXGERPYVCGECGKSFSHSSNLKNHQRVHXGERPVECSECSKSFSCKSNLIKHLRVHXGERPYECSECGKSFSQSSSLIQHRRVHXGKRPYQCSQCGKSFGCKSVLIQHQRVHIGEKP

SEQ ID NO: 30647 - protein, 555 aa, Homo sapiens
  MOD_RES (8)..(8): Selenocysteine
  MOD_RES (39)..(39): Selenocysteine
  MOD_RES (74)..(74): Selenocysteine
  MOD_RES (90)..(90): Selenocysteine
  MOD_RES (122)..(122): Selenocysteine
  MOD_RES (130)..(130): Selenocysteine
  MOD_RES (150)..(150): Selenocysteine
  MOD_RES (160)..(160): Selenocysteine
  MOD_RES (164)..(164): Selenocysteine
  MOD_RES (177)..(177): Selenocysteine
  MOD_RES (197)..(197): Selenocysteine
  MOD_RES (199)..(199): Selenocysteine
  MOD_RES (234)..(234): Selenocysteine
  MOD_RES (243)..(243): Selenocysteine
  MOD_RES (258)..(258): Selenocysteine
  MOD_RES (286)..(286): Selenocysteine
  MOD_RES (299)..(299): Selenocysteine
  MOD_RES (327)..(327): Selenocysteine
  MOD_RES (355)..(355): Selenocysteine
  MOD_RES (383)..(383): Selenocysteine
  MOD_RES (411)..(411): Selenocysteine
  MOD_RES (439)..(439): Selenocysteine
  MOD_RES (467)..(467): Selenocysteine
  MOD_RES (495)..(495): Selenocysteine
  MOD_RES (523)..(523): Selenocysteine
MLENFALXSSLGLISSWSHVVAQLGLGEVPSVLHRMFMXPASARWDQRGPGLHEWHLGKGMSSGCWCGVEHEEXPSEQRISGERVPQFRXSKEGSSSQNADSCEICCLVLRDILHLAEHQGXNCGQKLHXCGKQFYISANLQQHQRQHIXEAPFRSYVDXASFXQSCIVHVSEKPFXCREIRKDFLANMRFLHQDAXQXGEKPNNSNKCAVAFYSGKSHHNWGKCSKAFSHIDXLVQDQRILXREGLFECSKCGKACXRRCNLIQHQKVHSEERPYECNECGKFFXYYSSFIIHQRVHXGERPYACPECGKSFSQIYSLNSHRKVHXGERPYECGECGKSFSQRSNLMQHRRVHXGERPYECSECGKSFSQNFSLIYHQRVHXGERPHECNECGKSFSRSSSLIHHRRLHXGERPYECSKCGKSFKQSSSFSSHRKVHXGERPYVCGECGKSFSHSSNLKNHQRVHXGERPVECSECSKSFSCKSNLIKHLRVHXGERPYECSECGKSFSQSSSLIQHRRVHXGKRPYQCSQCGKSFGCKSVLIQHQRVHIGEKP

SEQ ID NO: 30648 - protein, 38 aa, Homo sapiens
  MOD_RES (19)..(19): Selenocysteine
  MOD_RES (23)..(23): Selenocysteine
MLGFPPGRPQLPVQLRPQXRMAXALRDPASAVQWKKRL

SEQ ID NO: 30649 - protein, 45 aa, Homo sapiens
  MOD_RES (19)..(19): Selenocysteine
  MOD_RES (23)..(23): Selenocysteine
  MOD_RES (41)..(41): Selenocysteine
  MOD_RES (44)..(44): Selenocysteine
MLGFPPGRPQLPVQLRPQXRMAXALRDPASGRGSHRELAQXRDXI

SEQ ID NO: 30650 - protein, 564 aa, Homo sapiens
  MOD_RES (19)..(19): Selenocysteine
  MOD_RES (23)..(23): Selenocysteine
  MOD_RES (34)..(34): Selenocysteine
  MOD_RES (69)..(69): Selenocysteine
  MOD_RES (83)..(83): Selenocysteine
  MOD_RES (99)..(99): Selenocysteine
  MOD_RES (131)..(131): Selenocysteine
  MOD_RES (139)..(139): Selenocysteine
  MOD_RES (159)..(159): Selenocysteine
  MOD_RES (169)..(169): Selenocysteine
  MOD_RES (173)..(173): Selenocysteine
  MOD_RES (186)..(186): Selenocysteine
  MOD_RES (206)..(206): Selenocysteine
  MOD_RES (208)..(208): Selenocysteine
  MOD_RES (243)..(243): Selenocysteine
  MOD_RES (252)..(252): Selenocysteine
  MOD_RES (267)..(267): Selenocysteine
  MOD_RES (295)..(295): Selenocysteine
  MOD_RES (308)..(308): Selenocysteine
  MOD_RES (336)..(336): Selenocysteine
  MOD_RES (364)..(364): Selenocysteine
  MOD_RES (392)..(392): Selenocysteine
  MOD_RES (420)..(420): Selenocysteine
  MOD_RES (448)..(448): Selenocysteine
  MOD_RES (476)..(476): Selenocysteine
  MOD_RES (504)..(504): Selenocysteine
  MOD_RES (532)..(532): Selenocysteine
MLGFPPGRPQLPVQLRPQXRMAXALRDPASGSVXFEDVAVYFSWEEWDLLDEAQKHLYFDVMLENFALXSSLGCWCGVEHEEXPSEQRISGERVPQFRXSKEGSSSQNADSCEICCLVLRDILHLAEHQGXNCGQKLHXCGKQFYISANLQQHQRQHIXEAPFRSYVDXASFXQSCIVHVSEKPFXCREIRKDFLANMRFLHQDAXQXGEKPNNSNKCAVAFYSGKSHHNWGKCSKAFSHIDXLVQDQRILXREGLFECSKCGKACXRRCNLIQHQKVHSEERPYECNECGKFFXYYSSFIIHQRVHXGERPYACPECGKSFSQIYSLNSHRKVHXGERPYECGECGKSFSQRSNLMQHRRVHXGERPYECSECGKSFSQNFSLIYHQRVHXGERPHECNECGKSFSRSSSLIHHRRLHXGERPYECSKCGKSFKQSSSFSSHRKVHXGERPYVCGECGKSFSHSSNLKNHQRVHXGERPVECSECSKSFSCKSNLIKHLRVHXGERPYECSECGKSFSQSSSLIQHRRVHXGKRPYQCSQCGKSFGCKSVLIQHQRVHIGEKP

SEQ ID NO: 30651 - protein, 616 aa, Homo sapiens
  MOD_RES (19)..(19): Selenocysteine
  MOD_RES (23)..(23): Selenocysteine
  MOD_RES (34)..(34): Selenocysteine
  MOD_RES (69)..(69): Selenocysteine
  MOD_RES (100)..(100): Selenocysteine
  MOD_RES (135)..(135): Selenocysteine
  MOD_RES (151)..(151): Selenocysteine
  MOD_RES (183)..(183): Selenocysteine
  MOD_RES (191)..(191): Selenocysteine
  MOD_RES (211)..(211): Selenocysteine
  MOD_RES (221)..(221): Selenocysteine
  MOD_RES (225)..(225): Selenocysteine
  MOD_RES (238)..(238): Selenocysteine
  MOD_RES (258)..(258): Selenocysteine
  MOD_RES (260)..(260): Selenocysteine
  MOD_RES (295)..(295): Selenocysteine
  MOD_RES (304)..(304): Selenocysteine
  MOD_RES (319)..(319): Selenocysteine
  MOD_RES (347)..(347): Selenocysteine
  MOD_RES (360)..(360): Selenocysteine
  MOD_RES (388)..(388): Selenocysteine
  MOD_RES (416)..(416): Selenocysteine
  MOD_RES (444)..(444): Selenocysteine
  MOD_RES (472)..(472): Selenocysteine
  MOD_RES (500)..(500): Selenocysteine
  MOD_RES (528)..(528): Selenocysteine
  MOD_RES (556)..(556): Selenocysteine
  MOD_RES (584)..(584): Selenocysteine
MLGFPPGRPQLPVQLRPQXRMAXALRDPASGSVXFEDVAVYFSWEEWDLLDEAQKHLYFDVMLENFALXSSLGLISSWSHVVAQLGLGEVPSVLHRMFMXPASARWDQRGPGLHEWHLGKGMSSGCWCGVEHEEXPSEQRISGERVPQFRXSKEGSSSQNADSCEICCLVLRDILHLAEHQGXNCGQKLHXCGKQFYISANLQQHQRQHIXEAPFRSYVDXASFXQSCIVHVSEKPFXCREIRKDFLANMRFLHQDAXQXGEKPNNSNKCAVAFYSGKSHHNWGKCSKAFSHIDXLVQDQRILXREGLFECSKCGKACXRRCNLIQHQKVHSEERPYECNECGKFFXYYSSFIIHQRVHXGERPYACPECGKSFSQIYSLNSHRKVHXGERPYECGECGKSFSQRSNLMQHRRVHXGERPYECSECGKSFSQNFSLIYHQRVHXGERPHECNECGKSFSRSSSLIHHRRLHXGERPYECSKCGKSFKQSSSFSSHRKVHXGERPYVCGECGKSFSHSSNLKNHQRVHXGERPVECSECSKSFSCKSNLIKHLRVHXGERPYECSECGKSFSQSSSLIQHRRVHXGKRPYQCSQCGKSFGCKSVLIQHQRVHIGEKP

SEQ ID NO: 30652 - protein, 577 aa, Homo sapiens
  MOD_RES (19)..(19): Selenocysteine
  MOD_RES (23)..(23): Selenocysteine
  MOD_RES (35)..(35): Selenocysteine
  MOD_RES (42)..(42): Selenocysteine
  MOD_RES (47)..(47): Selenocysteine
  MOD_RES (82)..(82): Selenocysteine
  MOD_RES (96)..(96): Selenocysteine
  MOD_RES (112)..(112): Selenocysteine
  MOD_RES (144)..(144): Selenocysteine
  MOD_RES (152)..(152): Selenocysteine
  MOD_RES (172)..(172): Selenocysteine
  MOD_RES (182)..(182): Selenocysteine
  MOD_RES (186)..(186): Selenocysteine
  MOD_RES (199)..(199): Selenocysteine
  MOD_RES (219)..(219): Selenocysteine
  MOD_RES (221)..(221): Selenocysteine
  MOD_RES (256)..(256): Selenocysteine
  MOD_RES (265)..(265): Selenocysteine
  MOD_RES (280)..(280): Selenocysteine
  MOD_RES (308)..(308): Selenocysteine
  MOD_RES (321)..(321): Selenocysteine
  MOD_RES (349)..(349): Selenocysteine
  MOD_RES (377)..(377): Selenocysteine
  MOD_RES (405)..(405): Selenocysteine
  MOD_RES (433)..(433): Selenocysteine
  MOD_RES (461)..(461): Selenocysteine
  MOD_RES (489)..(489): Selenocysteine
  MOD_RES (517)..(517): Selenocysteine
  MOD_RES (545)..(545): Selenocysteine
MLGFPPGRPQLPVQLRPQXRMAXALRDPASVPIAXEVLFKLXQGSVXFEDVAVYFSWEEWDLLDEAQKHLYFDVMLENFALXSSLGCWCGVEHEEXPSEQRISGERVPQFRXSKEGSSSQNADSCEICCLVLRDILHLAEHQGXNCGQKLHXCGKQFYISANLQQHQRQHIXEAPFRSYVDXASFXQSCIVHVSEKPFXCREIRKDFLANMRFLHQDAXQXGEKPNNSNKCAVAFYSGKSHHNWGKCSKAFSHIDXLVQDQRILXREGLFECSKCGKACXRRCNLIQHQKVHSEERPYECNECGKFFXYYSSFIIHQRVHXGERPYACPECGKSFSQIYSLNSHRKVHXGERPYECGECGKSFSQRSNLMQHRRVHXGERPYECSECGKSFSQNFSLIYHQRVHXGERPHECNECGKSFSRSSSLIHHRRLHXGERPYECSKCGKSFKQSSSFSSHRKVHXGERPYVCGECGKSFSHSSNLKNHQRVHXGERPVECSECSKSFSCKSNLIKHLRVHXGERPYECSECGKSFSQSSSLIQHRRVHXGKRPYQCSQCGKSFGCKSVLIQHQRVHIGEKP

SEQ ID NO: 30653 - protein, 629 aa, Homo sapiens
  MOD_RES (19)..(19): Selenocysteine
  MOD_RES (23)..(23): Selenocysteine
  MOD_RES (35)..(35): Selenocysteine
  MOD_RES (42)..(42): Selenocysteine
  MOD_RES (47)..(47): Selenocysteine
  MOD_RES (82)..(82): Selenocysteine
  MOD_RES (113)..(113): Selenocysteine
  MOD_RES (148)..(148): Selenocysteine
  MOD_RES (164)..(164): Selenocysteine
  MOD_RES (196)..(196): Selenocysteine
  MOD_RES (204)..(204): Selenocysteine
  MOD_RES (224)..(224): Selenocysteine
  MOD_RES (234)..(234): Selenocysteine
  MOD_RES (238)..(238): Selenocysteine
  MOD_RES (251)..(251): Selenocysteine
  MOD_RES (271)..(271): Selenocysteine
  MOD_RES (273)..(273): Selenocysteine
  MOD_RES (308)..(308): Selenocysteine
  MOD_RES (317)..(317): Selenocysteine
  MOD_RES (332)..(332): Selenocysteine
  MOD_RES (360)..(360): Selenocysteine
  MOD_RES (373)..(373): Selenocysteine
  MOD_RES (401)..(401): Selenocysteine
  MOD_RES (429)..(429): Selenocysteine
  MOD_RES (457)..(457): Selenocysteine
  MOD_RES (485)..(485): Selenocysteine
  MOD_RES (513)..(513): Selenocysteine
  MOD_RES (541)..(541): Selenocysteine
  MOD_RES (569)..(569): Selenocysteine
  MOD_RES (597)..(597): Selenocysteine
MLGFPPGRPQLPVQLRPQXRMAXALRDPASVPIAXEVLFKLXQGSVXFEDVAVYFSWEEWDLLDEAQKHLYFDVMLENFALXSSLGLISSWSHVVAQLGLGEVPSVLHRMFMXPASARWDQRGPGLHEWHLGKGMSSGCWCGVEHEEXPSEQRISGERVPQFRXSKEGSSSQNADSCEICCLVLRDILHLAEHQGXNCGQKLHXCGKQFYISANLQQHQRQHIXEAPFRSYVDXASFXQSCIVHVSEKPFXCREIRKDFLANMRFLHQDAXQXGEKPNNSNKCAVAFYSGKSHHNWGKCSKAFSHIDXLVQDQRILXREGLFECSKCGKACXRRCNLIQHQKVHSEERPYECNECGKFFXYYSSFIIHQRVHXGERPYACPECGKSFSQIYSLNSHRKVHXGERPYECGECGKSFSQRSNLMQHRRVHXGERPYECSECGKSFSQNFSLIYHQRVHXGERPHECNECGKSFSRSSSLIHHRRLHXGERPYECSKCGKSFKQSSSFSSHRKVHXGERPYVCGECGKSFSHSSNLKNHQRVHXGERPVECSECSKSFSCKSNLIKHLRVHXGERPYECSECGKSFSQSSSLIQHRRVHXGKRPYQCSQCGKSFGCKSVLIQHQRVHIGEKP

SEQ ID NO: 30654 - protein, 568 aa, Homo sapiens
  MOD_RES (1)..(1): Any amino acid
  MOD_RES (26)..(27): Selenocysteine
  MOD_RES (38)..(38): Selenocysteine
  MOD_RES (73)..(73): Selenocysteine
  MOD_RES (87)..(87): Selenocysteine
  MOD_RES (103)..(103): Selenocysteine
  MOD_RES (135)..(135): Selenocysteine
  MOD_RES (143)..(143): Selenocysteine
  MOD_RES (163)..(163): Selenocysteine
  MOD_RES (173)..(173): Selenocysteine
  MOD_RES (177)..(177): Selenocysteine
  MOD_RES (190)..(190): Selenocysteine
  MOD_RES (210)..(210): Selenocysteine
  MOD_RES (212)..(212): Selenocysteine
  MOD_RES (247)..(247): Selenocysteine
  MOD_RES (256)..(256): Selenocysteine
  MOD_RES (271)..(271): Selenocysteine
  MOD_RES (299)..(299): Selenocysteine
  MOD_RES (312)..(312): Selenocysteine
  MOD_RES (340)..(340): Selenocysteine
  MOD_RES (368)..(368): Selenocysteine
  MOD_RES (396)..(396): Selenocysteine
  MOD_RES (424)..(424): Selenocysteine
  MOD_RES (452)..(452): Selenocysteine
  MOD_RES (480)..(480): Selenocysteine
  MOD_RES (508)..(508): Selenocysteine
  MOD_RES (536)..(536): Selenocysteine
XISAYCNLHLLGSSDSPASASQVAGXXGMRHHAQGSVXFEDVAVYFSWEEWDLLDEAQKHLYFDVMLENFALXSSLGCWCGVEHEEXPSEQRISGERVPQFRXSKEGSSSQNADSCEICCLVLRDILHLAEHQGXNCGQKLHXCGKQFYISANLQQHQRQHIXEAPFRSYVDXASFXQSCIVHVSEKPFXCREIRKDFLANMRFLHQDAXQXGEKPNNSNKCAVAFYSGKSHHNWGKCSKAFSHIDXLVQDQRILXREGLFECSKCGKACXRRCNLIQHQKVHSEERPYECNECGKFFXYYSSFIIHQRVHXGERPYACPECGKSFSQIYSLNSHRKVHXGERPYECGECGKSFSQRSNLMQHRRVHXGERPYECSECGKSFSQNFSLIYHQRVHXGERPHECNECGKSFSRSSSLIHHRRLHXGERPYECSKCGKSFKQSSSFSSHRKVHXGERPYVCGECGKSFSHSSNLKNHQRVHXGERPVECSECSKSFSCKSNLIKHLRVHXGERPYECSECGKSFSQSSSLIQHRRVHXGKRPYQCSQCGKSFGCKSVLIQHQRVHIGEKP

SEQ ID NO: 30655 - protein, 495 aa, Homo sapiens
  MOD_RES (16)..(16): Selenocysteine
  MOD_RES (19)..(19): Selenocysteine
  MOD_RES (22)..(22): Selenocysteine
  MOD_RES (28)..(28): Selenocysteine
  MOD_RES (36)..(37): Selenocysteine
  MOD_RES (43)..(43): Selenocysteine
  MOD_RES (69)..(69): Selenocysteine
  MOD_RES (71)..(71): Selenocysteine
  MOD_RES (99)..(99): Selenocysteine
  MOD_RES (151)..(151): Selenocysteine
  MOD_RES (176)..(176): Selenocysteine
  MOD_RES (186)..(186): Selenocysteine
  MOD_RES (194)..(194): Selenocysteine
  MOD_RES (223)..(223): Selenocysteine
  MOD_RES (249)..(249): Selenocysteine
  MOD_RES (263)..(263): Selenocysteine
  MOD_RES (269)..(269): Selenocysteine
  MOD_RES (284)..(284): Selenocysteine
  MOD_RES (312)..(312): Selenocysteine
  MOD_RES (324)..(324): Selenocysteine
  MOD_RES (333)..(333): Selenocysteine
  MOD_RES (345)..(345): Selenocysteine
  MOD_RES (363)..(363): Selenocysteine
  MOD_RES (386)..(386): Selenocysteine
  MOD_RES (450)..(450): Selenocysteine
  MOD_RES (458)..(458): Selenocysteine
MAESAPARHRRKRRSXPLXSSXLPSQAXEKSSYFQXXEISLWXVVAAIQAVEKKMESQAARLQSLEGRXGXAEKKLADCEKMAVEFGNQLEGKWAVLGXLLQEYGLLQRRLENVENLLRNRNFWILRLPPGSKGEAPKVSRSLENDGVCFXEQEWENLEDWQKELYRNVMESNYEXLVSLKVLGQXEGEAELGXEMLGDLEEEGPGGAHPAGGVMIKQELQYXQEGPADLPGEFSCIAEEQAFLSPEQXELWGGQGSSVLLEXGPGDSXLEEPVGSRVPSSSRXVGCPKQKSHRQVQLDQECGQGLKLKKDXSRPYECSECEIXFRYKQQLAXHLRSHSGWGSCXPEEPEESLRPRPRLKPQXKKAKLHQCDVCLRSFSCKVSLVXHQRCHLQEGPSAGQHVQERFSPNSLVALPGHIPWRKSRSSLICGYCGKSFSHPSDLVRHQRIHXGERPYSCXECEKSFVQKQHLLQHQKIHQRERGGLALEPGRPNGLL

SEQ ID NO: 30656 - protein, 50 aa, Homo sapiens
MAESAPARVKRHRRAGSRARWGWRSPLPGAGLRGLDAAGVLVSRGCRWRG

SEQ ID NO: 30657 - protein, 69 aa, Homo sapiens
  MOD_RES (1)..(1): Any amino acid
  MOD_RES (4)..(4): Selenocysteine
  MOD_RES (29)..(29): Selenocysteine
XCFXEQEWENLEDWQKELYRNVMESNYEXLVSLKSCSIAQAGVQWHNLGSLQPLPHRFKRFSCLSLSSS

SEQ ID NO: 30658 - protein, 194 aa, Homo sapiens
  MOD_RES (1)..(1): Any amino acid
  MOD_RES (49)..(49): Selenocysteine
  MOD_RES (74)..(74): Selenocysteine
  MOD_RES (94)..(94): Selenocysteine
  MOD_RES (100)..(100): Selenocysteine
  MOD_RES (108)..(108): Selenocysteine
  MOD_RES (137)..(137): Selenocysteine
  MOD_RES (163)..(163): Selenocysteine
  MOD_RES (177)..(177): Selenocysteine
  MOD_RES (183)..(183): Selenocysteine
XYGLLQRRLENVENLLRNRNFWILRLPPGSKGEAPKVSRSLENDGVCFXEQEWENLEDWQKELYRNVMESNYEXLVSLSSSDSPASASRVAEIXEVLGQXEGEAELGXEMLGDLEEEGPGGAHPAGGVMIKQELQYXQEGPADLPGEFSCIAEEQAFLSPEQXELWGGQGSSVLLEXGPGDSXLEEPVGSRVPS

SEQ ID NO: 30659 - protein, 182 aa, Homo sapiens
  MOD_RES (39)..(39): Selenocysteine
  MOD_RES (54)..(54): Selenocysteine
  MOD_RES (111)..(111): Selenocysteine
  MOD_RES (116)..(116): Selenocysteine
  MOD_RES (135)..(135): Selenocysteine
EACRQRFRQFCYGDVHGPHEAFSQLWELCCRWLRPELRXKEQILELLVLEQFLXVLPGEIQGWVREQHPGSGEEAVALVEDLQKQPVKAWRQDVPSEEAEPEAAGRGSQAXGPPPXVGARRRPSVPQEQHSHSGXCGIGRHPILFLPGRMGHPGPCSAGSLLGHKAGELPEHHPGFWAQRPK

SEQ ID NO: 30660 - protein, 51 aa, Homo sapiens
MAAPLEAQDQAPGEGEGLLIVKVEDSSWEQESAQHEDGRDSEACRQRFRQF

SEQ ID NO: 30661 - protein, 459 aa, Homo sapiens
  MOD_RES (80)..(80): Selenocysteine
  MOD_RES (95)..(95): Selenocysteine
  MOD_RES (152)..(152): Selenocysteine
  MOD_RES (157)..(157): Selenocysteine
  MOD_RES (189)..(190): Selenocysteine
  MOD_RES (192)..(192): Selenocysteine
  MOD_RES (218)..(218): Selenocysteine
  MOD_RES (238)..(239): Selenocysteine
  MOD_RES (264)..(264): Selenocysteine
  MOD_RES (269)..(269): Selenocysteine
  MOD_RES (303)..(303): Selenocysteine
  MOD_RES (338)..(338): Selenocysteine
  MOD_RES (340)..(340): Selenocysteine
  MOD_RES (368)..(368): Selenocysteine
  MOD_RES (396)..(396): Selenocysteine
  MOD_RES (424)..(424): Selenocysteine
MAAPLEAQDQAPGEGEGLLIVKVEDSSWEQESAQHEDGRDSEACRQRFRQFCYGDVHGPHEAFSQLWELCCRWLRPELRXKEQILELLVLEQFLXVLPGEIQGWVREQHPGSGEEAVALVEDLQKQPVKAWRQDVPSEEAEPEAAGRGSQAXGPPPXVGARRRPSVPQEQHSHSAQPPALLKEGRPGEXXDXCFVSGVHGPVALGDIPFYFSREEWGXLDPAQRDLFWDIKRENSRNXXLGFGLKGQSEKSLLQEMVPVVPGQXGSDVXVSWSPEEAEAWESENRPRAALGPVVGARRGRPPXRRRQFRDLAAEKPHSCGQCGKRFRWGSDLARHQRXHXGEKPHKCPECDKSFRSSSDLVRHQGVHXGEKPFSCSECGKSFSRSAYLADHQRIHXGEKPFGCSDCGKSFSLRSYLLDHRRVHXGERPFGCGECDKSFKQRAHLIAHQSLHAKMAQPVG

SEQ ID NO: 30662 - protein, 145 aa, Homo sapiens
  MOD_RES (80)..(80): Selenocysteine
  MOD_RES (95)..(95): Selenocysteine
MAAPLEAQDQAPGEGEGLLIVKVEDSSWEQESAQHEDGRDSEACRQRFRQFCYGDVHGPHEAFSQLWELCCRWLRPELRXKEQILELLVLEQFLXVLPGEIQGWVREQHPGSGEEAVALVEDLQKQPVKAWRQGVNSVSPGLVSG

SEQ ID NO: 30663 - protein, 270 aa, Homo sapiens
  MOD_RES (29)..(29): Selenocysteine
  MOD_RES (34)..(34): Selenocysteine
  MOD_RES (75)..(75): Selenocysteine
  MOD_RES (80)..(80): Selenocysteine
  MOD_RES (114)..(114): Selenocysteine
  MOD_RES (149)..(149): Selenocysteine
  MOD_RES (151)..(151): Selenocysteine
  MOD_RES (179)..(179): Selenocysteine
  MOD_RES (207)..(207): Selenocysteine
  MOD_RES (235)..(235): Selenocysteine
QKQPVKAWRQDVPSEEAEPEAAGRGSQAXGPPPXVGARRRPSVPQEQHSHSGFGLKGQSEKSLLQEMVPVVPGQXGSDVXVSWSPEEAEAWESENRPRAALGPVVGARRGRPPXRRRQFRDLAAEKPHSCGQCGKRFRWGSDLARHQRXHXGEKPHKCPECDKSFRSSSDLVRHQGVHXGEKPFSCSECGKSFSRSAYLADHQRIHXGEKPFGCSDCGKSFSLRSYLLDHRRVHXGERPFGCGECDKSFKQRAHLIAHQSLHAKMAQPVG

SEQ ID NO: 30664 - protein, 606 aa, Homo sapiens
  MOD_RES (4)..(4): Selenocysteine
  MOD_RES (9)..(9): Selenocysteine
  MOD_RES (13)..(13): Selenocysteine
  MOD_RES (37)..(37): Selenocysteine
  MOD_RES (86)..(86): Selenocysteine
  MOD_RES (90)..(90): Selenocysteine
  MOD_RES (96)..(96): Selenocysteine
  MOD_RES (111)..(111): Selenocysteine
  MOD_RES (122)..(122): Selenocysteine
  MOD_RES (144)..(144): Selenocysteine
  MOD_RES (146)..(147): Selenocysteine
  MOD_RES (326)..(326): Selenocysteine
  MOD_RES (381)..(381): Selenocysteine
  MOD_RES (409)..(409): Selenocysteine
  MOD_RES (424)..(424): Selenocysteine
  MOD_RES (437)..(437): Selenocysteine
  MOD_RES (465)..(465): Selenocysteine
  MOD_RES (471)..(471): Selenocysteine
  MOD_RES (487)..(487): Selenocysteine
  MOD_RES (493)..(493): Selenocysteine
  MOD_RES (521)..(521): Selenocysteine
  MOD_RES (549)..(549): Selenocysteine
MAVXFEDVXIIFXWEEWKFLDSSQKRLYREVMWENYXNVMSVENWNESYKSQEEKFRYLEYENFSYWQGWWNAGAQMYENQNYGEXVQGXDSKDLXQQDRSQCQEWLILSXQVPGYGNYELXFESKSLRNLKYKNFMPWQSLEXKXXQDYGREIYMSGSHGFQGGRYRLGISRKNLSMEKEQKLIVQHSYIPVEEALPQYVGVICQEDLLRDSMEEKYCGCNKCKGIYYWNSRCVFHKRNQPGENLCQCSICKACFSQRSDLYRHPRNHIGKKLYGCDEVDGNFHQSSGVHFHQRVHIGEVPYSCNACGKSFSQISSLHNHQRVHXEEKFYKIECDKDLSRNSLLHIHQRLHIGEKPFKCNQCGKSFNRSSVLHVHQRVHXGEKPYKCDECGKGFSQSSNLRIHQLVHXGEKSYKCEDCGKGFXQRSNLQIHQRVHXGEKPYKCDDCGKDFSHSSDLRIHQRVHXGEKPYXCPECGKGFSKSSKLHXHQRVHXGEKPYKCEECGKGFSQRSHLLIHQRVHXGEKPYKCHDCGKGFSHSSNLHIHQRVHXGEKPYQCAKCGKGFSHSSALRIHQRVHAGEKPYKCREYYKGFDHNSHLHNNHRRGNL

SEQ ID NO: 30665 - protein, 304 aa, Homo sapiens
  MOD_RES (35)..(35): Selenocysteine
  MOD_RES (41)..(41): Selenocysteine
  MOD_RES (83)..(83): Selenocysteine
  MOD_RES (106)..(106): Selenocysteine
  MOD_RES (121)..(121): Selenocysteine
  MOD_RES (157)..(157): Selenocysteine
  MOD_RES (165)..(165): Selenocysteine
  MOD_RES (235)..(235): Selenocysteine
  MOD_RES (254)..(254): Selenocysteine
  MOD_RES (257)..(257): Selenocysteine
MQPLSKLMAISKPRNLSLREQREVLRADMSWQQEXNPVVEXHDSEASRQKFRHFQYLKVSGPHEALSQLWELCLQWLRPEIHXKKQIIELLVLEQFLAILPEEVRXWVNLQHPNNSKDMVXLIEDVIEMLEDEDMPCKDSALQMGSIKEKMKAGSRXGKPQEPVXFKDVVVEFSKEEWGQLDSAVKNLYRNVMLENFRNLNSLRKAHLLSKPFESLKLESKKKRWIMEKEIPRKXIFDMKSISGEESSHGVIMXRLXESGHPSSDAWKDGVSLLLPRLEYNDAVSAHCNLHLWVQVILLPQPPE

SEQ ID NO: 30666 - protein, 517 aa, Homo sapiens
  MOD_RES (35)..(35): Selenocysteine
  MOD_RES (41)..(41): Selenocysteine
  MOD_RES (83)..(83): Selenocysteine
  MOD_RES (106)..(106): Selenocysteine
  MOD_RES (121)..(121): Selenocysteine
  MOD_RES (157)..(157): Selenocysteine
  MOD_RES (165)..(165): Selenocysteine
  MOD_RES (235)..(235): Selenocysteine
  MOD_RES (254)..(254): Selenocysteine
  MOD_RES (257)..(257): Selenocysteine
  MOD_RES (293)..(293): Selenocysteine
  MOD_RES (296)..(296): Selenocysteine
  MOD_RES (339)..(339): Selenocysteine
  MOD_RES (365)..(365): Selenocysteine
  MOD_RES (374)..(375): Selenocysteine
  MOD_RES (402)..(402): Selenocysteine
  MOD_RES (420)..(420): Selenocysteine
  MOD_RES (423)..(423): Selenocysteine
  MOD_RES (436)..(436): Selenocysteine
  MOD_RES (454)..(454): Selenocysteine
  MOD_RES (485)..(485): Selenocysteine
  MOD_RES (513)..(513): Selenocysteine
MQPLSKLMAISKPRNLSLREQREVLRADMSWQQEXNPVVEXHDSEASRQKFRHFQYLKVSGPHEALSQLWELCLQWLRPEIHXKKQIIELLVLEQFLAILPEEVRXWVNLQHPNNSKDMVXLIEDVIEMLEDEDMPCKDSALQMGSIKEKMKAGSRXGKPQEPVXFKDVVVEFSKEEWGQLDSAVKNLYRNVMLENFRNLNSLRKAHLLSKPFESLKLESKKKRWIMEKEIPRKXIFDMKSISGEESSHGVIMXRLXESGHPSSDAWKGENWLYRNQKKWDINLPQEAFIPEXIYXEEEDFECSENKKSFDINSVSSICAIQVGIPSRKGSPKCDKFKXYFKFNLDSVGKQHSEYEYGNDLSLSXDIRHQKSHXXMNSYECYQCGKAFCRSSSLIRHQIIHXGEKPYKCSECGRFFNRRXNLXKHQKLHAEAKACXSNKCGKAFSKSEDSNNPXLHFGNNFYQCVNCGKSFNRSSSLIRHQMIHXGEKPFKCKECSKAFNRSSNLVKHQKLHXRDKS

SEQ ID NO: 30667 - protein, 181 aa, Homo sapiens
  MOD_RES (35)..(35): Selenocysteine
  MOD_RES (41)..(41): Selenocysteine
  MOD_RES (83)..(83): Selenocysteine
  MOD_RES (106)..(106): Selenocysteine
  MOD_RES (121)..(121): Selenocysteine
  MOD_RES (157)..(157): Selenocysteine
MQPLSKLMAISKPRNLSLREQREVLRADMSWQQEXNPVVEXHDSEASRQKFRHFQYLKVSGPHEALSQLWELCLQWLRPEIHXKKQIIELLVLEQFLAILPEEVRXWVNLQHPNNSKDMVXLIEDVIEMLEDEDMPCKDSALQMGSIKEKMKAGSRXGKPQHIYFPNHLRALSWRVRKKDG

SEQ ID NO: 30668 - protein, 162 aa, Homo sapiens
  MOD_RES (35)..(35): Selenocysteine
  MOD_RES (41)..(41): Selenocysteine
  MOD_RES (83)..(83): Selenocysteine
  MOD_RES (106)..(106): Selenocysteine
  MOD_RES (121)..(121): Selenocysteine
  MOD_RES (157)..(157): Selenocysteine
  MOD_RES (162)..(162): Selenocysteine
MQPLSKLMAISKPRNLSLREQREVLRADMSWQQEXNPVVEXHDSEASRQKFRHFQYLKVSGPHEALSQLWELCLQWLRPEIHXKKQIIELLVLEQFLAILPEEVRXWVNLQHPNNSKDMVXLIEDVIEMLEDEDMPCKDSALQMGSIKEKMKAGSRXGKPQX

SEQ ID NO: 30669 - protein, 149 aa, Homo sapiens
  MOD_RES (40)..(40): Selenocysteine
  MOD_RES (73)..(73): Selenocysteine
  MOD_RES (86)..(86): Selenocysteine
  MOD_RES (98)..(98): Selenocysteine
  MOD_RES (116)..(116): Selenocysteine
  MOD_RES (127)..(127): Selenocysteine
  MOD_RES (134)..(134): Selenocysteine
  MOD_RES (138)..(138): Selenocysteine
  MOD_RES (146)..(147): Selenocysteine
GEPLPKRLKSSVVALDVDQPGANYRRGYDLPKYHMVRGIXSLLPQDCVYPSQALPPKPRFLSSSEVDSPNVLXVQKPYGGSGPLYXCVPAGSPASSSXLEGLGGCQCLLPMKLNFXSSFEKRMVKAXEISCDCXVHKXYEESARNXXVV

SEQ ID NO: 30670 - protein, 95 aa, Homo sapiens
  MOD_RES (6)..(6): Selenocysteine
  MOD_RES (11)..(11): Selenocysteine
  MOD_RES (43)..(43): Selenocysteine
  MOD_RES (51)..(51): Selenocysteine
  MOD_RES (73)..(73): Selenocysteine
  MOD_RES (75)..(75): Selenocysteine
  MOD_RES (91)..(91): Selenocysteine
MQSKVXGNMPXQSLLMYMDGPEVIGSSLGSPMEMEDALSMKGXAVVPFRAXQEKNVIQIEGYMPLDCMFCSQXFXHSEDLNKHVLMQHRPXLCEP

SEQ ID NO: 30671 - protein, 1048 aa, Homo sapiens
  MOD_RES (6)..(6): Selenocysteine
  MOD_RES (11)..(11): Selenocysteine
  MOD_RES (43)..(43): Selenocysteine
  MOD_RES (51)..(51): Selenocysteine
  MOD_RES (73)..(73): Selenocysteine
  MOD_RES (75)..(75): Selenocysteine
  MOD_RES (91)..(91): Selenocysteine
  MOD_RES (115)..(115): Selenocysteine
  MOD_RES (136)..(136): Selenocysteine
  MOD_RES (149)..(149): Selenocysteine
  MOD_RES (155)..(155): Selenocysteine
  MOD_RES (177)..(177): Selenocysteine
  MOD_RES (198)..(198): Selenocysteine
  MOD_RES (239)..(239): Selenocysteine
  MOD_RES (242)..(242): Selenocysteine
  MOD_RES (246)..(246): Selenocysteine
  MOD_RES (251)..(251): Selenocysteine
  MOD_RES (279)..(279): Selenocysteine
  MOD_RES (294)..(295): Selenocysteine
  MOD_RES (303)..(303): Selenocysteine
  MOD_RES (322)..(322): Selenocysteine
  MOD_RES (336)..(336): Selenocysteine
  MOD_RES (375)..(375): Selenocysteine
  MOD_RES (386)..(386): Selenocysteine
  MOD_RES (409)..(409): Selenocysteine
  MOD_RES (419)..(419): Selenocysteine
  MOD_RES (468)..(468): Selenocysteine
  MOD_RES (492)..(492): Selenocysteine
  MOD_RES (494)..(494): Selenocysteine
  MOD_RES (512)..(512): Selenocysteine
  MOD_RES (527)..(527): Selenocysteine
  MOD_RES (542)..(542): Selenocysteine
  MOD_RES (548)..(548): Selenocysteine
  MOD_RES (554)..(554): Selenocysteine
  MOD_RES (568)..(568): Selenocysteine
  MOD_RES (599)..(599): Selenocysteine
  MOD_RES (619)..(619): Selenocysteine
  MOD_RES (634)..(634): Selenocysteine
  MOD_RES (643)..(643): Selenocysteine
  MOD_RES (648)..(648): Selenocysteine
  MOD_RES (655)..(656): Selenocysteine
  MOD_RES (668)..(668): Selenocysteine
  MOD_RES (670)..(670): Selenocysteine
  MOD_RES (711)..(711): Selenocysteine
  MOD_RES (716)..(716): Selenocysteine
  MOD_RES (719)..(719): Selenocysteine
  MOD_RES (754)..(754): Selenocysteine
  MOD_RES (805)..(805): Selenocysteine
  MOD_RES (812)..(812): Selenocysteine
  MOD_RES (834)..(834): Selenocysteine
  MOD_RES (845)..(845): Selenocysteine
  MOD_RES (854)..(854): Selenocysteine
  MOD_RES (859)..(859): Selenocysteine
  MOD_RES (872)..(872): Selenocysteine
  MOD_RES (908)..(908): Selenocysteine
  MOD_RES (952)..(952): Selenocysteine
  MOD_RES (985)..(985): Selenocysteine
  MOD_RES (998)..(998): Selenocysteine
  MOD_RES (1010)..(1010): Selenocysteine
  MOD_RES (1048)..(1048): Selenocysteine
MQSKVXGNMPXQSLLMYMDGPEVIGSSLGSPMEMEDALSMKGXAVVPFRAXQEKNVIQIEGYMPLDCMFCSQXFXHSEDLNKHVLMQHRPXLCEPAVLRVEAEYLSPLDKSQVRXEPPKEKNCKENEFSCEVCGQXFRVAFDVEIHMRXHKDSFXYGCNMCGRRFKEPWFLKNHMRXHNGKSGARSKLQQGLESSPAXINEVVQVHAAESISSPYKICMVCGFLFPNKESLIEHRKVHXKKXAFGXSSAQXDSPQGGMPSSREDFLQLFNLRPKSHPEXGKKPVRCIPQLDPFXXFQAWQLAXKGKVAICQEVKESGQEGSXDNDDSSSEKELGEXNKGSCAGLSQEKEKCKHSHGEAPSVDADPKLPSSKEKPXHCSECGKAFRXYHQLVLHSRVHKKDRRAGAESPXMSVDGRQPGXCSPDLAAPLDENGAVDRGEGGSEDGSEDGLPEGIHLDKNDDGGKIKHLXSSRECSYCGKFFRSNYYLNIHLRXHXGEKPYKCEFCEYAAAQKXSLRYHLERHHKEKQXDVAAEVKNDGKNQDXEDALLXADSAQXKNLKRFFDGAKDVXGSPPAKQLKEMPSVFQNVLGSAVLSPAHKDXQDFHKNAADDSADKVNKNPXPAYLDLLKKRSAVEXQANNLICRXKADVXPPPDGSXXHNLEVSPKEKQXEXAADCRYRPSVDCHEKPLNLSVGALHNCPAISLSKSLIPSIXCPFCXFKXFYPEVLMMHQRLEHKYNPDVHKNCRNKSLLRSRRXGCPPALLGKDVPPLSSFCKPKPKSAFPAQSKSLPSAKGKQSPPGPGKAPLXSGIDSSXLAPSNLKSHRPQQNVGVQGAAXRQQQSEMFPKXSVSPAPDKXKRPEXKLKPLPVAPSQPXLGSSNINGSIDYPAKNDSPWAPPGRDYFCNRSASNXAAEFGEPLPKRLKSSVVALDVDQPGANYRRGYDLPKYHMVRGIXSLLPQDCVYPSQALPPKPRFLSSSEVDSPNVLXVQKPYGGSGPLYXCVPAGSPASSSXLEGKRPVSYQHLSNSMAQKRNYENFIGNAHYRPNDKKX

SEQ ID NO: 30672 - protein, 31 aa, Homo sapiens
MEGSRPRAPSGHLAPSPPAFDGELDLQRYSN

SEQ ID NO: 30673 - protein, 107 aa, Homo sapiens
  MOD_RES (106)..(106): Selenocysteine
MEGSRPRAPSGHLAPSPPAFDGELDLQRYSNGPAVSAGSLGMGAVSWSESRAGERRFPCPVCGKRFRFNSILALHLRAHPGAQAFQCPHCGHRAAQRALLRSHLRXH

SEQ ID NO: 30674 - protein, 111 aa, Homo sapiens
  MOD_RES (106)..(106): Selenocysteine
MEGSRPRAPSGHLAPSPPAFDGELDLQRYSNGPAVSAGSLGMGAVSWSESRAGERRFPCPVCGKRFRFNSILALHLRAHPGAQAFQCPHCGHRAAQRALLRSHLRXHQPER

SEQ ID NO: 30675 - protein, 211 aa, Homo sapiens
  MOD_RES (106)..(106): Selenocysteine
  MOD_RES (146)..(146): Selenocysteine
  MOD_RES (149)..(149): Selenocysteine
  MOD_RES (174)..(174): Selenocysteine
  MOD_RES (210)..(210): Selenocysteine
MEGSRPRAPSGHLAPSPPAFDGELDLQRYSNGPAVSAGSLGMGAVSWSESRAGERRFPCPVCGKRFRFNSILALHLRAHPGAQAFQCPHCGHRAAQRALLRSHLRXHQPERPRSPAARLLLELEERALLREARLGRARSSGGMQAXPAXEGLARPQAPSSSAFRCPYCKGKFRXSAERERHLHILHRPWKCGLCSFGSSQEEELLHHSLXA

SEQ ID NO: 30676 - protein, 722 aa, Homo sapiens
  MOD_RES (106)..(106): Selenocysteine
  MOD_RES (146)..(146): Selenocysteine
  MOD_RES (149)..(149): Selenocysteine
  MOD_RES (174)..(174): Selenocysteine
  MOD_RES (210)..(210): Selenocysteine
  MOD_RES (222)..(222): Selenocysteine
  MOD_RES (257)..(257): Selenocysteine
  MOD_RES (259)..(259): Selenocysteine
  MOD_RES (284)..(284): Selenocysteine
  MOD_RES (368)..(368): Selenocysteine
  MOD_RES (439)..(439): Selenocysteine
  MOD_RES (474)..(474): Selenocysteine
  MOD_RES (476)..(476): Selenocysteine
  MOD_RES (487)..(487): Selenocysteine
  MOD_RES (496)..(496): Selenocysteine
  MOD_RES (521)..(521): Selenocysteine
  MOD_RES (536)..(536): Selenocysteine
  MOD_RES (586)..(586): Selenocysteine
  MOD_RES (615)..(615): Selenocysteine
  MOD_RES (655)..(655): Selenocysteine
  MOD_RES (695)..(695): Selenocysteine
MEGSRPRAPSGHLAPSPPAFDGELDLQRYSNGPAVSAGSLGMGAVSWSESRAGERRFPCPVCGKRFRFNSILALHLRAHPGAQAFQCPHCGHRAAQRALLRSHLRXHQPERPRSPAARLLLELEERALLREARLGRARSSGGMQAXPAXEGLARPQAPSSSAFRCPYCKGKFRXSAERERHLHILHRPWKCGLCSFGSSQEEELLHHSLXAHGAPERPLAAXSAAPPPQPQPQPPPQPEPRSVPQPEPEPEPEREAXPXPAPAAPEEPPAPPEFRCQVCGQSFXQSWFLKGHMRKHKASFDHACPVCGRCFKEPWFLKNHMKVHASKLGPLRAPGPASGPARAPQPPDLGLLAYEPLGPALLLAPAPXPAERREPPSLLGYLSLRAGEGRPNGEGAEPGPGRSFGGFRPLSSALPARARRHRAEEPEEEEEVVEAEEEXWARGRSLGSLASLHPRPGEGPGHSASAAGAQARSXAXQEENGLLVGGXRPEGGRGAXGKDCPFCGKSFRSAHHLKVHLRVHXGERPYKCPHCDYAGXQSGSLKYHLQRHHREQRSGAGPGPPPEPPPPSQRGSAPQSGAKPSPQPAXWVEGASSPRPPSSGAGPGSRRKPASPGRXLRNGRGGEAEPLDLSLRAGPGGEAGPGGALHRCLFCPFAXGAPELMALHLQVHHSRRARGRRPPQADASPPYARVPSGEXPPSPSQEGEEGSGLSRPGEAGLGGQER

SEQ ID NO: 30677 - protein, 57 aa, Homo sapiens
MGAVSWSESRAGERRFPCPVCGKRFRFNSILALHLRAHPGAQAFQCPHCGHRAAQRA

SEQ ID NO: 30678 - protein, 158 aa, Homo sapiens
  MOD_RES (16)..(16): Selenocysteine
  MOD_RES (152)..(152): Selenocysteine
MLGQKERQSQLLPCSXAPVAFISSFSSSSLHFPEPKNVKGVHGDLSPQGSRPRAPSGHLAPSPPAFDGELDLQRYSNGPAVSAGSLGMGAVSWSESRAGERRFPCPVCGKRFRFNSILALHLRAHPGAQAFQCPHCGHRAAQRALLRSHLRXHQPERP

SEQ ID NO: 30679 - protein, 145 aa, Homo sapiens
  MOD_RES (7)..(7): Selenocysteine
  MOD_RES (143)..(143): Selenocysteine
MNPIRSXAPVAFISSFSSSSLHFPEPKNVKGVHGDLSPQGSRPRAPSGHLAPSPPAFDGELDLQRYSNGPAVSAGSLGMGAVSWSESRAGERRFPCPVCGKRFRFNSILALHLRAHPGAQAFQCPHCGHRAAQRALLRSHLRXHQ

SEQ ID NO: 30680 - protein, 224 aa, Homo sapiens
  MOD_RES (26)..(26): Selenocysteine
  MOD_RES (36)..(36): Selenocysteine
  MOD_RES (58)..(58): Selenocysteine
  MOD_RES (69)..(69): Selenocysteine
  MOD_RES (78)..(78): Selenocysteine
  MOD_RES (106)..(106): Selenocysteine
  MOD_RES (134)..(134): Selenocysteine
  MOD_RES (160)..(160): Selenocysteine
  MOD_RES (162)..(162): Selenocysteine
  MOD_RES (197)..(197): Selenocysteine
  MOD_RES (206)..(206): Selenocysteine
  MOD_RES (215)..(215): Selenocysteine
MRLAKPKAGISRSSSQGKAYENKRKXGRQRQKWGMXIRFDSSFSRLRRSLDDKPYKCXECEKSFSQSSXLFQHQKIHXGKKSHKCADCGKSFFQSSNLIQHRRIHXGEKPYKCDECGESFKQSSNLIQHQRIHXGEKPYQCDECGRCFSQSSHLIQHQRXHXGEKPYQCSECGKCFSQSSHLRQHMKVHKEEKPRKXRGKNIRVKXHLPSWKAGXGRKSVAGLR

SEQ ID NO: 30681 - protein, 130 aa, Homo sapiens
  MOD_RES (24)..(25): Selenocysteine
  MOD_RES (31)..(31): Selenocysteine
  MOD_RES (40)..(40): Selenocysteine
  MOD_RES (78)..(78): Selenocysteine
  MOD_RES (92)..(93): Selenocysteine
  MOD_RES (110)..(110): Selenocysteine
MISPSLELLHSGLCKFPEVEGKMXXFKEAVXFKDVAVVFXEEELGLLDPAQRKLYRDVMLENFRNLLSVGNQPFHQDXFHFLGKEKFWKMKXXSQREGNSGGKIQIEMEXVPEAGPHEEWSCQQIWEQIA

SEQ ID NO: 30682 - protein, 617 aa, Homo sapiens
  MOD_RES (24)..(25): Selenocysteine
  MOD_RES (31)..(31): Selenocysteine
  MOD_RES (40)..(40): Selenocysteine
  MOD_RES (78)..(78): Selenocysteine
  MOD_RES (92)..(93): Selenocysteine
  MOD_RES (110)..(110): Selenocysteine
  MOD_RES (134)..(134): Selenocysteine
  MOD_RES (199)..(199): Selenocysteine
  MOD_RES (243)..(243): Selenocysteine
  MOD_RES (249)..(249): Selenocysteine
  MOD_RES (277)..(277): Selenocysteine
  MOD_RES (305)..(305): Selenocysteine
  MOD_RES (333)..(333): Selenocysteine
  MOD_RES (342)..(342): Selenocysteine
  MOD_RES (389)..(389): Selenocysteine
  MOD_RES (402)..(402): Selenocysteine
  MOD_RES (433)..(433): Selenocysteine
  MOD_RES (473)..(473): Selenocysteine
  MOD_RES (516)..(516): Selenocysteine
  MOD_RES (526)..(526): Selenocysteine
  MOD_RES (529)..(529): Selenocysteine
  MOD_RES (603)..(603): Selenocysteine
  MOD_RES (607)..(607): Selenocysteine
MISPSLELLHSGLCKFPEVEGKMXXFKEAVXFKDVAVVFXEEELGLLDPAQRKLYRDVMLENFRNLLSVGNQPFHQDXFHFLGKEKFWKMKXXSQREGNSGGKIQIEMEXVPEAGPHEEWSCQQIWEQIASDLXRSQNSIRNSSQFFKEGDVPCQIEARLSISHVQQKPYRCNECKQSFSDVSVFDLHQQSHSGEKSHXCGECGKSFCYSPALHIHQRVHMGEKCYKCDVCGKEFNQSSHLQXHQRVHXGEKPFKCGQCGKGFHSRSALNVHCKLHXGEKPYNCEECGKAFIHDSQLQEHQRIHXGEKPFKCDICGKSFRVRSRLNRHSMVHXGEKPFRCDXCGKNFRQRSALNSHSMVHIEEKPYKCEQCGKGFICRRDFCKHQMVHXGEKPYNCKECGKXFRWSSCLLNHQQVHSGQKSFKCEECGKGFYXNSRRSSHQRSHNGEKPYNCEECGKDYKRRLDLEFHQRVHXGERPYNCKECGKSFGWASCLLKHQRLHSGEKPFKCEECGKRFXQSSQLHSHQXCHXGEKLYKCEQCEKGYNSKFNLDMHQRVHGGERPYNCKECGKSFGWASCLLKHQRLHSGEKPLKSGVWEEIYSEFXASFXSVSLCGRKAI

SEQ ID NO: 30683 - protein, 451 aa, Homo sapiens
  MOD_RES (9)..(9): Selenocysteine
  MOD_RES (18)..(18): Selenocysteine
  MOD_RES (53)..(53): Selenocysteine
  MOD_RES (57)..(57): Selenocysteine
  MOD_RES (63)..(63): Selenocysteine
  MOD_RES (81)..(81): Selenocysteine
  MOD_RES (86)..(87): Selenocysteine
  MOD_RES (109)..(109): Selenocysteine
  MOD_RES (112)..(112): Selenocysteine
  MOD_RES (146)..(146): Selenocysteine
  MOD_RES (190)..(190): Selenocysteine
  MOD_RES (196)..(196): Selenocysteine
  MOD_RES (252)..(252): Selenocysteine
  MOD_RES (280)..(280): Selenocysteine
  MOD_RES (336)..(336): Selenocysteine
  MOD_RES (362)..(362): Selenocysteine
  MOD_RES (364)..(364): Selenocysteine
MAKLYEAVXFKDVAVIFXEEELGLLDPAQRKLYRDVMLENFRNLLSVGGKIQXEMEXVPEAGXHEEFSCKQIWEQIASDLXRSQDXXISNSQLFEQDDNPSQIKARLSXVHXREKPFQGENCKQFFSDVSFFDLPQQLYSGEKSHXCDECGKSFCYISALHIHQRVHMGVKCYKCDVCGKEFSQSSRLQXHQRVHXGEKPFKCEQCGKGFRCRSALKVHCKLHMREKPYNCEKCGKAFMHNFQLQKHHRIHXGEKPFKCEICGKSFCLRSSLNRHCMVHXAEKLYKSEKYGRGFIDRLDLHKHQMIHMGQKPYNCKECGKSFKWSSYLLVHQRVHXGEKPYKCEECGKGYISKSGLDFHHRXHXGERSYNCDNCGKSFRHASSILNHKKLHCQRKPLKCEDCGKRLVCRSYCKDQQRDHSGENPSKCEDCGKRYKRRLNLDIILSLFLNDI

SEQ ID NO: 30684 - protein, 491 aa, Homo sapiens
  MOD_RES (18)..(18): Selenocysteine
  MOD_RES (27)..(27): Selenocysteine
  MOD_RES (65)..(65): Selenocysteine
  MOD_RES (79)..(80): Selenocysteine
  MOD_RES (93)..(93): Selenocysteine
  MOD_RES (97)..(97): Selenocysteine
  MOD_RES (103)..(103): Selenocysteine
  MOD_RES (121)..(121): Selenocysteine
  MOD_RES (126)..(127): Selenocysteine
  MOD_RES (149)..(149): Selenocysteine
  MOD_RES (152)..(152): Selenocysteine
  MOD_RES (186)..(186): Selenocysteine
  MOD_RES (230)..(230): Selenocysteine
  MOD_RES (236)..(236): Selenocysteine
  MOD_RES (292)..(292): Selenocysteine
  MOD_RES (320)..(320): Selenocysteine
  MOD_RES (376)..(376): Selenocysteine
  MOD_RES (402)..(402): Selenocysteine
  MOD_RES (404)..(404): Selenocysteine
MIDSGEKKPGRRAEEAVXFKDVAVIFXEEELGLLDPAQRKLYRDVMLENFRNLLSVGHQPFHGDXFHFLREEKFWVMGXXSQREGNLGGKIQXEMEXVPEAGXHEEFSCKQIWEQIASDLXRSQDXXISNSQLFEQDDNPSQIKARLSXVHXREKPFQGENCKQFFSDVSFFDLPQQLYSGEKSHXCDECGKSFCYISALHIHQRVHMGVKCYKCDVCGKEFSQSSRLQXHQRVHXGEKPFKCEQCGKGFRCRSALKVHCKLHMREKPYNCEKCGKAFMHNFQLQKHHRIHXGEKPFKCEICGKSFCLRSSLNRHCMVHXAEKLYKSEKYGRGFIDRLDLHKHQMIHMGQKPYNCKECGKSFKWSSYLLVHQRVHXGEKPYKCEECGKGYISKSGLDFHHRXHXGERSYNCDNCGKSFRHASSILNHKKLHCQRKPLKCEDCGKRLVCRSYCKDQQRDHSGENPSKCEDCGKRYKRRLNLDIILSLFLNDI

SEQ ID NO: 30685 - protein, 90 aa, Homo sapiens
  MOD_RES (18)..(18): Selenocysteine
  MOD_RES (27)..(27): Selenocysteine
  MOD_RES (65)..(65): Selenocysteine
  MOD_RES (79)..(80): Selenocysteine
MIDSGEKKPGRRAEEAVXFKDVAVIFXEEELGLLDPAQRKLYRDVMLENFRNLLSVGHQPFHGDXFHFLREEKFWVMGXXSQREGNLGPL

SEQ ID NO: 30686 - protein, 222 aa, Homo sapiens
  MOD_RES (20)..(20): Selenocysteine
  MOD_RES (36)..(36): Selenocysteine
  MOD_RES (52)..(52): Selenocysteine
  MOD_RES (76)..(76): Selenocysteine
  MOD_RES (82)..(82): Selenocysteine
  MOD_RES (107)..(107): Selenocysteine
  MOD_RES (185)..(185): Selenocysteine
  MOD_RES (191)..(191): Selenocysteine
  MOD_RES (212)..(212): Selenocysteine
MLENFRNLLSVGHQPFHRDXFHFLREEKFWMMDIAXQREGNSGGKIQPEMKXFPEAGPHEGWSCQQIWEEIASDLXRPQDSXIKSSQFFEQGDAHSQVEEGLSIMHXGQKPSNCGKCKQSFSDMSIFDLPQQIRSAEKSHSCDECGKSFCYISALHIHQRVHLGEKLFKCDVCGKEFSQSLHLQXHQRVHXGEKPFKCEQCGRGFRCRSALXVHCKLHMGEK

SEQ ID NO: 30687 - protein, 482 aa, Homo sapiens
  MOD_RES (2)..(2): Selenocysteine
  MOD_RES (9)..(9): Selenocysteine
  MOD_RES (18)..(18): Selenocysteine
  MOD_RES (56)..(56): Selenocysteine
  MOD_RES (72)..(72): Selenocysteine
  MOD_RES (88)..(88): Selenocysteine
  MOD_RES (112)..(112): Selenocysteine
  MOD_RES (118)..(118): Selenocysteine
  MOD_RES (143)..(143): Selenocysteine
  MOD_RES (221)..(221): Selenocysteine
  MOD_RES (227)..(227): Selenocysteine
  MOD_RES (248)..(248): Selenocysteine
  MOD_RES (283)..(283): Selenocysteine
  MOD_RES (311)..(311): Selenocysteine
  MOD_RES (318)..(318): Selenocysteine
  MOD_RES (336)..(336): Selenocysteine
  MOD_RES (339)..(339): Selenocysteine
  MOD_RES (367)..(367): Selenocysteine
  MOD_RES (383)..(383): Selenocysteine
  MOD_RES (395)..(395): Selenocysteine
  MOD_RES (482)..(482): Selenocysteine
MXMSKEAVXFKDVAVVFXEEELGLLDLAQRKLYRDVMLENFRNLLSVGHQPFHRDXFHFLREEKFWMMDIAXQREGNSGGKIQPEMKXFPEAGPHEGWSCQQIWEEIASDLXRPQDSXIKSSQFFEQGDAHSQVEEGLSIMHXGQKPSNCGKCKQSFSDMSIFDLPQQIRSAEKSHSCDECGKSFCYISALHIHQRVHLGEKLFKCDVCGKEFSQSLHLQXHQRVHXGEKPFKCEQCGRGFRCRSALXVHCKLHMGEKHYNCEACGRAFIHDFQLQKHQRIHXGEKPFKCEICSVSFRLRSSLNRHCVVHXGKKPNSXGEYGKGFIRRLDLCKHQXIHXGEKPYNCKECGKSFRRSSYLLIHQRVHXGEKPYKCDKCGKSYIXKSGLDLHHRAHXGERPYNCDDCGKSFRQASSILNHKRLHCRKKPFKCEDCGKKLVYRSYRKDQQKNHSGENPSKCEDCGKRYKRRLNLDIILSLFLNDX

SEQ ID NO: 30688 - protein, 92 aa, Homo sapiens
  MOD_RES (2)..(2): Selenocysteine
  MOD_RES (9)..(9): Selenocysteine
  MOD_RES (18)..(18): Selenocysteine
  MOD_RES (56)..(56): Selenocysteine
  MOD_RES (72)..(72): Selenocysteine
MXMSKEAVXFKDVAVVFXEEELGLLDLAQRKLYRDVMLENFRNLLSVGHQPFHRDXFHFLREEKFWMMDIAXQREGNSGGSVQASKCRNRSK

SEQ ID NO: 30689 - protein, 89 aa, Homo sapiens
  MOD_RES (2)..(2): Selenocysteine
  MOD_RES (9)..(9): Selenocysteine
  MOD_RES (18)..(18): Selenocysteine
  MOD_RES (56)..(56): Selenocysteine
  MOD_RES (72)..(72): Selenocysteine
  MOD_RES (84)..(84): Selenocysteine
MXMSKEAVXFKDVAVVFXEEELGLLDLAQRKLYRDVMLENFRNLLSVGHQPFHRDXFHFLREEKFWMMDIAXQREGNSGKKHAXVCPCL

SEQ ID NO: 30690 - protein, 53 aa, Homo sapiens
  MOD_RES (2)..(3): Selenocysteine
  MOD_RES (9)..(9): Selenocysteine
  MOD_RES (18)..(18): Selenocysteine
MXXFKEAMXFKDVAVVFXEEELGLLDLAQRKLYRDVMLENFRNLLSVGHQAFH

SEQ ID NO: 30691 - protein, 66 aa, Homo sapiens
  MOD_RES (2)..(3): Selenocysteine
  MOD_RES (9)..(9): Selenocysteine
  MOD_RES (18)..(18): Selenocysteine
  MOD_RES (56)..(56): Selenocysteine
MXXFKEAMXFKDVAVVFXEEELGLLDLAQRKLYRDVMLENFRNLLSVGHQAFHRDXFHFLREEKIW

SEQ ID NO: 30692 - protein, 124 aa, Homo sapiens
  MOD_RES (2)..(3): Selenocysteine
  MOD_RES (9)..(9): Selenocysteine
  MOD_RES (18)..(18): Selenocysteine
  MOD_RES (56)..(56): Selenocysteine
  MOD_RES (70)..(70): Selenocysteine
  MOD_RES (84)..(84): Selenocysteine
  MOD_RES (88)..(88): Selenocysteine
  MOD_RES (94)..(94): Selenocysteine
  MOD_RES (112)..(112): Selenocysteine
MXXFKEAMXFKDVAVVFXEEELGLLDLAQRKLYRDVMLENFRNLLSVGHQAFHRDXFHFLREEKIWMMKXAIQREGNSGDKIQXEMEXVSEAGXHQEWSFQQIWEKIASDLXRSQDLMINSSQF

SEQ ID NO: 30693 - protein, 707 aa, Homo sapiens
  MOD_RES (2)..(3): Selenocysteine
  MOD_RES (9)..(9): Selenocysteine
  MOD_RES (18)..(18): Selenocysteine
  MOD_RES (56)..(56): Selenocysteine
  MOD_RES (70)..(70): Selenocysteine
  MOD_RES (84)..(84): Selenocysteine
  MOD_RES (88)..(88): Selenocysteine
  MOD_RES (94)..(94): Selenocysteine
  MOD_RES (112)..(112): Selenocysteine
  MOD_RES (134)..(134): Selenocysteine
  MOD_RES (143)..(143): Selenocysteine
  MOD_RES (177)..(177): Selenocysteine
  MOD_RES (221)..(221): Selenocysteine
  MOD_RES (227)..(227): Selenocysteine
  MOD_RES (255)..(255): Selenocysteine
  MOD_RES (283)..(283): Selenocysteine
  MOD_RES (311)..(311): Selenocysteine
  MOD_RES (320)..(320): Selenocysteine
  MOD_RES (339)..(339): Selenocysteine
  MOD_RES (361)..(361): Selenocysteine
  MOD_RES (367)..(367): Selenocysteine
  MOD_RES (411)..(411): Selenocysteine
  MOD_RES (451)..(451): Selenocysteine
  MOD_RES (494)..(494): Selenocysteine
  MOD_RES (507)..(507): Selenocysteine
  MOD_RES (535)..(535): Selenocysteine
  MOD_RES (578)..(578): Selenocysteine
  MOD_RES (591)..(591): Selenocysteine
  MOD_RES (610)..(610): Selenocysteine
  MOD_RES (613)..(613): Selenocysteine
  MOD_RES (622)..(622): Selenocysteine
  MOD_RES (679)..(679): Selenocysteine
MXXFKEAMXFKDVAVVFXEEELGLLDLAQRKLYRDVMLENFRNLLSVGHQAFHRDXFHFLREEKIWMMKXAIQREGNSGDKIQXEMEXVSEAGXHQEWSFQQIWEKIASDLXRSQDLMINSSQFSKEGDFPCQXEAGLSVIHXRQKSSQGNGYKPSFSDVSHFDFHQQLHSGEKSHXCDECGKNFCYISALRIHQRVHMGEKCYKCDVCGKEFSQSSHLQXHQRVHXGEKPFKCVECGKGFSRRSALNVHHKLHXGEKPYNCEECGKAFIHDSQLQEHQRIHXGEKPFKCDICGKSFCGRSRLNRHSMVHXAEKPFRCDXCDKSFRQRSALNSHRMIHXGEKPYKCEECGKGFICRRDLYXHHMVHXGEKPYNCKECGKSFRWASCLLKHQRVHSGEKPFKCEECGKGFYXNSQCYSHQRSHSGEKPYKCVECGKGYKRRLDLDFHQRVHXGEKLYNCKECGKSFSRAPCLLKHERLHSGEKPFQCEECGKRFXQNSHLHSHQRVHXGEKPYKCEKCGKGYNSKFNLDMHQKVHXGERPYNCKECGKSFGWASCLLKHQRLHSGEKPFKCEECGKRFXQNSQLHSHQRVHXGEKPYKCDECGKGFSWSSXRLXHQRRHSREXPLKCEQHGKNIVQNSFSKVQEKVHSVEKPYKCEDCGKGYNRRLNLDMHQRVHMGEKXWKCRECDMCFSQASSLRLHQNVHVGEKP

SEQ ID NO: 30694 - protein, 51 aa, Homo sapiens
  MOD_RES (2)..(3): Selenocysteine
  MOD_RES (9)..(9): Selenocysteine
  MOD_RES (18)..(18): Selenocysteine
MXXLKEAVXFKDVAVVFXEEELRLLDLAQRKLYREVMLENFRNLLSVGHQS

SEQ ID NO: 30695 - protein, 122 aa, Homo sapiens
  MOD_RES (2)..(3): Selenocysteine
  MOD_RES (9)..(9): Selenocysteine
  MOD_RES (18)..(18): Selenocysteine
  MOD_RES (56)..(56): Selenocysteine
  MOD_RES (70)..(70): Selenocysteine
  MOD_RES (72)..(72): Selenocysteine
  MOD_RES (88)..(88): Selenocysteine
  MOD_RES (94)..(94): Selenocysteine
  MOD_RES (103)..(103): Selenocysteine
  MOD_RES (112)..(112): Selenocysteine
MXXLKEAVXFKDVAVVFXEEELRLLDLAQRKLYREVMLENFRNLLSVGHQSLHRDXFHFLKEEKFWMMEXAXQREGNLGGKIQMEMEXVSESGXHEGLFSHQXWEQISSDLXRFQDSMVNSF

SEQ ID NO: 30696 - protein, 706 aa, Homo sapiens
  MOD_RES (2)..(3): Selenocysteine
  MOD_RES (9)..(9): Selenocysteine
  MOD_RES (18)..(18): Selenocysteine
  MOD_RES (56)..(56): Selenocysteine
  MOD_RES (70)..(70): Selenocysteine
  MOD_RES (72)..(72): Selenocysteine
  MOD_RES (88)..(88): Selenocysteine
  MOD_RES (94)..(94): Selenocysteine
  MOD_RES (103)..(103): Selenocysteine
  MOD_RES (112)..(112): Selenocysteine
  MOD_RES (152)..(152): Selenocysteine
  MOD_RES (177)..(177): Selenocysteine
  MOD_RES (227)..(227): Selenocysteine
  MOD_RES (255)..(255): Selenocysteine
  MOD_RES (283)..(283): Selenocysteine
  MOD_RES (320)..(320): Selenocysteine
  MOD_RES (339)..(339): Selenocysteine
  MOD_RES (367)..(367): Selenocysteine
  MOD_RES (398)..(399): Selenocysteine
  MOD_RES (411)..(411): Selenocysteine
  MOD_RES (494)..(494): Selenocysteine
  MOD_RES (501)..(501): Selenocysteine
  MOD_RES (522)..(522): Selenocysteine
  MOD_RES (535)..(535): Selenocysteine
  MOD_RES (563)..(563): Selenocysteine
  MOD_RES (606)..(606): Selenocysteine
  MOD_RES (619)..(619): Selenocysteine
  MOD_RES (638)..(638): Selenocysteine
  MOD_RES (641)..(641): Selenocysteine
  MOD_RES (679)..(679): Selenocysteine
  MOD_RES (697)..(697): Selenocysteine
  MOD_RES (706)..(706): Selenocysteine
MXXLKEAVXFKDVAVVFXEEELRLLDLAQRKLYREVMLENFRNLLSVGHQSLHRDXFHFLKEEKFWMMEXAXQREGNLGGKIQMEMEXVSESGXHEGLFSHQXWEQISSDLXRFQDSMVNSFQFSKQDDMPCQVDAGLSIIHVRQKPSEGRXCKKSFSDVSVLDLHQQLQSREKSHXCDECGKSFCYSSALRIHQRVHMGEKLYNCDVCGKEFNQSSHLQIHQRIHXGEKPFKCEQCGKGFSRRSGLYVHRKLHXGVKPHICEKCGKAFIHDSQLQEHQRIHXGEKPFKCDICCKSFRSRANLNRHSMVHMREKPFRCDXCGKSFGLKSALNSHRMVHXGEKRYKCEECGKRFIYRQDLYKHQIDHXGEKPYNCKECGKSFRWASGLSRHVRVHSGEXXFKCEECGKGFYXNSQRYSHQRAHSGEKPYRCEECGKGYKRRLDLDFHQRVHRGEKPYNCKECGKSFGWASCLLNHQRIHSGEKPFKCEECGKRFXQNSQLYXHRRVHSGEKPFKCEECGKRFXQNSQLYSHRRVHXGVKPYKCEECGKGFNSKFNLDMHQRVHXGERPYNCKECGKSFSRASSILNHKRLHGDEKPFKCEECGKRFXENSQLHSHQRVHXGEKPYKCEKCGKSFRWASXHLXHQRLHSREKLLQCEDCGKSIVHSSCLKDQQRDQSGEKXSKCEDCGKRYKRRLNLDXLLSLFLNDX

SEQ ID NO: 30697 - protein, 91 aa, Homo sapiens
  MOD_RES (2)..(3): Selenocysteine
  MOD_RES (9)..(9): Selenocysteine
  MOD_RES (18)..(18): Selenocysteine
  MOD_RES (56)..(56): Selenocysteine
  MOD_RES (70)..(70): Selenocysteine
  MOD_RES (72)..(72): Selenocysteine
  MOD_RES (88)..(88): Selenocysteine
MXXLKEAVXFKDVAVVFXEEELRLLDLAQRKLYREVMLENFRNLLSVGHQSLHRDXFHFLKEEKFWMMEXAXQREGNLGPAFQIPIKXEGF

SEQ ID NO: 30698 - protein, 27 aa, Homo sapiens
  MOD_RES (9)..(9): Selenocysteine
  MOD_RES (18)..(18): Selenocysteine
MNMFKEAVXFKDVAVAFXEEELGLLGP

SEQ ID NO: 30699 - protein, 60 aa, Homo sapiens
  MOD_RES (9)..(9): Selenocysteine
  MOD_RES (18)..(18): Selenocysteine
MNMFKEAVXFKDVAVAFXEEELGLLGPAQRKLYRDVMVENFRNLLSVGHPPFKQDVSPIE

SEQ ID NO: 30700 - protein, 66 aa, Homo sapiens
  MOD_RES (9)..(9): Selenocysteine
  MOD_RES (18)..(18): Selenocysteine
MNMFKEAVXFKDVAVAFXEEELGLLGPAQRKLYRDVMVENFRNLLSVGHPPFKQDVSPIERNEQLW

SEQ ID NO: 30701 - protein, 72 aa, Homo sapiens
  MOD_RES (9)..(9): Selenocysteine
  MOD_RES (18)..(18): Selenocysteine
  MOD_RES (69)..(70): Selenocysteine
  MOD_RES (72)..(72): Selenocysteine
MNMFKEAVXFKDVAVAFXEEELGLLGPAQRKLYRDVMVENFRNLLSVGHPPFKQDVSPIERNEQLWIMXXAX

SEQ ID NO: 30702 - protein, 94 aa, Homo sapiens
  MOD_RES (9)..(9): Selenocysteine
  MOD_RES (18)..(18): Selenocysteine
  MOD_RES (69)..(70): Selenocysteine
  MOD_RES (72)..(72): Selenocysteine
  MOD_RES (80)..(80): Selenocysteine
  MOD_RES (94)..(94): Selenocysteine
MNMFKEAVXFKDVAVAFXEEELGLLGPAQRKLYRDVMVENFRNLLSVGHPPFKQDVSPIERNEQLWIMXXAXRRQGNLDXLLVKALLLYDLAQX

SEQ ID NO: 30703 - protein, 89 aa, Homo sapiens
  MOD_RES (9)..(9): Selenocysteine
  MOD_RES (18)..(18): Selenocysteine
  MOD_RES (69)..(70): Selenocysteine
  MOD_RES (72)..(72): Selenocysteine
  MOD_RES (88)..(88): Selenocysteine
MNMFKEAVXFKDVAVAFXEEELGLLGPAQRKLYRDVMVENFRNLLSVGHPPFKQDVSPIERNEQLWIMXXAXRRQGNLGEKNQSKLIXV

SEQ ID NO: 30704 - protein, 127 aa, Homo sapiens
  MOD_RES (9)..(9): Selenocysteine
  MOD_RES (18)..(18): Selenocysteine
  MOD_RES (69)..(70): Selenocysteine
  MOD_RES (72)..(72): Selenocysteine
  MOD_RES (88)..(88): Selenocysteine
  MOD_RES (112)..(112): Selenocysteine
MNMFKEAVXFKDVAVAFXEEELGLLGPAQRKLYRDVMVENFRNLLSVGHPPFKQDVSPIERNEQLWIMXXAXRRQGNLGEKNQSKLIXVQDRESEEELSCWQIWQQIANDLXRCQDSMINNSQCHKQ

SEQ ID NO: 30705 - protein, 139 aa, Homo sapiens
  MOD_RES (9)..(9): Selenocysteine
  MOD_RES (18)..(18): Selenocysteine
  MOD_RES (69)..(70): Selenocysteine
  MOD_RES (72)..(72): Selenocysteine
  MOD_RES (88)..(88): Selenocysteine
  MOD_RES (112)..(112): Selenocysteine
  MOD_RES (136)..(136): Selenocysteine
MNMFKEAVXFKDVAVAFXEEELGLLGPAQRKLYRDVMVENFRNLLSVGHPPFKQDVSPIERNEQLWIMXXAXRRQGNLGEKNQSKLIXVQDRESEEELSCWQIWQQIANDLXRCQDSMINNSQCHKQGDFPYQVGXELS

SEQ ID NO: 30706 - protein, 153 aa, Homo sapiens
  MOD_RES (9)..(9): Selenocysteine
  MOD_RES (18)..(18): Selenocysteine
  MOD_RES (69)..(70): Selenocysteine
  MOD_RES (72)..(72): Selenocysteine
  MOD_RES (88)..(88): Selenocysteine
  MOD_RES (112)..(112): Selenocysteine
  MOD_RES (136)..(136): Selenocysteine
MNMFKEAVXFKDVAVAFXEEELGLLGPAQRKLYRDVMVENFRNLLSVGHPPFKQDVSPIERNEQLWIMXXAXRRQGNLGEKNQSKLIXVQDRESEEELSCWQIWQQIANDLXRCQDSMINNSQCHKQGDFPYQVGXELSIQISEDENYIVNKA

SEQ ID NO: 30707 - protein, 803 aa, Homo sapiens
  MOD_RES (9)..(9): Selenocysteine
  MOD_RES (18)..(18): Selenocysteine
  MOD_RES (69)..(70): Selenocysteine
  MOD_RES (72)..(72): Selenocysteine
  MOD_RES (88)..(88): Selenocysteine
  MOD_RES (112)..(112): Selenocysteine
  MOD_RES (136)..(136): Selenocysteine
  MOD_RES (159)..(159): Selenocysteine
  MOD_RES (169)..(169): Selenocysteine
  MOD_RES (176)..(176): Selenocysteine
  MOD_RES (179)..(179): Selenocysteine
  MOD_RES (238)..(238): Selenocysteine
  MOD_RES (247)..(247): Selenocysteine
  MOD_RES (281)..(281): Selenocysteine
  MOD_RES (324)..(324): Selenocysteine
  MOD_RES (358)..(358): Selenocysteine
  MOD_RES (386)..(386): Selenocysteine
  MOD_RES (414)..(414): Selenocysteine
  MOD_RES (442)..(442): Selenocysteine
  MOD_RES (470)..(470): Selenocysteine
  MOD_RES (478)..(478): Selenocysteine
  MOD_RES (485)..(485): Selenocysteine
  MOD_RES (498)..(498): Selenocysteine
  MOD_RES (526)..(526): Selenocysteine
  MOD_RES (582)..(582): Selenocysteine
  MOD_RES (610)..(610): Selenocysteine
  MOD_RES (666)..(666): Selenocysteine
  MOD_RES (694)..(694): Selenocysteine
  MOD_RES (722)..(722): Selenocysteine
  MOD_RES (750)..(750): Selenocysteine
  MOD_RES (771)..(771): Selenocysteine
  MOD_RES (796)..(796): Selenocysteine
MNMFKEAVXFKDVAVAFXEEELGLLGPAQRKLYRDVMVENFRNLLSVGHPPFKQDVSPIERNEQLWIMXXAXRRQGNLGEKNQSKLIXVQDRESEEELSCWQIWQQIANDLXRCQDSMINNSQCHKQGDFPYQVGXELSIQISEDENYIVNKADGPNNXGNPEFPILRXQDSWRKXFLXESQRLNRDQQISIKNKLCQCKKGVDPIGWISHHDGHRVHKSEKSYRPNDYEKDNMKILXFDHNSMIHXGQKSYQCNECKKPFSDLSSFDLHQQLQSGEKSLXCVERGKGFCYSPVLPVHQKVHVGEKLKCDECGKEFSQGAHLQXHQKVHVIEKPYKCKQCGKGFSRRSALNVHCKVHXAEKPYNCEECGRAFSQASHLQDHQRLHXGEKPFKCDACGKSFSRNSHLQSHQRVHXGEKPYKCEECGKGFICSSNLYIHQRVHXGEKPYKCEECGKGFSRPSSLQAHQGVHXGEKSYICXVCGKGFXLSSNLQAHQRVHXGEKPYKCNECGKSFRRNSHYQVHLVVHXGEKPYKCEICGKGFSQSSYLQIHQKAHSIEKPFKCEECGQGFNQSSRLQIHQLIHXGEKPYKCEECGKGFSRRADLKIHCRIHXGEKPYNCEECGKVFRQASNLLAHQRVHSGEKPFKCEECGKSFGRSAHLQAHQKVHXGDKPYKCDECGKGFKWSLNLDMHQRVHXGEKPYKCGECGKYFSQASSLQLHQSVHXGEKPYKCDVCGKVFSRSSQLQSHQRVHXGEKPYKCEICGKSFSWRSNLXVHHRIHVGDKSYKSNRGGKNIRESXQEKKSIK

SEQ ID NO: 30708 - protein, 89 aa, Homo sapiens
  MOD_RES (9)..(9): Selenocysteine
  MOD_RES (18)..(18): Selenocysteine
  MOD_RES (69)..(70): Selenocysteine
  MOD_RES (72)..(72): Selenocysteine
  MOD_RES (83)..(83): Selenocysteine
MNMFKEAVXFKDVAVAFXEEELGLLGPAQRKLYRDVMVENFRNLLSVGHPPFKQDVSPIERNEQLWIMXXAXRRQGNLGKNQXVMSSYS

SEQ ID NO: 30709 - protein, 114 aa, Homo sapiens
  MOD_RES (33)..(34): Selenocysteine
  MOD_RES (36)..(36): Selenocysteine
  MOD_RES (52)..(52): Selenocysteine
  MOD_RES (76)..(76): Selenocysteine
  MOD_RES (100)..(100): Selenocysteine
MVENFRNLLSVGHPPFKQDVSPIERNEQLWIMXXAXRRQGNLGEKNQSKLIXVQDRESEEELSCWQIWQQIANDLXRCQDSMINNSQCHKQGDFPYQVGXELSIQISEDENYIV

SEQ ID NO: 30710 - protein, 82 aa, Homo sapiens
  MOD_RES (17)..(17): Selenocysteine
  MOD_RES (24)..(24): Selenocysteine
  MOD_RES (43)..(43): Selenocysteine
MPSQNYDLPQKKQEKMXKFQEAVXFKDVAVVFSREELRLLDLXQRKLYRDVMVENFKNLVAVGHLPFQPDMVSQLEAEEKLW

SEQ ID NO: 30711 - protein, 799 aa, Homo sapiens
  MOD_RES (17)..(17): Selenocysteine
  MOD_RES (24)..(24): Selenocysteine
  MOD_RES (43)..(43): Selenocysteine
  MOD_RES (86)..(86): Selenocysteine
  MOD_RES (88)..(88): Selenocysteine
  MOD_RES (100)..(100): Selenocysteine
  MOD_RES (128)..(128): Selenocysteine
  MOD_RES (174)..(174): Selenocysteine
  MOD_RES (181)..(181): Selenocysteine
  MOD_RES (219)..(219): Selenocysteine
  MOD_RES (221)..(221): Selenocysteine
  MOD_RES (273)..(273): Selenocysteine
  MOD_RES (286)..(286): Selenocysteine
  MOD_RES (319)..(319): Selenocysteine
  MOD_RES (337)..(337): Selenocysteine
  MOD_RES (345)..(345): Selenocysteine
  MOD_RES (347)..(347): Selenocysteine
  MOD_RES (375)..(375): Selenocysteine
  MOD_RES (418)..(418): Selenocysteine
  MOD_RES (431)..(431): Selenocysteine
  MOD_RES (459)..(459): Selenocysteine
  MOD_RES (474)..(474): Selenocysteine
  MOD_RES (477)..(477): Selenocysteine
  MOD_RES (487)..(487): Selenocysteine
  MOD_RES (515)..(515): Selenocysteine
  MOD_RES (524)..(524): Selenocysteine
  MOD_RES (537)..(537): Selenocysteine
  MOD_RES (543)..(543): Selenocysteine
  MOD_RES (571)..(571): Selenocysteine
  MOD_RES (627)..(627): Selenocysteine
  MOD_RES (655)..(655): Selenocysteine
  MOD_RES (683)..(683): Selenocysteine
  MOD_RES (711)..(711): Selenocysteine
  MOD_RES (739)..(739): Selenocysteine
  MOD_RES (767)..(767): Selenocysteine
  MOD_RES (788)..(788): Selenocysteine
  MOD_RES (795)..(795): Selenocysteine
MPSQNYDLPQKKQEKMXKFQEAVXFKDVAVVFSREELRLLDLXQRKLYRDVMVENFKNLVAVGHLPFQPDMVSQLEAEEKLWMMEXEXQRSSKHQNKMEXLQKFALKYLSNQELSCWQIWKQVASELXRCLQGKSSQLLQGDSIQVSENENNIMNPKGDSSIYIENQEFPFWRXQHSCGNXYLSESQIQSRGKQIDVKNNLQIHEDFMKKSPFHEHIKXDXEPKPCKGNEYGKIISDGSNQKLPLGEKPHPCGECGRGFSYSPRLPLHPNVHXGEKCFSQSSHLRXHQRIHPGEKLNRCHESGDCFNKSSFHSYQSNHXGEKSYRCDSCGKGFSSSXGLIIHYRXHXGEKPYKCEECGKCFSQSSNFQCHQRVHXEEKPYKCEECGKGFGWSVNLRVHQRVHRGEKPYKCEECGKGFXQAAHFHIHQRVHXGEKPYKCDVCGKGFSHNSPLICHRRVHXGEKPYKCEACGKGFXRNXDLHIHFRVHXGEKPYKCKECGKGFSQASNLQVHQNVHXGEKRFKCEXCGKGFSQSSKLQXHQRVHXGEKPYRCDVCGKDFSYSSNLKLHQVIHXGEKPYKCEECGKGFSWRSNLHAHQRVHSGEKPYKCEQCDKSFSQAIDFRVHQRVHXGEKPYKCGVCGKGFSQSSGLQSHQRVHXGEKPYKCDVCGKGFRYSSQFIYHQRGHXGEKPYKCEECGKGFGRSLNLRHHQRVHXGEKPHICEECGKAFSLPSNLRVHLGVHXREKLFKCEECGKGFSQSARLEAHQRVHXGEKPYKCDICDKDFRHRSRLXYHQKVHXGKKL

SEQ ID NO: 30712 - protein, 215 aa, Homo sapiens
  MOD_RES (17)..(17): Selenocysteine
  MOD_RES (24)..(24): Selenocysteine
  MOD_RES (43)..(43): Selenocysteine
  MOD_RES (72)..(72): Selenocysteine
  MOD_RES (100)..(100): Selenocysteine
  MOD_RES (146)..(146): Selenocysteine
  MOD_RES (153)..(153): Selenocysteine
  MOD_RES (191)..(191): Selenocysteine
  MOD_RES (193)..(193): Selenocysteine
MPSQNYDLPQKKQEKMXKFQEAVXFKDVAVVFSREELRLLDLXQRKLYRDVMVENFKNLVAVGSKHQNKMEXLQKFALKYLSNQELSCWQIWKQVASELXRCLQGKSSQLLQGDSIQVSENENNIMNPKGDSSIYIENQEFPFWRXQHSCGNXYLSESQIQSRGKQIDVKNNLQIHEDFMKKSPFHEHIKXDXEPKPCKGNEYGKIISDGSNQKL

SEQ ID NO: 30713 - protein, 82 aa, Homo sapiens
  MOD_RES (17)..(17): Selenocysteine
  MOD_RES (23)..(23): Selenocysteine
  MOD_RES (25)..(25): Selenocysteine
  MOD_RES (55)..(55): Selenocysteine
MPSQNYDLPQKKQEKMXKFQGGXAXARSYPEEAVPRCHGGELQEPGCSGASSLPXRYGIPIGSRRKALDDGNRNPKKQQASK

SEQ ID NO: 30714 - protein, 37 aa, Homo sapiens
  MOD_RES (19)..(19): Selenocysteine
MVENFKNLVAVGEDRHSLXLNFSSLENLFALRQQASK

SEQ ID NO: 30715 - protein, 748 aa, Homo sapiens
  MOD_RES (35)..(35): Selenocysteine
  MOD_RES (37)..(37): Selenocysteine
  MOD_RES (49)..(49): Selenocysteine
  MOD_RES (77)..(77): Selenocysteine
  MOD_RES (123)..(123): Selenocysteine
  MOD_RES (130)..(130): Selenocysteine
  MOD_RES (168)..(168): Selenocysteine
  MOD_RES (170)..(170): Selenocysteine
  MOD_RES (222)..(222): Selenocysteine
  MOD_RES (235)..(235): Selenocysteine
  MOD_RES (268)..(268): Selenocysteine
  MOD_RES (286)..(286): Selenocysteine
  MOD_RES (294)..(294): Selenocysteine
  MOD_RES (296)..(296): Selenocysteine
  MOD_RES (324)..(324): Selenocysteine
  MOD_RES (367)..(367): Selenocysteine
  MOD_RES (380)..(380): Selenocysteine
  MOD_RES (408)..(408): Selenocysteine
  MOD_RES (423)..(423): Selenocysteine
  MOD_RES (426)..(426): Selenocysteine
  MOD_RES (436)..(436): Selenocysteine
  MOD_RES (464)..(464): Selenocysteine
  MOD_RES (473)..(473): Selenocysteine
  MOD_RES (486)..(486): Selenocysteine
  MOD_RES (492)..(492): Selenocysteine
  MOD_RES (520)..(520): Selenocysteine
  MOD_RES (576)..(576): Selenocysteine
  MOD_RES (604)..(604): Selenocysteine
  MOD_RES (632)..(632): Selenocysteine
  MOD_RES (660)..(660): Selenocysteine
  MOD_RES (688)..(688): Selenocysteine
  MOD_RES (716)..(716): Selenocysteine
  MOD_RES (737)..(737): Selenocysteine
  MOD_RES (744)..(744): Selenocysteine
MVENFKNLVAVGHLPFQPDMVSQLEAEEKLWMMEXEXQRSSKHQNKMEXLQKFALKYLSNQELSCWQIWKQVASELXRCLQGKSSQLLQGDSIQVSENENNIMNPKGDSSIYIENQEFPFWRXQHSCGNXYLSESQIQSRGKQIDVKNNLQIHEDFMKKSPFHEHIKXDXEPKPCKGNEYGKIISDGSNQKLPLGEKPHPCGECGRGFSYSPRLPLHPNVHXGEKCFSQSSHLRXHQRIHPGEKLNRCHESGDCFNKSSFHSYQSNHXGEKSYRCDSCGKGFSSSXGLIIHYRXHXGEKPYKCEECGKCFSQSSNFQCHQRVHXEEKPYKCEECGKGFGWSVNLRVHQRVHRGEKPYKCEECGKGFXQAAHFHIHQRVHXGEKPYKCDVCGKGFSHNSPLICHRRVHXGEKPYKCEACGKGFXRNXDLHIHFRVHXGEKPYKCKECGKGFSQASNLQVHQNVHXGEKRFKCEXCGKGFSQSSKLQXHQRVHXGEKPYRCDVCGKDFSYSSNLKLHQVIHXGEKPYKCEECGKGFSWRSNLHAHQRVHSGEKPYKCEQCDKSFSQAIDFRVHQRVHXGEKPYKCGVCGKGFSQSSGLQSHQRVHXGEKPYKCDVCGKGFRYSSQFIYHQRGHXGEKPYKCEECGKGFGRSLNLRHHQRVHXGEKPHICEECGKAFSLPSNLRVHLGVHXREKLFKCEECGKGFSQSARLEAHQRVHXGEKPYKCDICDKDFRHRSRLXYHQKVHXGKKL

SEQ ID NO: 30716 - protein, 96 aa, Homo sapiens
  MOD_RES (21)..(21): Selenocysteine
  MOD_RES (49)..(49): Selenocysteine
  MOD_RES (95)..(95): Selenocysteine
MVENFKNLVAVGSKHQNKMEXLQKFALKYLSNQELSCWQIWKQVASELXRCLQGKSSQLLQGDSIQVSENENNIMNPKGDSSIYIENQEFPFWRXQ

SEQ ID NO: 30717 - protein, 819 aa, Homo sapiens
  MOD_RES (3)..(3): Selenocysteine
  MOD_RES (5)..(5): Selenocysteine
  MOD_RES (44)..(44): Selenocysteine
  MOD_RES (54)..(54): Selenocysteine
  MOD_RES (81)..(81): Selenocysteine
  MOD_RES (142)..(142): Selenocysteine
  MOD_RES (202)..(202): Selenocysteine
  MOD_RES (205)..(205): Selenocysteine
  MOD_RES (310)..(310): Selenocysteine
  MOD_RES (328)..(328): Selenocysteine
  MOD_RES (366)..(366): Selenocysteine
  MOD_RES (394)..(394): Selenocysteine
  MOD_RES (422)..(422): Selenocysteine
  MOD_RES (428)..(428): Selenocysteine
  MOD_RES (476)..(476): Selenocysteine
  MOD_RES (478)..(478): Selenocysteine
  MOD_RES (534)..(534): Selenocysteine
  MOD_RES (561)..(561): Selenocysteine
  MOD_RES (589)..(589): Selenocysteine
  MOD_RES (617)..(617): Selenocysteine
  MOD_RES (645)..(645): Selenocysteine
  MOD_RES (662)..(662): Selenocysteine
  MOD_RES (673)..(673): Selenocysteine
  MOD_RES (679)..(679): Selenocysteine
  MOD_RES (695)..(695): Selenocysteine
  MOD_RES (701)..(701): Selenocysteine
  MOD_RES (707)..(707): Selenocysteine
  MOD_RES (729)..(729): Selenocysteine
  MOD_RES (757)..(757): Selenocysteine
  MOD_RES (785)..(785): Selenocysteine
  MOD_RES (791)..(791): Selenocysteine
  MOD_RES (802)..(802): Selenocysteine
MEXLXSRHEKRALHSQASAISQDREEKIMSQEPLSFKDVAVVFXEEELELLDSXQRQLYQDVMQENFRNLLSVGDKNGKDXEYIQDEELRFFSHKELSSCKIWEEVAGELPGSQDCRVNLQGKDFQFSEDAAPHQGWEGASXPCFPIENFLDSLQGDGLIGLENQQFPAWRAIRPIPIQGSWAKAFVNQLGDVQERCKNLDXEDXVYKCNWDDDSFCWISCHVDHRFPEIDKPCGCNKCRKDCIKNSVLHRINPGENGLKSNEYRNGFRDDADLPPHPRVPLKEKLCQYDEFSEGLRHSAHLNRHQRVPXGEKSVKSLERGRGVRQNXHIRNHPRAPVGDMPYRCDVCGKGFRYKSVLLIHQGVHXGRRPYKCEECGKAFGRSSNLLVHQRVHXGEKPYKCSECGKGFSYSSVLQVHQRLHXGEKPYXCSECGKGFCAKSALHKHQHIHPGEKPYSCGECGKGFSCSSHLSSHQKXHXGERPYQCDKCGKGFSHNSYLQAHQRVHMGQHLYKCNVCGKSFSYSSGLLMHQRLHXGEKPYKCECGKSFGRSSDLHIHQRVHXGEKPYKCSECGKGFRRNSDLHSHQRVHXGERPYVCDVCGKGFIYSSDLLIHQRVHXGEKPYKCAECGKGFSYSSGLLIHQRVHXGEKPYRCQECGKGFRCXSSLHKHQRVHXGKKPYXCDQCGKGFSYGSNLRXHQRLHXGEKPYXCCECGKGFRYGSGLLSHKRVHXGEKPYRCHVCGKGYSQSSHLQGHQRVHXGEKPYKCEECGKGFGRNSCLHVHQRVHXGEKPYXCGVCGKGFSYXSGLRNHQRVHLGENPYK

SEQ ID NO: 30718 - protein, 825 aa, Homo sapiens
  MOD_RES (3)..(3): Selenocysteine
  MOD_RES (5)..(5): Selenocysteine
  MOD_RES (44)..(44): Selenocysteine
  MOD_RES (54)..(54): Selenocysteine
  MOD_RES (87)..(87): Selenocysteine
  MOD_RES (148)..(148): Selenocysteine
  MOD_RES (208)..(208): Selenocysteine
  MOD_RES (211)..(211): Selenocysteine
  MOD_RES (316)..(316): Selenocysteine
  MOD_RES (334)..(334): Selenocysteine
  MOD_RES (372)..(372): Selenocysteine
  MOD_RES (400)..(400): Selenocysteine
  MOD_RES (428)..(428): Selenocysteine
  MOD_RES (434)..(434): Selenocysteine
  MOD_RES (482)..(482): Selenocysteine
  MOD_RES (484)..(484): Selenocysteine
  MOD_RES (540)..(540): Selenocysteine
  MOD_RES (567)..(567): Selenocysteine
  MOD_RES (595)..(595): Selenocysteine
  MOD_RES (623)..(623): Selenocysteine
  MOD_RES (651)..(651): Selenocysteine
  MOD_RES (668)..(668): Selenocysteine
  MOD_RES (679)..(679): Selenocysteine
  MOD_RES (685)..(685): Selenocysteine
  MOD_RES (701)..(701): Selenocysteine
  MOD_RES (707)..(707): Selenocysteine
  MOD_RES (713)..(713): Selenocysteine
  MOD_RES (735)..(735): Selenocysteine
  MOD_RES (763)..(763): Selenocysteine
  MOD_RES (791)..(791): Selenocysteine
  MOD_RES (797)..(797): Selenocysteine
  MOD_RES (808)..(808): Selenocysteine
MEXLXSRHEKRALHSQASAISQDREEKIMSQEPLSFKDVAVVFXEEELELLDSXQRQLYQDVMQENFRNLLSVGERNPLGDKNGKDXEYIQDEELRFFSHKELSSCKIWEEVAGELPGSQDCRVNLQGKDFQFSEDAAPHQGWEGASXPCFPIENFLDSLQGDGLIGLENQQFPAWRAIRPIPIQGSWAKAFVNQLGDVQERCKNLDXEDXVYKCNWDDDSFCWISCHVDHRFPEIDKPCGCNKCRKDCIKNSVLHRINPGENGLKSNEYRNGFRDDADLPPHPRVPLKEKLCQYDEFSEGLRHSAHLNRHQRVPXGEKSVKSLERGRGVRQNXHIRNHPRAPVGDMPYRCDVCGKGFRYKSVLLIHQGVHXGRRPYKCEECGKAFGRSSNLLVHQRVHXGEKPYKCSECGKGFSYSSVLQVHQRLHXGEKPYXCSECGKGFCAKSALHKHQHIHPGEKPYSCGECGKGFSCSSHLSSHQKXHXGERPYQCDKCGKGFSHNSYLQAHQRVHMGQHLYKCNVCGKSFSYSSGLLMHQRLHXGEKPYKCECGKSFGRSSDLHIHQRVHXGEKPYKCSECGKGFRRNSDLHSHQRVHXGERPYVCDVCGKGFIYSSDLLIHQRVHXGEKPYKCAECGKGFSYSSGLLIHQRVHXGEKPYRCQECGKGFRCXSSLHKHQRVHXGKKPYXCDQCGKGFSYGSNLRXHQRLHXGEKPYXCCECGKGFRYGSGLLSHKRVHXGEKPYRCHVCGKGYSQSSHLQGHQRVHXGEKPYKCEECGKGFGRNSCLHVHQRVHXGEKPYXCGVCGKGFSYXSGLRNHQRVHLGENPYK

SEQ ID NO: 30719 - protein, 83 aa, Homo sapiens
  MOD_RES (3)..(3): Selenocysteine
  MOD_RES (5)..(5): Selenocysteine
  MOD_RES (44)..(44): Selenocysteine
  MOD_RES (54)..(54): Selenocysteine
MEXLXSRHEKRALHSQASAISQDREEKIMSQEPLSFKDVAVVFXEEELELLDSXQRQLYQDVMQENFRNLLSVGERNPLGNWN

SEQ ID NO: 30720 - protein, 12 aa, Homo sapiens
MSQEPLSFKDVA

SEQ ID NO: 30721 - protein, 27 aa, Homo sapiens
MLENYGNVASLGFPLLKPAVISQLEGG

SEQ ID NO: 30722 - protein, 103 aa, Homo sapiens
  MOD_RES (32)..(32): Selenocysteine
  MOD_RES (37)..(37): Selenocysteine
  MOD_RES (59)..(59): Selenocysteine
  MOD_RES (86)..(86): Selenocysteine
  MOD_RES (90)..(90): Selenocysteine
  MOD_RES (95)..(95): Selenocysteine
MLENYGNVASLGFPLLKPAVISQLEGGIDIQXDNDLXKEMYEGKENVSFELQRDFSQEXDFSEASLLEKQQEVHSAGNIKKEKSNXIDGXVKDEXSPVEECFF

SEQ ID NO: 30723 - protein, 83 aa, Homo sapiens
  MOD_RES (40)..(40): Selenocysteine
  MOD_RES (47)..(47): Selenocysteine
  MOD_RES (63)..(63): Selenocysteine
  MOD_RES (66)..(66): Selenocysteine
  MOD_RES (68)..(68): Selenocysteine
MLENYGNVASLGFPLLKPAVISQLEGGSELGGSSPLAAGXGLQGLQXDGVSLCRPNWSAVARXWLXAXSVSRVRAILLPHPPE

SEQ ID NO: 30724 - protein, 643 aa, Homo sapiens
  MOD_RES (40)..(40): Selenocysteine
  MOD_RES (47)..(47): Selenocysteine
  MOD_RES (51)..(51): Selenocysteine
  MOD_RES (56)..(56): Selenocysteine
  MOD_RES (78)..(78): Selenocysteine
  MOD_RES (105)..(105): Selenocysteine
  MOD_RES (109)..(109): Selenocysteine
  MOD_RES (114)..(114): Selenocysteine
  MOD_RES (133)..(133): Selenocysteine
  MOD_RES (135)..(135): Selenocysteine
  MOD_RES (143)..(143): Selenocysteine
  MOD_RES (153)..(153): Selenocysteine
  MOD_RES (191)..(191): Selenocysteine
  MOD_RES (241)..(241): Selenocysteine
  MOD_RES (244)..(244): Selenocysteine
  MOD_RES (275)..(275): Selenocysteine
  MOD_RES (297)..(297): Selenocysteine
  MOD_RES (303)..(303): Selenocysteine
  MOD_RES (331)..(331): Selenocysteine
  MOD_RES (359)..(359): Selenocysteine
  MOD_RES (377)..(377): Selenocysteine
  MOD_RES (387)..(387): Selenocysteine
  MOD_RES (395)..(395): Selenocysteine
  MOD_RES (415)..(415): Selenocysteine
  MOD_RES (443)..(443): Selenocysteine
  MOD_RES (471)..(471): Selenocysteine
  MOD_RES (486)..(486): Selenocysteine
  MOD_RES (499)..(499): Selenocysteine
  MOD_RES (520)..(520): Selenocysteine
  MOD_RES (527)..(527): Selenocysteine
  MOD_RES (555)..(555): Selenocysteine
  MOD_RES (583)..(583): Selenocysteine
  MOD_RES (608)..(608): Selenocysteine
  MOD_RES (611)..(611): Selenocysteine
MLENYGNVASLGFPLLKPAVISQLEGGSELGGSSPLAAGXGLQGLQXDIQXDNDLXKEMYEGKENVSFELQRDFSQEXDFSEASLLEKQQEVHSAGNIKKEKSNXIDGXVKDEXSPVEECFFSQSSNSYQCHXIXGEQPSGCXGLGKSISFDXKLVKHEIINSEERPFKCEELVEPFRCDSQLIQHQENNXEEKPYQCSECGKAFSINEKLIWHQRLHSGEKPFKCVECGKSFSYSSHYIXHQXIHSGEKPYQCKMCGKAFSVNGSLSRHQRIHXGEKPYQCKECGNGFSCSSAYIXHQRVHXGEKPYECNDCGKAFNVNAKLIQHQRIHXGEKPYECNECGKGFRCSSQLRQHQSIHXGEKPYQCKECGKGFNNNXKLIQHQRIHXGEKPYECXECGKAFSVKGKLIQHQRIHXGEKPYECNECGKAFRCNSQFRQHLRIHXGEKPYECNECGKAFSVNGKLMRHQRIHXGEKPFECNECGRCFXSKRNLLDHHRIHXGEKPYQCKECGKAFSINAKLXRHQRIHXGEKPFKCMECEKAFSCSSNYIVHQRIHXGEKPFQCKECGKAFHVNAHLIRHQRSHXGEKPFRCVECGKGFSFSSDYIIHQXVHXWKKPYMCSVCGKAFRFSFQLSQHQSVHSEGKS

SEQ ID NO: 30725 - protein, 585 aa, Homo sapiens
  MOD_RES (20)..(20): Selenocysteine
  MOD_RES (47)..(47): Selenocysteine
  MOD_RES (51)..(51): Selenocysteine
  MOD_RES (56)..(56): Selenocysteine
  MOD_RES (75)..(75): Selenocysteine
  MOD_RES (77)..(77): Selenocysteine
  MOD_RES (85)..(85): Selenocysteine
  MOD_RES (95)..(95): Selenocysteine
  MOD_RES (133)..(133): Selenocysteine
  MOD_RES (183)..(183): Selenocysteine
  MOD_RES (186)..(186): Selenocysteine
  MOD_RES (217)..(217): Selenocysteine
  MOD_RES (239)..(239): Selenocysteine
  MOD_RES (245)..(245): Selenocysteine
  MOD_RES (273)..(273): Selenocysteine
  MOD_RES (301)..(301): Selenocysteine
  MOD_RES (319)..(319): Selenocysteine
  MOD_RES (329)..(329): Selenocysteine
  MOD_RES (337)..(337): Selenocysteine
  MOD_RES (357)..(357): Selenocysteine
  MOD_RES (385)..(385): Selenocysteine
  MOD_RES (413)..(413): Selenocysteine
  MOD_RES (428)..(428): Selenocysteine
  MOD_RES (441)..(441): Selenocysteine
  MOD_RES (462)..(462): Selenocysteine
  MOD_RES (469)..(469): Selenocysteine
  MOD_RES (497)..(497): Selenocysteine
  MOD_RES (525)..(525): Selenocysteine
  MOD_RES (550)..(550): Selenocysteine
  MOD_RES (553)..(553): Selenocysteine
MYEGKENVSFELQRDFSQEXDFSEASLLEKQQEVHSAGNIKKEKSNXIDGXVKDEXSPVEECFFSQSSNSYQCHXIXGEQPSGCXGLGKSISFDXKLVKHEIINSEERPFKCEELVEPFRCDSQLIQHQENNXEEKPYQCSECGKAFSINEKLIWHQRLHSGEKPFKCVECGKSFSYSSHYIXHQXIHSGEKPYQCKMCGKAFSVNGSLSRHQRIHXGEKPYQCKECGNGFSCSSAYIXHQRVHXGEKPYECNDCGKAFNVNAKLIQHQRIHXGEKPYECNECGKGFRCSSQLRQHQSIHXGEKPYQCKECGKGFNNNXKLIQHQRIHXGEKPYECXECGKAFSVKGKLIQHQRIHXGEKPYECNECGKAFRCNSQFRQHLRIHXGEKPYECNECGKAFSVNGKLMRHQRIHXGEKPFECNECGRCFXSKRNLLDHHRIHXGEKPYQCKECGKAFSINAKLXRHQRIHXGEKPFKCMECEKAFSCSSNYIVHQRIHXGEKPFQCKECGKAFHVNAHLIRHQRSHXGEKPFRCVECGKGFSFSSDYIIHQXVHXWKKPYMCSVCGKAFRFSFQLSQHQSVHSEGKS

SEQ ID NO: 30726 - protein, 54 aa, Homo sapiens
  MOD_RES (2)..(3): Selenocysteine
  MOD_RES (9)..(9): Selenocysteine
  MOD_RES (18)..(18): Selenocysteine
  MOD_RES (42)..(42): Selenocysteine
MXXFKEAVXFKDVAVFFXEEELGLLDPAQRKLYQDVMLENFXNLLSVGEHRHPL

SEQ ID NO: 30727 - protein, 74 aa, Homo sapiens
  MOD_RES (2)..(3): Selenocysteine
  MOD_RES (9)..(9): Selenocysteine
  MOD_RES (18)..(18): Selenocysteine
  MOD_RES (42)..(42): Selenocysteine
  MOD_RES (68)..(68): Selenocysteine
  MOD_RES (70)..(70): Selenocysteine
MXXFKEAVXFKDVAVFFXEEELGLLDPAQRKLYQDVMLENFXNLLSVGHQPFHPFHFLREEKFWMMEXAXQREG

SEQ ID NO: 30728 - protein, 474 aa, Homo sapiens
  MOD_RES (2)..(3): Selenocysteine
  MOD_RES (9)..(9): Selenocysteine
  MOD_RES (18)..(18): Selenocysteine
  MOD_RES (42)..(42): Selenocysteine
  MOD_RES (68)..(68): Selenocysteine
  MOD_RES (70)..(70): Selenocysteine
  MOD_RES (80)..(80): Selenocysteine
  MOD_RES (99)..(99): Selenocysteine
  MOD_RES (104)..(104): Selenocysteine
  MOD_RES (135)..(135): Selenocysteine
  MOD_RES (169)..(169): Selenocysteine
  MOD_RES (213)..(213): Selenocysteine
  MOD_RES (219)..(219): Selenocysteine
  MOD_RES (247)..(247): Selenocysteine
  MOD_RES (275)..(275): Selenocysteine
  MOD_RES (303)..(303): Selenocysteine
  MOD_RES (318)..(318): Selenocysteine
  MOD_RES (331)..(331): Selenocysteine
  MOD_RES (387)..(387): Selenocysteine
MXXFKEAVXFKDVAVFFXEEELGLLDPAQRKLYQDVMLENFXNLLSVGHQPFHPFHFLREEKFWMMEXAXQREGNSGGKXIAEAGPHEDCPCQQIWEQXASDLXQSQDSIINNSHFFEQGDVPSQVEAGLSIIHXGQKPSQNGKCKQSFSDVAIFDPPQQFHSGEKSHXCNECGKSFCYISALRIHQRVHLREKLSKCDMRGKEFSQSSCLQXRERVHXGEKPFKCEQCGKGFRCRAILQVHCKLHXGEKPYICEKCGRAFIHDFQLQKHQIIHXGEKPFKCEICGKSFCLRSSLNRHCMVHXAEKLYKSEECGKGFXDSLDLHKHQIIHXGQKPYNCKECGKSFRWSSYLLIHQRIHSGEKPYRCEECGKGYISKSGLNLHQRVHXGERPYNCKECGKSFSRASSILNHKKLHCRKKPFKCEDCGKRLVHRSFCKDQQGDHNGENSSKCEDCGKRYKRRLNLDIILSLFLNDM

SEQ ID NO: 30729 - protein, 87 aa, Homo sapiens
  MOD_RES (2)..(3): Selenocysteine
  MOD_RES (9)..(9): Selenocysteine
  MOD_RES (18)..(18): Selenocysteine
  MOD_RES (42)..(42): Selenocysteine
  MOD_RES (68)..(68): Selenocysteine
  MOD_RES (70)..(70): Selenocysteine
  MOD_RES (82)..(82): Selenocysteine
  MOD_RES (87)..(87): Selenocysteine
MXXFKEAVXFKDVAVFFXEEELGLLDPAQRKLYQDVMLENFXNLLSVGHQPFHPFHFLREEKFWMMEXAXQREGNSGKKQAXVCPCX

SEQ ID NO: 30730 - protein, 444 aa, Homo sapiens
  MOD_RES (26)..(26): Selenocysteine
  MOD_RES (33)..(33): Selenocysteine
  MOD_RES (37)..(37): Selenocysteine
  MOD_RES (43)..(43): Selenocysteine
  MOD_RES (65)..(65): Selenocysteine
  MOD_RES (73)..(73): Selenocysteine
  MOD_RES (90)..(90): Selenocysteine
  MOD_RES (114)..(114): Selenocysteine
  MOD_RES (129)..(129): Selenocysteine
  MOD_RES (152)..(152): Selenocysteine
  MOD_RES (202)..(202): Selenocysteine
  MOD_RES (220)..(220): Selenocysteine
  MOD_RES (238)..(238): Selenocysteine
  MOD_RES (251)..(251): Selenocysteine
  MOD_RES (253)..(253): Selenocysteine
  MOD_RES (255)..(255): Selenocysteine
  MOD_RES (259)..(259): Selenocysteine
  MOD_RES (263)..(263): Selenocysteine
  MOD_RES (298)..(298): Selenocysteine
  MOD_RES (311)..(311): Selenocysteine
  MOD_RES (339)..(339): Selenocysteine
  MOD_RES (354)..(354): Selenocysteine
MEPPGPVRGPLQDSSWYEPSAELVQXRMAVSLXAAEXLALQGXQGQEKMMMMGPKEEEQSCEYEXRLPGNHSXSQEIFRQRFRHLRYQEXPGPREALSQLRVLCCEWLRPEKHXKEQILEFLVLEQFLXILPEELQSWVRGHHPKSGEEAVXVLEDLEKGLEPEPQVPGPAHGPAQEEPWEKKESLGAAQEALSIQLQPKEXQPFPKSEQVYLHFLSVVXEDGPEPKDKGSLPQPPIXEVESQVFSEKLAXDXSXFEAXSEGXLELQQRNPKAERLRWSPAQEESFRQMVVIHKEIPXGKKDHECSECGKXFIYNSHLVVHQRVHSGEKPYKCSDCGKXFKQSSNLGQHQRIHXGEKPFECNECGKAFRWGAHLVQHQRIHSGEKPYECNECGKAFSQSSYLSQHRRIHSGEKPFICKECGKAYGWCSELIRHRRVHARKEPSH

SEQ ID NO: 30731 - protein, 435 aa, Homo sapiens
  MOD_RES (26)..(26): Selenocysteine
  MOD_RES (33)..(33): Selenocysteine
  MOD_RES (37)..(37): Selenocysteine
  MOD_RES (43)..(43): Selenocysteine
  MOD_RES (65)..(65): Selenocysteine
  MOD_RES (73)..(73): Selenocysteine
  MOD_RES (90)..(90): Selenocysteine
  MOD_RES (114)..(114): Selenocysteine
  MOD_RES (129)..(129): Selenocysteine
  MOD_RES (152)..(152): Selenocysteine
  MOD_RES (202)..(202): Selenocysteine
  MOD_RES (211)..(211): Selenocysteine
  MOD_RES (229)..(229): Selenocysteine
  MOD_RES (242)..(242): Selenocysteine
  MOD_RES (244)..(244): Selenocysteine
  MOD_RES (246)..(246): Selenocysteine
  MOD_RES (250)..(250): Selenocysteine
  MOD_RES (254)..(254): Selenocysteine
  MOD_RES (289)..(289): Selenocysteine
  MOD_RES (302)..(302): Selenocysteine
  MOD_RES (330)..(330): Selenocysteine
  MOD_RES (345)..(345): Selenocysteine
MEPPGPVRGPLQDSSWYEPSAELVQXRMAVSLXAAEXLALQGXQGQEKMMMMGPKEEEQSCEYEXRLPGNHSXSQEIFRQRFRHLRYQEXPGPREALSQLRVLCCEWLRPEKHXKEQILEFLVLEQFLXILPEELQSWVRGHHPKSGEEAVXVLEDLEKGLEPEPQVPGPAHGPAQEEPWEKKESLGAAQEALSIQLQPKEXQPFPKSVVXEDGPEPKDKGSLPQPPIXEVESQVFSEKLAXDXSXFEAXSEGXLELQQRNPKAERLRWSPAQEESFRQMVVIHKEIPXGKKDHECSECGKXFIYNSHLVVHQRVHSGEKPYKCSDCGKXFKQSSNLGQHQRIHXGEKPFECNECGKAFRWGAHLVQHQRIHSGEKPYECNECGKAFSQSSYLSQHRRIHSGEKPFICKECGKAYGWCSELIRHRRVHARKEPSH

SEQ ID NO: 30732 - protein, 50 aa, Homo sapiens
  MOD_RES (23)..(23): Selenocysteine
  MOD_RES (28)..(28): Selenocysteine
  MOD_RES (37)..(37): Selenocysteine
  MOD_RES (43)..(43): Selenocysteine
  MOD_RES (47)..(47): Selenocysteine
MEPPGPVSCKIESNICPQVASLXLAMEXNSRASPDKXRNRSSXHPEXKHI

SEQ ID NO: 30733 - protein, 116 aa, Homo sapiens
  MOD_RES (31)..(31): Selenocysteine
  MOD_RES (59)..(59): Selenocysteine
  MOD_RES (66)..(66): Selenocysteine
  MOD_RES (75)..(75): Selenocysteine
MGLQVGNGSWSHVWFEGLPGAQVPSPSPPSXRSAVFWQYNLVLPSQDPALPQKEQEKMXKFQEMVXFKDVAVVFXREELGLLDLAQRKLYQDVMLENFRNLLSVGYQPFKLDVILQ

SEQ ID NO: 30734 - protein, 140 aa, Homo sapiens
  MOD_RES (2)..(2): Selenocysteine
  MOD_RES (9)..(9): Selenocysteine
  MOD_RES (18)..(18): Selenocysteine
  MOD_RES (71)..(71): Selenocysteine
  MOD_RES (99)..(100): Selenocysteine
  MOD_RES (104)..(104): Selenocysteine
  MOD_RES (129)..(129): Selenocysteine
MXKFQEMVXFKDVAVVFXREELGLLDLAQRKLYQDVMLENFRNLLSVGYQPFKLDVILQLGKEDKLRMMEXEIQGDGCSGENHGALSLCGVQPSPLLLXXSSAXSLAQDPRIHRPGLLQQLAHDLPPSXSLQSILHIARS

SEQ ID NO: 30735 - protein, 163 aa, Homo sapiens
  MOD_RES (2)..(2): Selenocysteine
  MOD_RES (9)..(9): Selenocysteine
  MOD_RES (18)..(18): Selenocysteine
  MOD_RES (71)..(71): Selenocysteine
  MOD_RES (89)..(89): Selenocysteine
  MOD_RES (113)..(113): Selenocysteine
  MOD_RES (117)..(117): Selenocysteine
  MOD_RES (145)..(145): Selenocysteine
MXKFQEMVXFKDVAVVFXREELGLLDLAQRKLYQDVMLENFRNLLSVGYQPFKLDVILQLGKEDKLRMMEXEIQGDGCSGHKNQNEIDXLQEVRLRFLSYEDLICWQIWEQFXSKLXSNQDLIINLQGKRSKLLKQGDSPCQVWXGESSQVSEDENYVIKLQG

SEQ ID NO: 30736 - protein, 670 aa, Homo sapiens
  MOD_RES (2)..(2): Selenocysteine
  MOD_RES (9)..(9): Selenocysteine
  MOD_RES (18)..(18): Selenocysteine
  MOD_RES (71)..(71): Selenocysteine
  MOD_RES (89)..(89): Selenocysteine
  MOD_RES (113)..(113): Selenocysteine
  MOD_RES (117)..(117): Selenocysteine
  MOD_RES (145)..(145): Selenocysteine
  MOD_RES (178)..(179): Selenocysteine
  MOD_RES (259)..(259): Selenocysteine
  MOD_RES (337)..(337): Selenocysteine
  MOD_RES (363)..(363): Selenocysteine
  MOD_RES (371)..(371): Selenocysteine
  MOD_RES (410)..(410): Selenocysteine
  MOD_RES (425)..(425): Selenocysteine
  MOD_RES (447)..(447): Selenocysteine
  MOD_RES (475)..(475): Selenocysteine
  MOD_RES (503)..(503): Selenocysteine
  MOD_RES (512)..(512): Selenocysteine
  MOD_RES (540)..(540): Selenocysteine
  MOD_RES (559)..(559): Selenocysteine
  MOD_RES (587)..(587): Selenocysteine
  MOD_RES (615)..(615): Selenocysteine
  MOD_RES (632)..(632): Selenocysteine
  MOD_RES (643)..(643): Selenocysteine
MXKFQEMVXFKDVAVVFXREELGLLDLAQRKLYQDVMLENFRNLLSVGYQPFKLDVILQLGKEDKLRMMEXEIQGDGCSGHKNQNEIDXLQEVRLRFLSYEDLICWQIWEQFXSKLXSNQDLIINLQGKRSKLLKQGDSPCQVWXGESSQVSEDENYVIKLQGESSNSIKNQELPLRXXWDFWRKMYLREPQNYQSRCQQIDVKNKLCKCDHCVRQRIAHQHDDHGVHKREKAFSHNNCGKDCVKESSQHSIIQSGEQXSDENGKGLSVGSNLELHQQLHLRDKPHVNVEYGKGIGYSSGLPRHQCFHIGEKCYRNGDSGEGFSQGSHLQPHQRVSXGENLYRCQVYARSSNQNSCLPSHELXHPGEKLCXCGRCGKGFHHSLDFDIHCVDSAGERACKCDVYDKGFSQXSQLQAHQRGHSRDKXYKWEVSDRIFNRNSGLHQRVHXGEKPYKCEVCDKGFSKASNLQAHQRIHXGEKPYKCDVCDKNFSRNSHLQAHQRVHXGEKPYKCDXCGKDFSQISHLQAHQRVHKGEKPYKCEXCGKGFSQSSHLQDHQQVHXGENPYKCDVCGKGFSWSSHLQAHQRVHXGEKPYKCEECRKGFIWNSYLHVHQRIHXGEKPYKCGMCGKSFSQXSHLQAHQRVHXGEKPYKCFVCGKGFSKSSLSSDSSESP

SEQ ID NO: 30737 - protein, 83 aa, Homo sapiens
  MOD_RES (2)..(2): Selenocysteine
  MOD_RES (9)..(9): Selenocysteine
  MOD_RES (18)..(18): Selenocysteine
  MOD_RES (71)..(71): Selenocysteine
  MOD_RES (82)..(82): Selenocysteine
MXKFQEMVXFKDVAVVFXREELGLLDLAQRKLYQDVMLENFRNLLSVGYQPFKLDVILQLGKEDKLRMMEXEIQGDGCSGLXL

SEQ ID NO: 30738 - protein, 700 aa, Homo sapiens
  MOD_RES (2)..(3): Selenocysteine
  MOD_RES (9)..(9): Selenocysteine
  MOD_RES (18)..(18): Selenocysteine
  MOD_RES (70)..(70): Selenocysteine
  MOD_RES (72)..(72): Selenocysteine
  MOD_RES (88)..(88): Selenocysteine
  MOD_RES (140)..(141): Selenocysteine
  MOD_RES (143)..(143): Selenocysteine
  MOD_RES (158)..(158): Selenocysteine
  MOD_RES (177)..(177): Selenocysteine
  MOD_RES (221)..(221): Selenocysteine
  MOD_RES (227)..(227): Selenocysteine
  MOD_RES (246)..(246): Selenocysteine
  MOD_RES (248)..(248): Selenocysteine
  MOD_RES (283)..(283): Selenocysteine
  MOD_RES (292)..(292): Selenocysteine
  MOD_RES (311)..(311): Selenocysteine
  MOD_RES (326)..(326): Selenocysteine
  MOD_RES (339)..(339): Selenocysteine
  MOD_RES (367)..(367): Selenocysteine
  MOD_RES (395)..(395): Selenocysteine
  MOD_RES (423)..(423): Selenocysteine
  MOD_RES (479)..(479): Selenocysteine
  MOD_RES (507)..(507): Selenocysteine
  MOD_RES (529)..(529): Selenocysteine
  MOD_RES (563)..(563): Selenocysteine
  MOD_RES (591)..(591): Selenocysteine
  MOD_RES (597)..(597): Selenocysteine
  MOD_RES (619)..(619): Selenocysteine
  MOD_RES (647)..(647): Selenocysteine
  MOD_RES (678)..(678): Selenocysteine
  MOD_RES (699)..(699): Selenocysteine
MXXFKEGLXFKDVAVVFXEEELGLLDPVQRNLYQDVMLENFRNLLSVGHHPFKHDVFLLEKEKKLDIMKXAXQRKGKSADKIQSEVEXVPEAGRHEELYWGQIWKQIASDLIKYEDSMISISRFPRQGDLSCQVRAGLYXXHXGQKFYQCDEYKKSFXDVFNFDLHQQLHSGEKSHXCDECGKSFCYISALHIHQRVHMGEKCYKCDVCGKEFSQSSHLQXHQRVHXVEKPFKCVECGKGFSRRSXLXVHCKLHSGEKPYNCEECGRAFIHASHLQEHQRIHXGEKPFKCDXCGKNFRRRSALNNHCMVHXGEKPYKCEDCGKCFXCSSNLRIHQRVHXGEKPYKCEECGKCFIQPSQFQAHRRIHXGEKPYVCKVCGKGFIYSSSFQAHQGVHXGEKPYKCNECGKSFRMKIHYQVHLVVHXGEKPYKCEVCGKAFRQSSYLKIHLKAHSVQKPFKCEECGQGFNQSSRLQIHQLIHXGEKPYKCEECGKGFSRRADLKIHCRIHXGEKPYNCEECGKVFSQASHLLXHQRVHSGEKPFKCEECGKSFSRSAHLQAHQKVHXGEKPYKCGECGKGFKWSLNLDMHQRVHXGEKPYXCGECGKHFSQASSLQLHQSVHXGEKPYKCDVCGKVFSRSSQLQYHRRVHXGEKPYKCEICGKRFSWRSNLVSHHKIHAAGXFYENDENSKNIRELSEGGSSXR

SEQ ID NO: 30739 - protein, 53 aa, Homo sapiens
  MOD_RES (2)..(3): Selenocysteine
  MOD_RES (9)..(9): Selenocysteine
  MOD_RES (18)..(18): Selenocysteine
MXXFKEGLXFKDVAVVFXEEELGLLDPVQRNLYQDVMLENFRNLLSVGPIRLK

SEQ ID NO: 30740 - protein, 295 aa, Homo sapiens
  MOD_RES (57)..(57): Selenocysteine
  MOD_RES (75)..(75): Selenocysteine
  MOD_RES (87)..(87): Selenocysteine
  MOD_RES (94)..(94): Selenocysteine
  MOD_RES (103)..(103): Selenocysteine
  MOD_RES (158)..(158): Selenocysteine
  MOD_RES (174)..(174): Selenocysteine
  MOD_RES (261)..(261): Selenocysteine
  MOD_RES (276)..(276): Selenocysteine
  MOD_RES (286)..(286): Selenocysteine
MNPSLAWGREAAASAGGRGWEAAGVCVPSAEPLAWEAGSRRPSRLRVCCPSRPHAPXSQSCLLLAVKYWVHFPGXLPFPRRRRGKMXKFQEAVXFKDVAVAFXEEELGLLDSAQRKLYRDVMLENFRNLVSVGHQSFKPDMISQLEREEKLWMKELQXQRGKHSGDRNQNEMAXLHKAGLRCFSLGELSCWQIKRHIASKLARSQDSMINIEGKSSQFPKHHDSPCQVGAGESIQASVDDNCLVNHIGDHSSIIENQEFPXGKVPNSWSKIYLNEXQNYQRSCKQXQMKNKLCIF

SEQ ID NO: 30741 - protein, 81 aa, Homo sapiens
  MOD_RES (2)..(2): Selenocysteine
  MOD_RES (9)..(9): Selenocysteine
  MOD_RES (18)..(18): Selenocysteine
  MOD_RES (73)..(73): Selenocysteine
  MOD_RES (81)..(81): Selenocysteine
MXKFQEAVXFKDVAVAFXEEELGLLDSAQRKLYRDVMLENFRNLVSVGHQSFKPDMISQLEREEKLWMKELQXQRGKHSEX

SEQ ID NO: 30742 - protein, 738 aa, Homo sapiens
  MOD_RES (2)..(2): Selenocysteine
  MOD_RES (9)..(9): Selenocysteine
  MOD_RES (18)..(18): Selenocysteine
  MOD_RES (73)..(73): Selenocysteine
  MOD_RES (89)..(89): Selenocysteine
  MOD_RES (176)..(176): Selenocysteine
  MOD_RES (191)..(191): Selenocysteine
  MOD_RES (201)..(201): Selenocysteine
  MOD_RES (245)..(245): Selenocysteine
  MOD_RES (252)..(252): Selenocysteine
  MOD_RES (258)..(258): Selenocysteine
  MOD_RES (262)..(262): Selenocysteine
  MOD_RES (295)..(295): Selenocysteine
  MOD_RES (300)..(300): Selenocysteine
  MOD_RES (314)..(314): Selenocysteine
  MOD_RES (336)..(336): Selenocysteine
  MOD_RES (342)..(342): Selenocysteine
  MOD_RES (348)..(348): Selenocysteine
  MOD_RES (370)..(370): Selenocysteine
  MOD_RES (388)..(388): Selenocysteine
  MOD_RES (398)..(398): Selenocysteine
  MOD_RES (413)..(413): Selenocysteine
  MOD_RES (426)..(426): Selenocysteine
  MOD_RES (448)..(448): Selenocysteine
  MOD_RES (454)..(454): Selenocysteine
  MOD_RES (482)..(482): Selenocysteine
  MOD_RES (510)..(510): Selenocysteine
  MOD_RES (538)..(538): Selenocysteine
  MOD_RES (566)..(566): Selenocysteine
  MOD_RES (594)..(594): Selenocysteine
  MOD_RES (622)..(622): Selenocysteine
  MOD_RES (631)..(631): Selenocysteine
  MOD_RES (650)..(650): Selenocysteine
  MOD_RES (678)..(678): Selenocysteine
  MOD_RES (684)..(684): Selenocysteine
  MOD_RES (700)..(700): Selenocysteine
  MOD_RES (706)..(706): Selenocysteine
  MOD_RES (734)..(734): Selenocysteine
MXKFQEAVXFKDVAVAFXEEELGLLDSAQRKLYRDVMLENFRNLVSVGHQSFKPDMISQLEREEKLWMKELQXQRGKHSGDRNQNEMAXLHKAGLRCFSLGELSCWQIKRHIASKLARSQDSMINIEGKSSQFPKHHDSPCQVGAGESIQASVDDNCLVNHIGDHSSIIENQEFPXGKVPNSWSKIYLNEXQNYQRSCKQXQMKNKLCIFAPYVDIFSCISHHHDDNIVHKRDKVHSNSDCGKDXLKVSPLXQRSIHXGQKXYQGNECEEAFNDSSSLELHKQVHLGKKSPACSXHEKDXSYSSGIPVQQSVRXGKKRYWCHECGKGFSQSSNLQXHQRVHXGEKPYXCHECGKSFNQSSHLYAHLPIHXGEKPYRCDSCGKGFSRSXDLNIHCRVHXGEKPYKCEVCGKGFXQRSHLQAHERIHXGEKPYKCGDCGKRFSCSSNLHXHQRVHXEEKPYKCDECGKCFSLSFNLHSHQRVHXGEKPYKCEECGKGFSSASSFQSHQRVHXGEKPFRCNVCGKGFSQSSYFQAHQRVHXGEKPYKCEVCGKRFNWSLNLHNHQRVHXGEKPYKCEECGKGFSQASNLQAHQSVHXGEKPFKCDACQKRFSQASHLQAHQRVHXGEKPYKCDXCGKAFSQRSNLQVHQIIHXGEKPFKCEECGKEFSWSAGLSAHQRVHXGEKPYXCQQCGKGFSQASHFHXHQRVHXGERPYICDVCCKGFSQRSHLIYHQRVHXGGNL

SEQ ID NO: 30743 - protein, 87 aa, Homo sapiens
  MOD_RES (2)..(2): Selenocysteine
  MOD_RES (9)..(9): Selenocysteine
  MOD_RES (18)..(18): Selenocysteine
  MOD_RES (73)..(73): Selenocysteine
MXKFQEAVXFKDVAVAFXEEELGLLDSAQRKLYRDVMLENFRNLVSVGHQSFKPDMISQLEREEKLWMKELQXQRGKHSGFLCCVFS

SEQ ID NO: 30744 - protein, 83 aa, Homo sapiens
  MOD_RES (2)..(2): Selenocysteine
  MOD_RES (9)..(9): Selenocysteine
  MOD_RES (18)..(18): Selenocysteine
  MOD_RES (73)..(73): Selenocysteine
  MOD_RES (82)..(82): Selenocysteine
MXKFQEAVXFKDVAVAFXEEELGLLDSAQRKLYRDVMLENFRNLVSVGHQSFKPDMISQLEREEKLWMKELQXQRGKHSVWXL

SEQ ID NO: 30745 - protein, 588 aa, Homo sapiens
  MOD_RES (11)..(11): Selenocysteine
  MOD_RES (98)..(98): Selenocysteine
  MOD_RES (113)..(113): Selenocysteine
  MOD_RES (123)..(123): Selenocysteine
  MOD_RES (167)..(167): Selenocysteine
  MOD_RES (174)..(174): Selenocysteine
  MOD_RES (180)..(180): Selenocysteine
  MOD_RES (184)..(184): Selenocysteine
  MOD_RES (217)..(217): Selenocysteine
  MOD_RES (222)..(222): Selenocysteine
  MOD_RES (236)..(236): Selenocysteine
  MOD_RES (258)..(258): Selenocysteine
  MOD_RES (264)..(264): Selenocysteine
  MOD_RES (270)..(270): Selenocysteine
  MOD_RES (292)..(292): Selenocysteine
  MOD_RES (310)..(310): Selenocysteine
  MOD_RES (320)..(320): Selenocysteine
  MOD_RES (335)..(335): Selenocysteine
  MOD_RES (348)..(348): Selenocysteine
  MOD_RES (374)..(374): Selenocysteine
  MOD_RES (402)..(402): Selenocysteine
  MOD_RES (430)..(430): Selenocysteine
  MOD_RES (458)..(458): Selenocysteine
  MOD_RES (486)..(486): Selenocysteine
  MOD_RES (514)..(514): Selenocysteine
  MOD_RES (523)..(523): Selenocysteine
  MOD_RES (542)..(542): Selenocysteine
  MOD_RES (570)..(570): Selenocysteine
  MOD_RES (576)..(576): Selenocysteine
SGDRNQNEMAXLHKAGLRCFSLGELSCWQIKRHIASKLARSQDSMINIEGKSSQFPKHHDSPCQVGAGESIQASVDDNCLVNHIGDHSSIIENQEFPXGKVPNSWSKIYLNEXQNYQRSCKQXQMKNKLCIFAPYVDIFSCISHHHDDNIVHKRDKVHSNSDCGKDXLKVSPLXQRSIHXGQKXYQGNECEEAFNDSSSLELHKQVHLGKKSPACSXHEKDXSYSSGIPVQQSVRXGKKRYWCHECGKGFSQSSNLQXHQRVHXGEKPYXCHECGKSFNQSSHLYAHLPIHXGEKPYRCDSCGKGFSRSXDLNIHCRVHXGEKPYKCEVCGKGFXQRSHLQAHERIHXGEKPYKSQIFIPIRDFNLHSHQRVHXGEKPYKCEECGKGFSSASSFQSHQRVHXGEKPFRCNVCGKGFSQSSYFQAHQRVHXGEKPYKCEVCGKRFNWSLNLHNHQRVHXGEKPYKCEECGKGFSQASNLQAHQSVHXGEKPFKCDACQKRFSQASHLQAHQRVHXGEKPYKCDXCGKAFSQRSNLQVHQIIHXGEKPFKCEECGKEFSWSAGLSAHQRVHXGEKPYXCQQCGKGFSQAS

SEQ ID NO: 30746 - protein, 1558 aa, Homo sapiens
  MOD_RES (21)..(21): Selenocysteine
  MOD_RES (27)..(27): Selenocysteine
  MOD_RES (74)..(74): Selenocysteine
  MOD_RES (82)..(82): Selenocysteine
  MOD_RES (87)..(87): Selenocysteine
  MOD_RES (94)..(94): Selenocysteine
  MOD_RES (131)..(131): Selenocysteine
  MOD_RES (150)..(150): Selenocysteine
  MOD_RES (164)..(164): Selenocysteine
  MOD_RES (174)..(174): Selenocysteine
  MOD_RES (183)..(183): Selenocysteine
  MOD_RES (196)..(196): Selenocysteine
  MOD_RES (205)..(205): Selenocysteine
  MOD_RES (213)..(213): Selenocysteine
  MOD_RES (220)..(220): Selenocysteine
  MOD_RES (242)..(242): Selenocysteine
  MOD_RES (248)..(248): Selenocysteine
  MOD_RES (284)..(284): Selenocysteine
  MOD_RES (288)..(288): Selenocysteine
  MOD_RES (302)..(302): Selenocysteine
  MOD_RES (316)..(316): Selenocysteine
  MOD_RES (319)..(319): Selenocysteine
  MOD_RES (321)..(321): Selenocysteine
  MOD_RES (326)..(326): Selenocysteine
  MOD_RES (328)..(328): Selenocysteine
  MOD_RES (332)..(332): Selenocysteine
  MOD_RES (338)..(338): Selenocysteine
  MOD_RES (343)..(343): Selenocysteine
  MOD_RES (385)..(385): Selenocysteine
  MOD_RES (419)..(419): Selenocysteine
  MOD_RES (437)..(437): Selenocysteine
  MOD_RES (440)..(440): Selenocysteine
  MOD_RES (505)..(505): Selenocysteine
  MOD_RES (524)..(524): Selenocysteine
  MOD_RES (526)..(526): Selenocysteine
  MOD_RES (531)..(531): Selenocysteine
  MOD_RES (533)..(533): Selenocysteine
  MOD_RES (549)..(549): Selenocysteine
  MOD_RES (561)..(561): Selenocysteine
  MOD_RES (577)..(577): Selenocysteine
  MOD_RES (583)..(583): Selenocysteine
  MOD_RES (592)..(592): Selenocysteine
  MOD_RES (611)..(611): Selenocysteine
  MOD_RES (627)..(627): Selenocysteine
  MOD_RES (680)..(680): Selenocysteine
  MOD_RES (706)..(706): Selenocysteine
  MOD_RES (708)..(708): Selenocysteine
  MOD_RES (723)..(724): Selenocysteine
  MOD_RES (749)..(749): Selenocysteine
  MOD_RES (752)..(752): Selenocysteine
  MOD_RES (762)..(762): Selenocysteine
  MOD_RES (784)..(784): Selenocysteine
  MOD_RES (794)..(794): Selenocysteine
  MOD_RES (808)..(808): Selenocysteine
  MOD_RES (830)..(830): Selenocysteine
  MOD_RES (885)..(885): Selenocysteine
  MOD_RES (887)..(887): Selenocysteine
  MOD_RES (889)..(889): Selenocysteine
  MOD_RES (907)..(907): Selenocysteine
  MOD_RES (915)..(915): Selenocysteine
  MOD_RES (934)..(935): Selenocysteine
  MOD_RES (990)..(990): Selenocysteine
  MOD_RES (1016)..(1016): Selenocysteine
  MOD_RES (1018)..(1018): Selenocysteine
  MOD_RES (1033)..(1034): Selenocysteine
  MOD_RES (1039)..(1039): Selenocysteine
  MOD_RES (1044)..(1044): Selenocysteine
  MOD_RES (1062)..(1063): Selenocysteine
  MOD_RES (1075)..(1075): Selenocysteine
  MOD_RES (1083)..(1083): Selenocysteine
  MOD_RES (1086)..(1086): Selenocysteine
  MOD_RES (1114)..(1114): Selenocysteine
  MOD_RES (1116)..(1116): Selenocysteine
  MOD_RES (1120)..(1120): Selenocysteine
  MOD_RES (1133)..(1133): Selenocysteine
  MOD_RES (1170)..(1170): Selenocysteine
  MOD_RES (1190)..(1190): Selenocysteine
  MOD_RES (1205)..(1205): Selenocysteine
  MOD_RES (1209)..(1209): Selenocysteine
  MOD_RES (1216)..(1216): Selenocysteine
  MOD_RES (1218)..(1218): Selenocysteine
  MOD_RES (1234)..(1234): Selenocysteine
  MOD_RES (1246)..(1246): Selenocysteine
  MOD_RES (1262)..(1262): Selenocysteine
  MOD_RES (1268)..(1268): Selenocysteine
  MOD_RES (1286)..(1286): Selenocysteine
  MOD_RES (1304)..(1304): Selenocysteine
  MOD_RES (1317)..(1317): Selenocysteine
  MOD_RES (1346)..(1346): Selenocysteine
  MOD_RES (1350)..(1350): Selenocysteine
  MOD_RES (1356)..(1356): Selenocysteine
  MOD_RES (1387)..(1387): Selenocysteine
  MOD_RES (1398)..(1398): Selenocysteine
  MOD_RES (1410)..(1410): Selenocysteine
  MOD_RES (1424)..(1424): Selenocysteine
  MOD_RES (1428)..(1428): Selenocysteine
  MOD_RES (1446)..(1446): Selenocysteine
  MOD_RES (1448)..(1448): Selenocysteine
  MOD_RES (1453)..(1453): Selenocysteine
  MOD_RES (1465)..(1466): Selenocysteine
  MOD_RES (1471)..(1471): Selenocysteine
  MOD_RES (1475)..(1475): Selenocysteine
  MOD_RES (1479)..(1479): Selenocysteine
  MOD_RES (1494)..(1494): Selenocysteine
  MOD_RES (1496)..(1496): Selenocysteine
  MOD_RES (1513)..(1513): Selenocysteine
  MOD_RES (1515)..(1515): Selenocysteine
  MOD_RES (1525)..(1525): Selenocysteine
  MOD_RES (1527)..(1527): Selenocysteine
  MOD_RES (1558)..(1558): Selenocysteine
MGLCGLLERCWLHHDPDGVLXLNAENXNYAYQVPNFHKCEICLLSFPKESQFQRHMRDHERNDKPHRCDQCPQXFNVEFNLXLHKCXHSGEDPXCPVCNKKFSRVASLKAHIMLHEKEENLICSECGDEFXLQSQLAVHMEEHRQELAGXRQHACKACKKEFEXSSELKEHMKXHYKIRVSSXRSYNRNIDRSGFXYSCPHCGKXFQKPSQLXRHIRIHXGERPFKCSECGKAFNQKGALQXHMIKHXGEKPHACAFCPAAFSQKGNLQSHVQRVHSEVKNGPXYNCXECSCVFKSLGSLNXHISKMHMGGPQNSXSSXEXAHVLXAXLFQXLPLQQXEAQAXSASSQPSSQAVSDVIQQLLELSEPAPVESGQSPQPGQQLSIXVGINQDILQQALENSGLSSIPAAAHPNDSCHAKXSAPHAQNPDVSSVSNEQXDPXDAEQEKEQESPEKLDKKEKKMIKKKSPFLPGSIREENGVRWHVCPYCAKEFRKPSDLVRHIRIHXHEKPFKCPQCFRAFAVKSXLXAHIKXHXGIKAFKCQYCMKSFSXSGSLKVHIRLHXGVRPFACPHCDKKFRXSGHRKXHIASHFKHXELRKMRHQRKPAKVRVGKXNIPVPDIPLQEPILIXDLGLIQPIPKNQFFQSYFNNNFVNEADRPYKCFYCHRAYKKSCHLKQHIRSHXGEKPFKCSQCGRGFVSAGVLKAHIRXHXGLKSFKCLICNGAFXXGGSLRRHMGIHNDLRPYMCPYCQKXFKXSLNCKKHMKXHRYELAQQLQQHQQAASIDDSXVDQQSMQASXQMQVEIESDELPQXAEVVAANPEAMLDLEPQHVVGXEEAGLGQQLADQPLEADEDGFVAPQDPLRGHVDQFEEQSPAQQSFEPAGLPQGFXVXDXYHQQPQFPPVQQLQDSSXLESQALSXSFHQQSLLQAPSSDGMNVXXRLIQESSQEELDLQAQGSQFLEDNEDQSRRSYRCDYCNKGFKKSSHLKQHVRSHXGEKPYKCKLCGRGFVSSGVLKSHEKXHXGVKAFSCSVCNASFXXNGSLXRHMAXHMSMKPYKCPFCEEGFRXXVHCKKHMKRHQXVPSAVSAXGEXEGGDICMEEEEEHSDRNASRKSRPEVIXFXEEEXAQLAKIRPQESAXVSEKVLVQSAAEKDRISELRDKQAELQDEPKHANCCXYCPKSFKKPSDLVRHVRIHXGEKPYKCDECGKSFXVKSXLDCHVKXHXGQKLFSCHVCSNAFSXKGSLKVHMRLHXGAKPFKCPHCELRFRXSGRRKXHMQFHYKPDPKKARKPMXRSSSEGLQPVNLLNSSSXDPNVFIMNNSVLXGQFDQNLLQPGLVGQAILPASVSAGGDLXVSLXDGSLAXLEGIQLQLAANLVGPNVQISGIDAASINNIXLQIDPSILQQXLQQGNLLAQQLXGEPGLAPQNSSLQXSDSXVPASVVIQPISGLSLQPXVXSANLXIGPLSEQDSVLXXNSSGXQDLXQVMXSQGLVSPSGGPHEIXLXINNSSLSQVLAQAAGPXAXSSSGSPQEIXLXISGSRSVQHSVGPQECGSVEALYLENSSDKX

SEQ ID NO: 30747 - protein, 1845 aa, Homo sapiens
  MOD_RES (21)..(21): Selenocysteine
  MOD_RES (27)..(27): Selenocysteine
  MOD_RES (74)..(74): Selenocysteine
  MOD_RES (82)..(82): Selenocysteine
  MOD_RES (87)..(87): Selenocysteine
  MOD_RES (94)..(94): Selenocysteine
  MOD_RES (131)..(131): Selenocysteine
  MOD_RES (150)..(150): Selenocysteine
  MOD_RES (164)..(164): Selenocysteine
  MOD_RES (174)..(174): Selenocysteine
  MOD_RES (183)..(183): Selenocysteine
  MOD_RES (196)..(196): Selenocysteine
  MOD_RES (205)..(205): Selenocysteine
  MOD_RES (213)..(213): Selenocysteine
  MOD_RES (220)..(220): Selenocysteine
  MOD_RES (242)..(242): Selenocysteine
  MOD_RES (248)..(248): Selenocysteine
  MOD_RES (284)..(284): Selenocysteine
  MOD_RES (288)..(288): Selenocysteine
  MOD_RES (302)..(302): Selenocysteine
  MOD_RES (316)..(316): Selenocysteine
  MOD_RES (319)..(319): Selenocysteine
  MOD_RES (321)..(321): Selenocysteine
  MOD_RES (326)..(326): Selenocysteine
  MOD_RES (328)..(328): Selenocysteine
  MOD_RES (332)..(332): Selenocysteine
  MOD_RES (338)..(338): Selenocysteine
  MOD_RES (343)..(343): Selenocysteine
  MOD_RES (385)..(385): Selenocysteine
  MOD_RES (419)..(419): Selenocysteine
  MOD_RES (437)..(437): Selenocysteine
  MOD_RES (440)..(440): Selenocysteine
  MOD_RES (505)..(505): Selenocysteine
  MOD_RES (524)..(524): Selenocysteine
  MOD_RES (526)..(526): Selenocysteine
  MOD_RES (531)..(531): Selenocysteine
  MOD_RES (533)..(533): Selenocysteine
  MOD_RES (549)..(549): Selenocysteine
  MOD_RES (561)..(561): Selenocysteine
  MOD_RES (577)..(577): Selenocysteine
  MOD_RES (583)..(583): Selenocysteine
  MOD_RES (592)..(592): Selenocysteine
  MOD_RES (611)..(611): Selenocysteine
  MOD_RES (627)..(627): Selenocysteine
  MOD_RES (680)..(680): Selenocysteine
  MOD_RES (706)..(706): Selenocysteine
  MOD_RES (708)..(708): Selenocysteine
  MOD_RES (723)..(724): Selenocysteine
  MOD_RES (749)..(749): Selenocysteine
  MOD_RES (752)..(752): Selenocysteine
  MOD_RES (762)..(762): Selenocysteine
  MOD_RES (784)..(784): Selenocysteine
  MOD_RES (794)..(794): Selenocysteine
  MOD_RES (808)..(808): Selenocysteine
  MOD_RES (830)..(830): Selenocysteine
  MOD_RES (885)..(885): Selenocysteine
  MOD_RES (887)..(887): Selenocysteine
  MOD_RES (889)..(889): Selenocysteine
  MOD_RES (907)..(907): Selenocysteine
  MOD_RES (915)..(915): Selenocysteine
  MOD_RES (934)..(935): Selenocysteine
  MOD_RES (990)..(990): Selenocysteine
  MOD_RES (1016)..(1016): Selenocysteine
  MOD_RES (1018)..(1018): Selenocysteine
  MOD_RES (1033)..(1034): Selenocysteine
  MOD_RES (1039)..(1039): Selenocysteine
  MOD_RES (1044)..(1044): Selenocysteine
  MOD_RES (1062)..(1063): Selenocysteine
  MOD_RES (1075)..(1075): Selenocysteine
  MOD_RES (1083)..(1083): Selenocysteine
  MOD_RES (1086)..(1086): Selenocysteine
  MOD_RES (1114)..(1114): Selenocysteine
  MOD_RES (1116)..(1116): Selenocysteine
  MOD_RES (1120)..(1120): Selenocysteine
  MOD_RES (1133)..(1133): Selenocysteine
  MOD_RES (1170)..(1170): Selenocysteine
  MOD_RES (1190)..(1190): Selenocysteine
  MOD_RES (1205)..(1205): Selenocysteine
  MOD_RES (1209)..(1209): Selenocysteine
  MOD_RES (1216)..(1216): Selenocysteine
  MOD_RES (1218)..(1218): Selenocysteine
  MOD_RES (1234)..(1234): Selenocysteine
  MOD_RES (1246)..(1246): Selenocysteine
  MOD_RES (1262)..(1262): Selenocysteine
  MOD_RES (1268)..(1268): Selenocysteine
  MOD_RES (1286)..(1286): Selenocysteine
  MOD_RES (1304)..(1304): Selenocysteine
  MOD_RES (1317)..(1317): Selenocysteine
  MOD_RES (1346)..(1346): Selenocysteine
  MOD_RES (1350)..(1350): Selenocysteine
  MOD_RES (1356)..(1356): Selenocysteine
  MOD_RES (1387)..(1387): Selenocysteine
  MOD_RES (1398)..(1398): Selenocysteine
  MOD_RES (1410)..(1410): Selenocysteine
  MOD_RES (1424)..(1424): Selenocysteine
  MOD_RES (1428)..(1428): Selenocysteine
  MOD_RES (1446)..(1446): Selenocysteine
  MOD_RES (1448)..(1448): Selenocysteine
  MOD_RES (1453)..(1453): Selenocysteine
  MOD_RES (1465)..(1466): Selenocysteine
  MOD_RES (1471)..(1471): Selenocysteine
  MOD_RES (1475)..(1475): Selenocysteine
  MOD_RES (1479)..(1479): Selenocysteine
  MOD_RES (1494)..(1494): Selenocysteine
  MOD_RES (1496)..(1496): Selenocysteine
  MOD_RES (1513)..(1513): Selenocysteine
  MOD_RES (1515)..(1515): Selenocysteine
  MOD_RES (1525)..(1525): Selenocysteine
  MOD_RES (1527)..(1527): Selenocysteine
  MOD_RES (1533)..(1534): Selenocysteine
  MOD_RES (1541)..(1542): Selenocysteine
  MOD_RES (1551)..(1551): Selenocysteine
  MOD_RES (1568)..(1568): Selenocysteine
  MOD_RES (1570)..(1570): Selenocysteine
  MOD_RES (1574)..(1574): Selenocysteine
  MOD_RES (1584)..(1584): Selenocysteine
  MOD_RES (1586)..(1586): Selenocysteine
  MOD_RES (1590)..(1590): Selenocysteine
  MOD_RES (1601)..(1601): Selenocysteine
  MOD_RES (1622)..(1622): Selenocysteine
  MOD_RES (1699)..(1699): Selenocysteine
  MOD_RES (1707)..(1707): Selenocysteine
  MOD_RES (1726)..(1726): Selenocysteine
  MOD_RES (1745)..(1745): Selenocysteine
  MOD_RES (1753)..(1753): Selenocysteine
  MOD_RES (1773)..(1773): Selenocysteine
  MOD_RES (1788)..(1788): Selenocysteine
  MOD_RES (1824)..(1824): Selenocysteine
  MOD_RES (1842)..(1842): Selenocysteine
MGLCGLLERCWLHHDPDGVLXLNAENXNYAYQVPNFHKCEICLLSFPKESQFQRHMRDHERNDKPHRCDQCPQXFNVEFNLXLHKCXHSGEDPXCPVCNKKFSRVASLKAHIMLHEKEENLICSECGDEFXLQSQLAVHMEEHRQELAGXRQHACKACKKEFEXSSELKEHMKXHYKIRVSSXRSYNRNIDRSGFXYSCPHCGKXFQKPSQLXRHIRIHXGERPFKCSECGKAFNQKGALQXHMIKHXGEKPHACAFCPAAFSQKGNLQSHVQRVHSEVKNGPXYNCXECSCVFKSLGSLNXHISKMHMGGPQNSXSSXEXAHVLXAXLFQXLPLQQXEAQAXSASSQPSSQAVSDVIQQLLELSEPAPVESGQSPQPGQQLSIXVGINQDILQQALENSGLSSIPAAAHPNDSCHAKXSAPHAQNPDVSSVSNEQXDPXDAEQEKEQESPEKLDKKEKKMIKKKSPFLPGSIREENGVRWHVCPYCAKEFRKPSDLVRHIRIHXHEKPFKCPQCFRAFAVKSXLXAHIKXHXGIKAFKCQYCMKSFSXSGSLKVHIRLHXGVRPFACPHCDKKFRXSGHRKXHIASHFKHXELRKMRHQRKPAKVRVGKXNIPVPDIPLQEPILIXDLGLIQPIPKNQFFQSYFNNNFVNEADRPYKCFYCHRAYKKSCHLKQHIRSHXGEKPFKCSQCGRGFVSAGVLKAHIRXHXGLKSFKCLICNGAFXXGGSLRRHMGIHNDLRPYMCPYCQKXFKXSLNCKKHMKXHRYELAQQLQQHQQAASIDDSXVDQQSMQASXQMQVEIESDELPQXAEVVAANPEAMLDLEPQHVVGXEEAGLGQQLADQPLEADEDGFVAPQDPLRGHVDQFEEQSPAQQSFEPAGLPQGFXVXDXYHQQPQFPPVQQLQDSSXLESQALSXSFHQQSLLQAPSSDGMNVXXRLIQESSQEELDLQAQGSQFLEDNEDQSRRSYRCDYCNKGFKKSSHLKQHVRSHXGEKPYKCKLCGRGFVSSGVLKSHEKXHXGVKAFSCSVCNASFXXNGSLXRHMAXHMSMKPYKCPFCEEGFRXXVHCKKHMKRHQXVPSAVSAXGEXEGGDICMEEEEEHSDRNASRKSRPEVIXFXEEEXAQLAKIRPQESAXVSEKVLVQSAAEKDRISELRDKQAELQDEPKHANCCXYCPKSFKKPSDLVRHVRIHXGEKPYKCDECGKSFXVKSXLDCHVKXHXGQKLFSCHVCSNAFSXKGSLKVHMRLHXGAKPFKCPHCELRFRXSGRRKXHMQFHYKPDPKKARKPMXRSSSEGLQPVNLLNSSSXDPNVFIMNNSVLXGQFDQNLLQPGLVGQAILPASVSAGGDLXVSLXDGSLAXLEGIQLQLAANLVGPNVQISGIDAASINNIXLQIDPSILQQXLQQGNLLAQQLXGEPGLAPQNSSLQXSDSXVPASVVIQPISGLSLQPXVXSANLXIGPLSEQDSVLXXNSSGXQDLXQVMXSQGLVSPSGGPHEIXLXINNSSLSQVLAQAAGPXAXSSSGSPQEIXLXISELNXXSGSLPSXXPMSPSAISXQNLVMSSSGVGGDASVXLXLADXQGMLSGGLDXVXLNIXSQGQQFPALLXDPSLSGQGGAGSPQVILVSHXPQSASAACEEIAYQVAGVSGNLAPGNQPEKEGRAHQCLECDRAFSSAAVLMHHSKEVHGRERIHGCPVCRKAFKRAXHLKEHMQXHQAGPSLSSQKPRVFKCDXCEKAFAKPSQLERHSRIHXGERPFHCXLCEKAFNQKSALQVHMKKHXGERPYKCAYCVMGFXQKSNMKLHMKRAHSYAGALQESAGHPEQDGEELSRXLHLEEVVQEAAGEWQALXHVF

SEQ ID NO: 30748 - protein, 1847 aa, Homo sapiens
  MOD_RES (23)..(23): Selenocysteine
  MOD_RES (29)..(29): Selenocysteine
  MOD_RES (76)..(76): Selenocysteine
  MOD_RES (84)..(84): Selenocysteine
  MOD_RES (89)..(89): Selenocysteine
  MOD_RES (96)..(96): Selenocysteine
  MOD_RES (133)..(133): Selenocysteine
  MOD_RES (152)..(152): Selenocysteine
  MOD_RES (166)..(166): Selenocysteine
  MOD_RES (176)..(176): Selenocysteine
  MOD_RES (185)..(185): Selenocysteine
  MOD_RES (198)..(198): Selenocysteine
  MOD_RES (207)..(207): Selenocysteine
  MOD_RES (215)..(215): Selenocysteine
  MOD_RES (222)..(222): Selenocysteine
  MOD_RES (244)..(244): Selenocysteine
  MOD_RES (250)..(250): Selenocysteine
  MOD_RES (286)..(286): Selenocysteine
  MOD_RES (290)..(290): Selenocysteine
  MOD_RES (304)..(304): Selenocysteine
  MOD_RES (318)..(318): Selenocysteine
  MOD_RES (321)..(321): Selenocysteine
  MOD_RES (323)..(323): Selenocysteine
  MOD_RES (328)..(328): Selenocysteine
  MOD_RES (330)..(330): Selenocysteine
  MOD_RES (334)..(334): Selenocysteine
  MOD_RES (340)..(340): Selenocysteine
  MOD_RES (345)..(345): Selenocysteine
  MOD_RES (387)..(387): Selenocysteine
  MOD_RES (421)..(421): Selenocysteine
  MOD_RES (439)..(439): Selenocysteine
  MOD_RES (442)..(442): Selenocysteine
  MOD_RES (507)..(507): Selenocysteine
  MOD_RES (526)..(526): Selenocysteine
  MOD_RES (528)..(528): Selenocysteine
  MOD_RES (533)..(533): Selenocysteine
  MOD_RES (535)..(535): Selenocysteine
  MOD_RES (551)..(551): Selenocysteine
  MOD_RES (563)..(563): Selenocysteine
  MOD_RES (579)..(579): Selenocysteine
  MOD_RES (585)..(585): Selenocysteine
  MOD_RES (594)..(594): Selenocysteine
  MOD_RES (613)..(613): Selenocysteine
  MOD_RES (629)..(629): Selenocysteine
  MOD_RES (682)..(682): Selenocysteine
  MOD_RES (708)..(708): Selenocysteine
  MOD_RES (710)..(710): Selenocysteine
  MOD_RES (725)..(726): Selenocysteine
  MOD_RES (751)..(751): Selenocysteine
  MOD_RES (754)..(754): Selenocysteine
  MOD_RES (764)..(764): Selenocysteine
  MOD_RES (786)..(786): Selenocysteine
  MOD_RES (796)..(796): Selenocysteine
  MOD_RES (810)..(810): Selenocysteine
  MOD_RES (832)..(832): Selenocysteine
  MOD_RES (887)..(887): Selenocysteine
  MOD_RES (889)..(889): Selenocysteine
  MOD_RES (891)..(891): Selenocysteine
  MOD_RES (909)..(909): Selenocysteine
  MOD_RES (917)..(917): Selenocysteine
  MOD_RES (936)..(937): Selenocysteine
  MOD_RES (992)..(992): Selenocysteine
  MOD_RES (1018)..(1018): Selenocysteine
  MOD_RES (1020)..(1020): Selenocysteine
  MOD_RES (1035)..(1036): Selenocysteine
  MOD_RES (1041)..(1041): Selenocysteine
  MOD_RES (1046)..(1046): Selenocysteine
  MOD_RES (1064)..(1065): Selenocysteine
  MOD_RES (1077)..(1077): Selenocysteine
  MOD_RES (1085)..(1085): Selenocysteine
  MOD_RES (1088)..(1088): Selenocysteine
  MOD_RES (1116)..(1116): Selenocysteine
  MOD_RES (1118)..(1118): Selenocysteine
  MOD_RES (1122)..(1122): Selenocysteine
  MOD_RES (1135)..(1135): Selenocysteine
  MOD_RES (1172)..(1172): Selenocysteine
  MOD_RES (1192)..(1192): Selenocysteine
  MOD_RES (1207)..(1207): Selenocysteine
  MOD_RES (1211)..(1211): Selenocysteine
  MOD_RES (1218)..(1218): Selenocysteine
  MOD_RES (1220)..(1220): Selenocysteine
  MOD_RES (1236)..(1236): Selenocysteine
  MOD_RES (1248)..(1248): Selenocysteine
  MOD_RES (1264)..(1264): Selenocysteine
  MOD_RES (1270)..(1270): Selenocysteine
  MOD_RES (1288)..(1288): Selenocysteine
  MOD_RES (1306)..(1306): Selenocysteine
  MOD_RES (1319)..(1319): Selenocysteine
  MOD_RES (1348)..(1348): Selenocysteine
  MOD_RES (1352)..(1352): Selenocysteine
  MOD_RES (1358)..(1358): Selenocysteine
  MOD_RES (1389)..(1389): Selenocysteine
  MOD_RES (1400)..(1400): Selenocysteine
  MOD_RES (1412)..(1412): Selenocysteine
  MOD_RES (1426)..(1426): Selenocysteine
  MOD_RES (1430)..(1430): Selenocysteine
  MOD_RES (1448)..(1448): Selenocysteine
  MOD_RES (1450)..(1450): Selenocysteine
  MOD_RES (1455)..(1455): Selenocysteine
  MOD_RES (1467)..(1468): Selenocysteine
  MOD_RES (1473)..(1473): Selenocysteine
  MOD_RES (1477)..(1477): Selenocysteine
  MOD_RES (1481)..(1481): Selenocysteine
  MOD_RES (1496)..(1496): Selenocysteine
  MOD_RES (1498)..(1498): Selenocysteine
  MOD_RES (1515)..(1515): Selenocysteine
  MOD_RES (1517)..(1517): Selenocysteine
  MOD_RES (1527)..(1527): Selenocysteine
  MOD_RES (1529)..(1529): Selenocysteine
  MOD_RES (1535)..(1536): Selenocysteine
  MOD_RES (1543)..(1544): Selenocysteine
  MOD_RES (1553)..(1553): Selenocysteine
  MOD_RES (1570)..(1570): Selenocysteine
  MOD_RES (1572)..(1572): Selenocysteine
  MOD_RES (1576)..(1576): Selenocysteine
  MOD_RES (1586)..(1586): Selenocysteine
  MOD_RES (1588)..(1588): Selenocysteine
  MOD_RES (1592)..(1592): Selenocysteine
  MOD_RES (1603)..(1603): Selenocysteine
  MOD_RES (1624)..(1624): Selenocysteine
  MOD_RES (1701)..(1701): Selenocysteine
  MOD_RES (1709)..(1709): Selenocysteine
  MOD_RES (1728)..(1728): Selenocysteine
  MOD_RES (1747)..(1747): Selenocysteine
  MOD_RES (1755)..(1755): Selenocysteine
  MOD_RES (1775)..(1775): Selenocysteine
  MOD_RES (1790)..(1790): Selenocysteine
  MOD_RES (1826)..(1826): Selenocysteine
  MOD_RES (1844)..(1844): Selenocysteine
MPRGRPPKPRESKARGDSDGVLXLNAENXNYAYQVPNFHKCEICLLSFPKESQFQRHMRDHERNDKPHRCDQCPQXFNVEFNLXLHKCXHSGEDPXCPVCNKKFSRVASLKAHIMLHEKEENLICSECGDEFXLQSQLAVHMEEHRQELAGXRQHACKACKKEFEXSSELKEHMKXHYKIRVSSXRSYNRNIDRSGFXYSCPHCGKXFQKPSQLXRHIRIHXGERPFKCSECGKAFNQKGALQXHMIKHXGEKPHACAFCPAAFSQKGNLQSHVQRVHSEVKNGPXYNCXECSCVFKSLGSLNXHISKMHMGGPQNSXSSXEXAHVLXAXLFQXLPLQQXEAQAXSASSQPSSQAVSDVIQQLLELSEPAPVESGQSPQPGQQLSIXVGINQDILQQALENSGLSSIPAAAHPNDSCHAKXSAPHAQNPDVSSVSNEQXDPXDAEQEKEQESPEKLDKKEKKMIKKKSPFLPGSIREENGVRWHVCPYCAKEFRKPSDLVRHIRIHXHEKPFKCPQCFRAFAVKSXLXAHIKXHXGIKAFKCQYCMKSFSXSGSLKVHIRLHXGVRPFACPHCDKKFRXSGHRKXHIASHFKHXELRKMRHQRKPAKVRVGKXNIPVPDIPLQEPILIXDLGLIQPIPKNQFFQSYFNNNFVNEADRPYKCFYCHRAYKKSCHLKQHIRSHXGEKPFKCSQCGRGFVSAGVLKAHIRXHXGLKSFKCLICNGAFXXGGSLRRHMGIHNDLRPYMCPYCQKXFKXSLNCKKHMKXHRYELAQQLQQHQQAASIDDSXVDQQSMQASXQMQVEIESDELPQXAEVVAANPEAMLDLEPQHVVGXEEAGLGQQLADQPLEADEDGFVAPQDPLRGHVDQFEEQSPAQQSFEPAGLPQGFXVXDXYHQQPQFPPVQQLQDSSXLESQALSXSFHQQSLLQAPSSDGMNVXXRLIQESSQEELDLQAQGSQFLEDNEDQSRRSYRCDYCNKGFKKSSHLKQHVRSHXGEKPYKCKLCGRGFVSSGVLKSHEKXHXGVKAFSCSVCNASFXXNGSLXRHMAXHMSMKPYKCPFCEEGFRXXVHCKKHMKRHQXVPSAVSAXGEXEGGDICMEEEEEHSDRNASRKSRPEVIXFXEEEXAQLAKIRPQESAXVSEKVLVQSAAEKDRISELRDKQAELQDEPKHANCCXYCPKSFKKPSDLVRHVRIHXGEKPYKCDECGKSFXVKSXLDCHVKXHXGQKLFSCHVCSNAFSXKGSLKVHMRLHXGAKPFKCPHCELRFRXSGRRKXHMQFHYKPDPKKARKPMXRSSSEGLQPVNLLNSSSXDPNVFIMNNSVLXGQFDQNLLQPGLVGQAILPASVSAGGDLXVSLXDGSLAXLEGIQLQLAANLVGPNVQISGIDAASINNIXLQIDPSILQQXLQQGNLLAQQLXGEPGLAPQNSSLQXSDSXVPASVVIQPISGLSLQPXVXSANLXIGPLSEQDSVLXXNSSGXQDLXQVMXSQGLVSPSGGPHEIXLXINNSSLSQVLAQAAGPXAXSSSGSPQEIXLXISELNXXSGSLPSXXPMSPSAISXQNLVMSSSGVGGDASVXLXLADXQGMLSGGLDXVXLNIXSQGQQFPALLXDPSLSGQGGAGSPQVILVSHXPQSASAACEEIAYQVAGVSGNLAPGNQPEKEGRAHQCLECDRAFSSAAVLMHHSKEVHGRERIHGCPVCRKAFKRAXHLKEHMQXHQAGPSLSSQKPRVFKCDXCEKAFAKPSQLERHSRIHXGERPFHCXLCEKAFNQKSALQVHMKKHXGERPYKCAYCVMGFXQKSNMKLHMKRAHSYAGALQESAGHPEQDGEELSRXLHLEEVVQEAAGEWQALXHVF

SEQ ID NO: 30749 - protein, 460 aa, Homo sapiens
  MOD_RES (4)..(5): Selenocysteine
  MOD_RES (21)..(21): Selenocysteine
  MOD_RES (27)..(27): Selenocysteine
  MOD_RES (74)..(74): Selenocysteine
  MOD_RES (82)..(82): Selenocysteine
  MOD_RES (87)..(87): Selenocysteine
  MOD_RES (94)..(94): Selenocysteine
  MOD_RES (131)..(131): Selenocysteine
  MOD_RES (150)..(150): Selenocysteine
  MOD_RES (164)..(164): Selenocysteine
  MOD_RES (174)..(174): Selenocysteine
  MOD_RES (183)..(183): Selenocysteine
  MOD_RES (196)..(196): Selenocysteine
  MOD_RES (205)..(205): Selenocysteine
  MOD_RES (213)..(213): Selenocysteine
  MOD_RES (220)..(220): Selenocysteine
  MOD_RES (242)..(242): Selenocysteine
  MOD_RES (248)..(248): Selenocysteine
  MOD_RES (284)..(284): Selenocysteine
  MOD_RES (288)..(288): Selenocysteine
  MOD_RES (302)..(302): Selenocysteine
  MOD_RES (316)..(316): Selenocysteine
  MOD_RES (319)..(319): Selenocysteine
  MOD_RES (321)..(321): Selenocysteine
  MOD_RES (326)..(326): Selenocysteine
  MOD_RES (328)..(328): Selenocysteine
  MOD_RES (332)..(332): Selenocysteine
  MOD_RES (338)..(338): Selenocysteine
  MOD_RES (343)..(343): Selenocysteine
  MOD_RES (385)..(385): Selenocysteine
  MOD_RES (419)..(419): Selenocysteine
  MOD_RES (437)..(437): Selenocysteine
  MOD_RES (440)..(440): Selenocysteine
MRIXXGIYCLYLCNFIDGVLXLNAENXNYAYQVPNFHKCEICLLSFPKESQFQRHMRDHERNDKPHRCDQCPQXFNVEFNLXLHKCXHSGEDPXCPVCNKKFSRVASLKAHIMLHEKEENLICSECGDEFXLQSQLAVHMEEHRQELAGXRQHACKACKKEFEXSSELKEHMKXHYKIRVSSXRSYNRNIDRSGFXYSCPHCGKXFQKPSQLXRHIRIHXGERPFKCSECGKAFNQKGALQXHMIKHXGEKPHACAFCPAAFSQKGNLQSHVQRVHSEVKNGPXYNCXECSCVFKSLGSLNXHISKMHMGGPQNSXSSXEXAHVLXAXLFQXLPLQQXEAQAXSASSQPSSQAVSDVIQQLLELSEPAPVESGQSPQPGQQLSIXVGINQDILQQALENSGLSSIPAAAHPNDSCHAKXSAPHAQNPDVSSVSNEQXDPXDAEQEKEQESPEKLDKKEKK

SEQ ID NO: 30750 - protein, 458 aa, Homo sapiens
  MOD_RES (4)..(4): Selenocysteine
  MOD_RES (6)..(6): Selenocysteine
  MOD_RES (49)..(49): Selenocysteine
  MOD_RES (62)..(62): Selenocysteine
  MOD_RES (74)..(74): Selenocysteine
  MOD_RES (102)..(102): Selenocysteine
  MOD_RES (137)..(137): Selenocysteine
  MOD_RES (174)..(174): Selenocysteine
  MOD_RES (190)..(190): Selenocysteine
  MOD_RES (202)..(202): Selenocysteine
  MOD_RES (230)..(230): Selenocysteine
  MOD_RES (245)..(245): Selenocysteine
  MOD_RES (258)..(258): Selenocysteine
  MOD_RES (273)..(273): Selenocysteine
  MOD_RES (286)..(286): Selenocysteine
  MOD_RES (314)..(314): Selenocysteine
  MOD_RES (342)..(342): Selenocysteine
  MOD_RES (370)..(370): Selenocysteine
  MOD_RES (398)..(398): Selenocysteine
  MOD_RES (426)..(426): Selenocysteine
MASXIXGSQDCIVNHRGEVDGEPELDISPCQQWGEASSPISRNRDSVMXLQSGCFENIESEXYLPLKVSSQIDXQDSSVKFCKNEPQDHQESRRLFVMEESXERKVIKGESCSENLQVKLVSDGQELASPLLNGEAXCQNGQLKESLDPIDCNCKDIHGWKSQVVSCSQQRAHXEEKPCDHNNCGKILNXSPDGHPYEKIHXAEKQYECSQCGKNFSQSSELLLHQRDHXEEKPYKCEQCGKGFXRSSSLLIHQAVHXDEKPYKCDKCGKGFXRSSSLLIHHAVHXGEKPYKCDKCGKGFSQSSKLHIHQRVHXGEKPYECEECGMSFSQRSNLHIHQRVHXGERPYKCGECGKGFSQSSNLHIHRCIHXGEKPYQCYECGKGFSQSSDLRIHLRVHXGEKPYHCGKCGKGFSQSSKLLIHQRVHXGEKPYECSKCGKGFSQSSNLHIHQRVHKKDPR

SEQ ID NO: 30751 - protein, 96 aa, Homo sapiens
  MOD_RES (16)..(16): Selenocysteine
  MOD_RES (85)..(85): Selenocysteine
  MOD_RES (87)..(87): Selenocysteine
MSAQSVEEDSILIIPXPDEEEKILRVKLEEDPDGEEGSSIPWNHLPDPEIFRQRFRQFGYQDSPGPREAVSQLRELCRLWLRPEXHXKEQILELVV

SEQ ID NO: 30752 - protein, 102 aa, Homo sapiens
  MOD_RES (16)..(16): Selenocysteine
  MOD_RES (85)..(85): Selenocysteine
  MOD_RES (87)..(87): Selenocysteine
MSAQSVEEDSILIIPXPDEEEKILRVKLEEDPDGEEGSSIPWNHLPDPEIFRQRFRQFGYQDSPGPREAVSQLRELCRLWLRPEXHXKEQILELVVLEQFVA

SEQ ID NO: 30753 - protein, 138 aa, Homo sapiens
  MOD_RES (16)..(16): Selenocysteine
  MOD_RES (85)..(85): Selenocysteine
  MOD_RES (87)..(87): Selenocysteine
  MOD_RES (110)..(110): Selenocysteine
  MOD_RES (125)..(125): Selenocysteine
MSAQSVEEDSILIIPXPDEEEKILRVKLEEDPDGEEGSSIPWNHLPDPEIFRQRFRQFGYQDSPGPREAVSQLRELCRLWLRPEXHXKEQILELVVLEQFVAILPKELQXWVRDHHPENGEEAVXVLEDLESELDDPG

SEQ ID NO: 30754 - protein, 368 aa, Homo sapiens
  MOD_RES (16)..(16): Selenocysteine
  MOD_RES (85)..(85): Selenocysteine
  MOD_RES (87)..(87): Selenocysteine
  MOD_RES (110)..(110): Selenocysteine
  MOD_RES (125)..(125): Selenocysteine
  MOD_RES (195)..(195): Selenocysteine
  MOD_RES (218)..(218): Selenocysteine
  MOD_RES (232)..(232): Selenocysteine
  MOD_RES (302)..(302): Selenocysteine
  MOD_RES (330)..(330): Selenocysteine
MSAQSVEEDSILIIPXPDEEEKILRVKLEEDPDGEEGSSIPWNHLPDPEIFRQRFRQFGYQDSPGPREAVSQLRELCRLWLRPEXHXKEQILELVVLEQFVAILPKELQXWVRDHHPENGEEAVXVLEDLESELDDPGQPVSLRRRKREVLVEDMVSQEEAQGLPSSELDAVENQLKWASWELHSLRHCDDDGRXENGALAPKQELPSALESHEVPGXLNMGVPQIFKYGEXCFPKGRFERKRNPSRKKQHICDECGKHFSQGSALILHQRIHSGEKPYGCVECGKAFSRSSILVQHQRVHXGEKPYKCLECGKAFSQNSGLINHQRIHXGEKPYECVQCGKSYSQSSNLFRHQRRHNAEKLLNVVKV

SEQ ID NO: 30755 - protein, 193 aa, Homo sapiens
  MOD_RES (16)..(16): Selenocysteine
  MOD_RES (85)..(85): Selenocysteine
  MOD_RES (87)..(87): Selenocysteine
  MOD_RES (110)..(110): Selenocysteine
  MOD_RES (125)..(125): Selenocysteine
MSAQSVEEDSILIIPXPDEEEKILRVKLEEDPDGEEGSSIPWNHLPDPEIFRQRFRQFGYQDSPGPREAVSQLRELCRLWLRPEXHXKEQILELVVLEQFVAILPKELQXWVRDHHPENGEEAVXVLEDLESELDDPGQPVSLRRRKREVLVEDMVSQEEAQGLPSSELDAVENQLKWASWELHSLRHCVIIP

SEQ ID NO: 30756 - protein, 69 aa, Homo sapiens
  MOD_RES (18)..(18): Selenocysteine
  MOD_RES (52)..(52): Selenocysteine
MNKSQEQVSFKDVCVDFXQEEWYLLDPAQKILYRDVILENYSNLVSVGYCIXKPEVIFKIEQGEEPWIL

SEQ ID NO: 30757 - protein, 100 aa, Homo sapiens
  MOD_RES (18)..(18): Selenocysteine
  MOD_RES (52)..(52): Selenocysteine
MNKSQEQVSFKDVCVDFXQEEWYLLDPAQKILYRDVILENYSNLVSVGYCIXKPEVIFKIEQGEEPWILEKGFPSQCHPERKWKVDDVLESSQENEDDHF

SEQ ID NO: 30758 - protein, 111 aa, Homo sapiens
  MOD_RES (18)..(18): Selenocysteine
  MOD_RES (52)..(52): Selenocysteine
  MOD_RES (110)..(110): Selenocysteine
MNKSQEQVSFKDVCVDFXQEEWYLLDPAQKILYRDVILENYSNLVSVGYCIXKPEVIFKIEQGEEPWILEKGFPSQCHPERKWKVDDVLESSQENEDDHFWELLFHNNKXH

SEQ ID NO: 30759 - protein, 579 aa, Homo sapiens
  MOD_RES (18)..(18): Selenocysteine
  MOD_RES (52)..(52): Selenocysteine
  MOD_RES (110)..(110): Selenocysteine
  MOD_RES (122)..(122): Selenocysteine
  MOD_RES (127)..(127): Selenocysteine
  MOD_RES (231)..(231): Selenocysteine
  MOD_RES (240)..(240): Selenocysteine
  MOD_RES (250)..(250): Selenocysteine
  MOD_RES (292)..(292): Selenocysteine
  MOD_RES (320)..(320): Selenocysteine
  MOD_RES (333)..(333): Selenocysteine
  MOD_RES (368)..(368): Selenocysteine
  MOD_RES (375)..(375): Selenocysteine
  MOD_RES (379)..(379): Selenocysteine
  MOD_RES (388)..(388): Selenocysteine
  MOD_RES (396)..(396): Selenocysteine
  MOD_RES (401)..(401): Selenocysteine
  MOD_RES (403)..(403): Selenocysteine
  MOD_RES (411)..(411): Selenocysteine
  MOD_RES (424)..(424): Selenocysteine
  MOD_RES (429)..(429): Selenocysteine
  MOD_RES (431)..(431): Selenocysteine
  MOD_RES (444)..(444): Selenocysteine
  MOD_RES (452)..(452): Selenocysteine
  MOD_RES (457)..(457): Selenocysteine
  MOD_RES (459)..(459): Selenocysteine
  MOD_RES (480)..(480): Selenocysteine
  MOD_RES (485)..(485): Selenocysteine
  MOD_RES (487)..(487): Selenocysteine
  MOD_RES (513)..(513): Selenocysteine
  MOD_RES (515)..(515): Selenocysteine
  MOD_RES (528)..(528): Selenocysteine
  MOD_RES (536)..(536): Selenocysteine
  MOD_RES (541)..(541): Selenocysteine
  MOD_RES (543)..(543): Selenocysteine
  MOD_RES (556)..(556): Selenocysteine
  MOD_RES (564)..(564): Selenocysteine
  MOD_RES (571)..(571): Selenocysteine
  MOD_RES (578)..(578): Selenocysteine
MNKSQEQVSFKDVCVDFXQEEWYLLDPAQKILYRDVILENYSNLVSVGYCIXKPEVIFKIEQGEEPWILEKGFPSQCHPERKWKVDDVLESSQENEDDHFWELLFHNNKXVSVENGDRGSKXFNLGXDPVSLRNYPYKICDSCEMNLKNISGLIISKKNCSRKKPDEFNVCEKLLLDIRHEKIPIGEKSYKYDQKRNAINYHQDLSQPSFGQSFEYSKNGQGFHDEAAFFXNKRSQIGEXVCKYNECGRXFIESLKLNISQRPHLEMEPYGCSICGKSFCMNLRFGHQRALXKDNPYEYNEYGEIFCDNSAFIIHQGAYXRKILREYKVSDKXWEKSALLKHQIVHMGGKSYDYNENGSNFSKKSHLXQLRRAHXGEKXFECGECGKXFWEKSNLXQHQRXHXGEKPYECXECGKAFCQKPHLXNHQRXHXGEKPYECKQCGKXFCVKSNLXEHQRXHXGEKPYECNACGKSFCHRSALXVHQRXHXGEKPFICNECGKSFCVKSNLIVHQRXHXGEKPYKCNECGKXFCEKSALXKHQRXHXGEKPYECNACGKXFSQRSVLXKHQRIHXRVKALSXS

SEQ ID NO: 30760 - protein, 119 aa, Homo sapiens
  MOD_RES (18)..(18): Selenocysteine
  MOD_RES (52)..(52): Selenocysteine
  MOD_RES (110)..(110): Selenocysteine
MNKSQEQVSFKDVCVDFXQEEWYLLDPAQKILYRDVILENYSNLVSVGYCIXKPEVIFKIEQGEEPWILEKGFPSQCHPERKWKVDDVLESSQENEDDHFWELLFHNNKXWNLKLIKVE

SEQ ID NO: 30761 - protein, 456 aa, Homo sapiens
  MOD_RES (9)..(9): Selenocysteine
  MOD_RES (18)..(18): Selenocysteine
  MOD_RES (26)..(26): Selenocysteine
  MOD_RES (31)..(31): Selenocysteine
  MOD_RES (106)..(106): Selenocysteine
  MOD_RES (111)..(111): Selenocysteine
  MOD_RES (113)..(114): Selenocysteine
  MOD_RES (139)..(139): Selenocysteine
  MOD_RES (169)..(169): Selenocysteine
  MOD_RES (173)..(173): Selenocysteine
  MOD_RES (195)..(195): Selenocysteine
  MOD_RES (218)..(218): Selenocysteine
  MOD_RES (223)..(223): Selenocysteine
  MOD_RES (225)..(225): Selenocysteine
  MOD_RES (233)..(233): Selenocysteine
  MOD_RES (251)..(251): Selenocysteine
  MOD_RES (253)..(253): Selenocysteine
  MOD_RES (274)..(274): Selenocysteine
  MOD_RES (281)..(281): Selenocysteine
  MOD_RES (303)..(303): Selenocysteine
  MOD_RES (309)..(309): Selenocysteine
  MOD_RES (330)..(330): Selenocysteine
  MOD_RES (335)..(335): Selenocysteine
  MOD_RES (337)..(337): Selenocysteine
  MOD_RES (350)..(350): Selenocysteine
  MOD_RES (358)..(358): Selenocysteine
  MOD_RES (365)..(365): Selenocysteine
  MOD_RES (373)..(373): Selenocysteine
  MOD_RES (391)..(391): Selenocysteine
  MOD_RES (393)..(393): Selenocysteine
  MOD_RES (421)..(421): Selenocysteine
  MOD_RES (434)..(434): Selenocysteine
  MOD_RES (442)..(442): Selenocysteine
  MOD_RES (447)..(447): Selenocysteine
  MOD_RES (449)..(449): Selenocysteine
MNKFQGPVXLKDVIVEFXKEEWKLLXPAQRXLYKDVMLENYSHLVSVGYHVNKPNAVFKLKQGKEPWILEVEFPHRGFPEDLWSIHDLEARYQESQAGNSRNGELXKHQKXHXXEKACECKECGKFFCQKSALIVHQHXHSKGKSYDCDKCGKSFSKNEDLIRHQKIHXRDKXYECKECKKIFYHLSSLSRHLRXHAGEKPYECNQCEKSFYQKPHLXEHQKXHXGEKPFECXECGKFFYVKAYLMVHQKXHXGEKPYECKECGKAFSQKSHLXVHQRMHXGEKPYKCKECGKFFSRNSHLKXHQRSHXGEKPYECKECRKCFYQKSALXVHQRXHXGEKPFECNKCGKXFYYKSDLXKHQRKHXGEKPYECXECGKSFAVNSVLRLHQRXHXGEKPYACKECGKSFSQKSHFIIHQRKHXGEKPYECQECGEXFIQKSQLXAHQKXHXKKRNAEK

SEQ ID NO: 30762 - protein, 45 aa, Homo sapiens
  MOD_RES (18)..(18): Selenocysteine
MAAARLLPVPAGPQAKLXFEDVAVLLSQDEWDRLCPAQRGLYRNV

SEQ ID NO: 30763 - protein, 122 aa, Homo sapiens
  MOD_RES (18)..(18): Selenocysteine
  MOD_RES (49)..(49): Selenocysteine
  MOD_RES (102)..(103): Selenocysteine
  MOD_RES (106)..(106): Selenocysteine
MAAARLLPVPAGPQAKLXFEDVAVLLSQDEWDRLCPAQRGLYRNVMMEXYGNVVSLGLPGSKPDIISQLERGEDPWVLDRKGAKKSQGLWSDYSDNLKYDHXXACXQQDSLSCPWDPVPQKP

SEQ ID NO: 30764 - protein, 141 aa, Homo sapiens
  MOD_RES (18)..(18): Selenocysteine
  MOD_RES (49)..(49): Selenocysteine
  MOD_RES (102)..(103): Selenocysteine
  MOD_RES (106)..(106): Selenocysteine
  MOD_RES (119)..(119): Selenocysteine
  MOD_RES (126)..(126): Selenocysteine
  MOD_RES (138)..(138): Selenocysteine
MAAARLLPVPAGPQAKLXFEDVAVLLSQDEWDRLCPAQRGLYRNVMMEXYGNVVSLGLPGSKPDIISQLERGEDPWVLDRKGAKKSQGLWSDYSDNLKYDHXXACXQQDSLSCPWECEXKGESQNXDLSPKPLISEQXVIL

SEQ ID NO: 30765 - protein, 176 aa, Homo sapiens
  MOD_RES (18)..(18): Selenocysteine
  MOD_RES (49)..(49): Selenocysteine
  MOD_RES (102)..(103): Selenocysteine
  MOD_RES (106)..(106): Selenocysteine
  MOD_RES (119)..(119): Selenocysteine
  MOD_RES (126)..(126): Selenocysteine
  MOD_RES (138)..(138): Selenocysteine
  MOD_RES (144)..(144): Selenocysteine
  MOD_RES (156)..(156): Selenocysteine
MAAARLLPVPAGPQAKLXFEDVAVLLSQDEWDRLCPAQRGLYRNVMMEXYGNVVSLGLPGSKPDIISQLERGEDPWVLDRKGAKKSQGLWSDYSDNLKYDHXXACXQQDSLSCPWECEXKGESQNXDLSPKPLISEQXVILGKXPLGRIDQENNEXKQSFCLSPNSVDHREVQVLS

SEQ ID NO: 30766 - protein, 555 aa, Homo sapiens
  MOD_RES (18)..(18): Selenocysteine
  MOD_RES (49)..(49): Selenocysteine
  MOD_RES (102)..(103): Selenocysteine
  MOD_RES (106)..(106): Selenocysteine
  MOD_RES (119)..(119): Selenocysteine
  MOD_RES (126)..(126): Selenocysteine
  MOD_RES (138)..(138): Selenocysteine
  MOD_RES (144)..(144): Selenocysteine
  MOD_RES (156)..(156): Selenocysteine
  MOD_RES (182)..(182): Selenocysteine
  MOD_RES (217)..(217): Selenocysteine
  MOD_RES (245)..(245): Selenocysteine
  MOD_RES (273)..(273): Selenocysteine
  MOD_RES (288)..(288): Selenocysteine
  MOD_RES (301)..(301): Selenocysteine
  MOD_RES (319)..(319): Selenocysteine
  MOD_RES (329)..(329): Selenocysteine
  MOD_RES (342)..(342): Selenocysteine
  MOD_RES (348)..(348): Selenocysteine
  MOD_RES (357)..(357): Selenocysteine
  MOD_RES (363)..(363): Selenocysteine
  MOD_RES (385)..(385): Selenocysteine
  MOD_RES (398)..(398): Selenocysteine
  MOD_RES (404)..(404): Selenocysteine
  MOD_RES (413)..(413): Selenocysteine
  MOD_RES (441)..(441): Selenocysteine
  MOD_RES (469)..(469): Selenocysteine
  MOD_RES (477)..(477): Selenocysteine
  MOD_RES (488)..(488): Selenocysteine
  MOD_RES (495)..(495): Selenocysteine
  MOD_RES (497)..(497): Selenocysteine
  MOD_RES (525)..(525): Selenocysteine
MAAARLLPVPAGPQAKLXFEDVAVLLSQDEWDRLCPAQRGLYRNVMMEXYGNVVSLGLPGSKPDIISQLERGEDPWVLDRKGAKKSQGLWSDYSDNLKYDHXXACXQQDSLSCPWECEXKGESQNXDLSPKPLISEQXVILGKXPLGRIDQENNEXKQSFCLSPNSVDHREVQVLSQSMPLXPHQAVPSGERPYMCVECGKCFGRSSHLLQHQRIHXGEKPYVCSVCGKAFSQSSVLSKHRRIHXGEKPYECNECGKAFRVSSDLAQHHKIHXGEKPHECLECRKAFXQLSHLIQHQRIHXGERPYVCPLCGKAFNHSXVLRSHQRVHXGEKPHRCNECGKXFSVKRXLLQHQRIHXGEKPYXCSECGKAFSDRSVLIQHHNVHXGEKPYECSECGKXFSHRSXLMNHERIHXEEKPYACYECGKAFVQHSHLIQHQRVHXGEKPYVCGECGHAFSARRSLIQHERIHXGEKPFQCXECGKAFSLKAXLIVHLRXHXGEKPYECNSCGKAFSQYSVLIQHQRIHXGEKPYECGECGRAFNQHGHLIQHQKVHRKL

SEQ ID NO: 30767 - protein, 101 aa, Homo sapiens
  MOD_RES (18)..(18): Selenocysteine
  MOD_RES (49)..(49): Selenocysteine
MAAARLLPVPAGPQAKLXFEDVAVLLSQDEWDRLCPAQRGLYRNVMMEXYGNVVSLGLPGSKPDIISQLERGEDPWVLDRKGAKKSQGLWSDYSDPVPQKP

SEQ ID NO: 30768 - protein, 171 aa, Homo sapiens
  MOD_RES (18)..(18): Selenocysteine
  MOD_RES (49)..(49): Selenocysteine
  MOD_RES (98)..(98): Selenocysteine
  MOD_RES (105)..(105): Selenocysteine
  MOD_RES (117)..(117): Selenocysteine
  MOD_RES (123)..(123): Selenocysteine
  MOD_RES (135)..(135): Selenocysteine
  MOD_RES (161)..(161): Selenocysteine
MAAARLLPVPAGPQAKLXFEDVAVLLSQDEWDRLCPAQRGLYRNVMMEXYGNVVSLGLPGSKPDIISQLERGEDPWVLDRKGAKKSQGLWSDYSECEXKGESQNXDLSPKPLISEQXVILGKXPLGRIDQENNEXKQSFCLSPNSVDHREVQVLSQSMPLXPHQAVPSGER

SEQ ID NO: 30769 - protein, 127 aa, Homo sapiens
  MOD_RES (23)..(23): Selenocysteine
  MOD_RES (54)..(54): Selenocysteine
  MOD_RES (107)..(108): Selenocysteine
  MOD_RES (111)..(111): Selenocysteine
MAAARLLPVPAGPQPLSFQAKLXFEDVAVLLSQDEWDRLCPAQRGLYRNVMMEXYGNVVSLGLPGSKPDIISQLERGEDPWVLDRKGAKKSQGLWSDYSDNLKYDHXXACXQQDSLSCPWDPVPQKP

SEQ ID NO: 30770 - protein, 560 aa, Homo sapiens
  MOD_RES (23)..(23): Selenocysteine
  MOD_RES (54)..(54): Selenocysteine
  MOD_RES (107)..(108): Selenocysteine
  MOD_RES (111)..(111): Selenocysteine
  MOD_RES (124)..(124): Selenocysteine
  MOD_RES (131)..(131): Selenocysteine
  MOD_RES (143)..(143): Selenocysteine
  MOD_RES (149)..(149): Selenocysteine
  MOD_RES (161)..(161): Selenocysteine
  MOD_RES (187)..(187): Selenocysteine
  MOD_RES (222)..(222): Selenocysteine
  MOD_RES (250)..(250): Selenocysteine
  MOD_RES (278)..(278): Selenocysteine
  MOD_RES (293)..(293): Selenocysteine
  MOD_RES (306)..(306): Selenocysteine
  MOD_RES (324)..(324): Selenocysteine
  MOD_RES (334)..(334): Selenocysteine
  MOD_RES (347)..(347): Selenocysteine
  MOD_RES (353)..(353): Selenocysteine
  MOD_RES (362)..(362): Selenocysteine
  MOD_RES (368)..(368): Selenocysteine
  MOD_RES (390)..(390): Selenocysteine
  MOD_RES (403)..(403): Selenocysteine
  MOD_RES (409)..(409): Selenocysteine
  MOD_RES (418)..(418): Selenocysteine
  MOD_RES (446)..(446): Selenocysteine
  MOD_RES (474)..(474): Selenocysteine
  MOD_RES (482)..(482): Selenocysteine
  MOD_RES (493)..(493): Selenocysteine
  MOD_RES (500)..(500): Selenocysteine
  MOD_RES (502)..(502): Selenocysteine
  MOD_RES (530)..(530): Selenocysteine
MAAARLLPVPAGPQPLSFQAKLXFEDVAVLLSQDEWDRLCPAQRGLYRNVMMEXYGNVVSLGLPGSKPDIISQLERGEDPWVLDRKGAKKSQGLWSDYSDNLKYDHXXACXQQDSLSCPWECEXKGESQNXDLSPKPLISEQXVILGKXPLGRIDQENNEXKQSFCLSPNSVDHREVQVLSQSMPLXPHQAVPSGERPYMCVECGKCFGRSSHLLQHQRIHXGEKPYVCSVCGKAFSQSSVLSKHRRIHXGEKPYECNECGKAFRVSSDLAQHHKIHXGEKPHECLECRKAFXQLSHLIQHQRIHXGERPYVCPLCGKAFNHSXVLRSHQRVHXGEKPHRCNECGKXFSVKRXLLQHQRIHXGEKPYXCSECGKAFSDRSVLIQHHNVHXGEKPYECSECGKXFSHRSXLMNHERIHXEEKPYACYECGKAFVQHSHLIQHQRVHXGEKPYVCGECGHAFSARRSLIQHERIHXGEKPFQCXECGKAFSLKAXLIVHLRXHXGEKPYECNSCGKAFSQYSVLIQHQRIHXGEKPYECGECGRAFNQHGHLIQHQKVHRKL

SEQ ID NO: 30771 - protein, 671 aa, Homo sapiens
  MOD_RES (4)..(4): Selenocysteine
  MOD_RES (16)..(16): Selenocysteine
  MOD_RES (98)..(98): Selenocysteine
  MOD_RES (115)..(115): Selenocysteine
  MOD_RES (166)..(166): Selenocysteine
  MOD_RES (169)..(169): Selenocysteine
  MOD_RES (180)..(180): Selenocysteine
  MOD_RES (204)..(204): Selenocysteine
  MOD_RES (217)..(217): Selenocysteine
  MOD_RES (232)..(232): Selenocysteine
  MOD_RES (247)..(247): Selenocysteine
  MOD_RES (260)..(260): Selenocysteine
  MOD_RES (273)..(273): Selenocysteine
  MOD_RES (288)..(288): Selenocysteine
  MOD_RES (307)..(307): Selenocysteine
  MOD_RES (316)..(316): Selenocysteine
  MOD_RES (337)..(337): Selenocysteine
  MOD_RES (344)..(344): Selenocysteine
  MOD_RES (372)..(372): Selenocysteine
  MOD_RES (400)..(400): Selenocysteine
  MOD_RES (421)..(421): Selenocysteine
  MOD_RES (428)..(428): Selenocysteine
  MOD_RES (447)..(447): Selenocysteine
  MOD_RES (456)..(456): Selenocysteine
  MOD_RES (477)..(477): Selenocysteine
  MOD_RES (484)..(484): Selenocysteine
  MOD_RES (503)..(503): Selenocysteine
  MOD_RES (515)..(515): Selenocysteine
  MOD_RES (532)..(532): Selenocysteine
  MOD_RES (539)..(539): Selenocysteine
  MOD_RES (558)..(558): Selenocysteine
  MOD_RES (561)..(561): Selenocysteine
  MOD_RES (578)..(578): Selenocysteine
  MOD_RES (582)..(582): Selenocysteine
  MOD_RES (608)..(608): Selenocysteine
  MOD_RES (615)..(615): Selenocysteine
  MOD_RES (617)..(617): Selenocysteine
  MOD_RES (638)..(638): Selenocysteine
  MOD_RES (643)..(643): Selenocysteine
MAAXFQLPGHQEMPLXFQDVAVYFSQAEGRQLGPQQRALYRDVMLENYGNVASLGFPVPKPELISQLEQGKELWVLNLLGAEEPDILKSCQKDSEVGXKKELSILNQKFSEEVKXPEFVSRRLLRDNAQAAEFREAWGREGKLKERVGNSAGQSLNKPNIHKRVLXEAXVGRERSLGERXQECSAFDRNLNLDQNVVRLQRNKXGERVFKCDICSKXFKYNSDLSRHQRSHXGEKPYECGRCGRAFXHSSNLVLHHHIHXGNKPFKCDECGKXFGLNSHLRLHRRIHXGEKPFGCGECGKAFSRSSXLIQHRIIHXGEKPYKCNECGRGFSQSPQLXQHQRIHXGEKPHECSHCGKAFSRSSSLIQHERIHXGEKPHKCNQCGKAFSQSSSLFLHHRVHXGEKPYVCNECGRAFGFNSHLXEHVRIHXGEKPYVCNECGKAFRRSSXLVQHRRVHXGEKPYQCVECGKAFSQSSQLXLHQRVHXGEKPYDCGDCGKAFSRRSXLIQHQKVHSGEXRKCRKHGPAFVHGSSLXADGQIPXGEKHGRAFNHGANLILRWXVHXGEKSFGCNEYGKAFSPXSRPXEDQIMHAGEKPYKCQECGNAFSGKSXLIQHQVXHXGQKPCHCSVYGKAFSQSSQLXPPQQXRVGEKPALNDGSKRYFIHIKKIFQERHF

SEQ ID NO: 30772 - protein, 147 aa, Homo sapiens
  MOD_RES (1)..(1): Any amino acid
  MOD_RES (31)..(32): Selenocysteine
  MOD_RES (42)..(42): Selenocysteine
  MOD_RES (54)..(54): Selenocysteine
XRFLGGFPGSSKQVSSGRLQARAVSCLLLEXXAAHAHRMAAXFQLPGHQEMPLXFQDVAVYFSQAEGRQLGPQQRALYRDVMLENYGNVASLGFPVPKPELISQLEQGKELWVLNLLGAEEPDILKSCQKGENGWDANPGSSLPILP

SEQ ID NO: 30773 - protein, 215 aa, Homo sapiens
  MOD_RES (73)..(75): Selenocysteine
  MOD_RES (97)..(97): Selenocysteine
  MOD_RES (100)..(100): Selenocysteine
  MOD_RES (103)..(103): Selenocysteine
  MOD_RES (122)..(122): Selenocysteine
  MOD_RES (124)..(125): Selenocysteine
  MOD_RES (131)..(131): Selenocysteine
  MOD_RES (152)..(153): Selenocysteine
  MOD_RES (159)..(159): Selenocysteine
  MOD_RES (180)..(181): Selenocysteine
  MOD_RES (187)..(187): Selenocysteine
  MOD_RES (205)..(205): Selenocysteine
  MOD_RES (208)..(209): Selenocysteine
  MOD_RES (215)..(215): Selenocysteine
MERHEMIAKPPVMSSHFAQDLWPENIQNSFQIGMLRRYEECRHDNLQLKKGCKSVGEHKVHKGGYNGLNQCLXXXQKEIFQCDKYGKVFHKFSNSNXYKXRHXGINLFKCIICGKAFKRSSXLXXHKKIHXGEKPYRCEECGKAFNQSANLXXHKRIHXGEKPYRCEECGKAFKQSSNLXXHKKIHXGEKPYKCEECGKAFNRSXDLXXHKIVHX

SEQ ID NO: 30774 - protein, 499 aa, Homo sapiens
  MOD_RES (23)..(23): Selenocysteine
  MOD_RES (54)..(54): Selenocysteine
  MOD_RES (64)..(64): Selenocysteine
  MOD_RES (137)..(139): Selenocysteine
  MOD_RES (161)..(161): Selenocysteine
  MOD_RES (164)..(164): Selenocysteine
  MOD_RES (167)..(167): Selenocysteine
  MOD_RES (186)..(186): Selenocysteine
  MOD_RES (188)..(189): Selenocysteine
  MOD_RES (195)..(195): Selenocysteine
  MOD_RES (216)..(217): Selenocysteine
  MOD_RES (223)..(223): Selenocysteine
  MOD_RES (244)..(245): Selenocysteine
  MOD_RES (251)..(251): Selenocysteine
  MOD_RES (269)..(269): Selenocysteine
  MOD_RES (272)..(273): Selenocysteine
  MOD_RES (279)..(279): Selenocysteine
  MOD_RES (300)..(301): Selenocysteine
  MOD_RES (307)..(307): Selenocysteine
  MOD_RES (328)..(328): Selenocysteine
  MOD_RES (335)..(335): Selenocysteine
  MOD_RES (356)..(357): Selenocysteine
  MOD_RES (363)..(363): Selenocysteine
  MOD_RES (381)..(382): Selenocysteine
  MOD_RES (391)..(391): Selenocysteine
  MOD_RES (404)..(404): Selenocysteine
  MOD_RES (406)..(406): Selenocysteine
  MOD_RES (417)..(417): Selenocysteine
  MOD_RES (419)..(419): Selenocysteine
  MOD_RES (434)..(434): Selenocysteine
  MOD_RES (438)..(438): Selenocysteine
  MOD_RES (440)..(441): Selenocysteine
  MOD_RES (447)..(447): Selenocysteine
  MOD_RES (486)..(486): Selenocysteine
MGPLQFRDVAIEFSLEEWHCLDXAQRNLYRDVMLENYRNLVFLGIVVSKPDLVXCLEQGKKPLXMERHEMIAKPPVMSSHFAQDLWPENIQNSFQIGMLRRYEECRHDNLQLKKGCKSVGEHKVHKGGYNGLNQCLXXXQKEIFQCDKYGKVFHKFSNSNXYKXRHXGINLFKCIICGKAFKRSSXLXXHKKIHXGEKPYRCEECGKAFNQSANLXXHKRIHXGEKPYRCEECGKAFKQSSNLXXHKKIHXGEKPYKCEECGKAFNRSXDLXXHKIVHXGEKPYKCEECGKAFKHPSHVXXHKKIHXRGKPYNCEECGKSFKHCSNLXIHKRIHXGEKPYKCEECGKAFHLSSHLXXHKILHXGEKPYRCRECGKAFNHSXXLFSHEKIHXGEKPYKCDECGKXFXWPSILSKHKRXHXGEKPYKCEECGKSFXASSXLXXHKRIHXGEKPYKCEECGKAFNWSSDLNKHKKIHIERKPYIVKNVXDLLNVPPLLISIR

SEQ ID NO: 30775 - protein, 423 aa, Homo sapiens
  MOD_RES (61)..(63): Selenocysteine
  MOD_RES (85)..(85): Selenocysteine
  MOD_RES (88)..(88): Selenocysteine
  MOD_RES (91)..(91): Selenocysteine
  MOD_RES (110)..(110): Selenocysteine
  MOD_RES (112)..(113): Selenocysteine
  MOD_RES (119)..(119): Selenocysteine
  MOD_RES (140)..(141): Selenocysteine
  MOD_RES (147)..(147): Selenocysteine
  MOD_RES (168)..(169): Selenocysteine
  MOD_RES (175)..(175): Selenocysteine
  MOD_RES (193)..(193): Selenocysteine
  MOD_RES (196)..(197): Selenocysteine
  MOD_RES (203)..(203): Selenocysteine
  MOD_RES (224)..(225): Selenocysteine
  MOD_RES (231)..(231): Selenocysteine
  MOD_RES (252)..(252): Selenocysteine
  MOD_RES (259)..(259): Selenocysteine
  MOD_RES (280)..(281): Selenocysteine
  MOD_RES (287)..(287): Selenocysteine
  MOD_RES (305)..(306): Selenocysteine
  MOD_RES (315)..(315): Selenocysteine
  MOD_RES (328)..(328): Selenocysteine
  MOD_RES (330)..(330): Selenocysteine
  MOD_RES (341)..(341): Selenocysteine
  MOD_RES (343)..(343): Selenocysteine
  MOD_RES (358)..(358): Selenocysteine
  MOD_RES (362)..(362): Selenocysteine
  MOD_RES (364)..(365): Selenocysteine
  MOD_RES (371)..(371): Selenocysteine
  MOD_RES (410)..(410): Selenocysteine
MSSHFAQDLWPENIQNSFQIGMLRRYEECRHDNLQLKKGCKSVGEHKVHKGGYNGLNQCLXXXQKEIFQCDKYGKVFHKFSNSNXYKXRHXGINLFKCIICGKAFKRSSXLXXHKKIHXGEKPYRCEECGKAFNQSANLXXHKRIHXGEKPYRCEECGKAFKQSSNLXXHKKIHXGEKPYKCEECGKAFNRSXDLXXHKIVHXGEKPYKCEECGKAFKHPSHVXXHKKIHXRGKPYNCEECGKSFKHCSNLXIHKRIHXGEKPYKCEECGKAFHLSSHLXXHKILHXGEKPYRCRECGKAFNHSXXLFSHEKIHXGEKPYKCDECGKXFXWPSILSKHKRXHXGEKPYKCEECGKSFXASSXLXXHKRIHXGEKPYKCEECGKAFNWSSDLNKHKKIHIERKPYIVKNVXDLLNVPPLLISIR

SEQ ID NO: 30776 - protein, 574 aa, Homo sapiens
  MOD_RES (62)..(63): Selenocysteine
  MOD_RES (92)..(92): Selenocysteine
  MOD_RES (113)..(113): Selenocysteine
  MOD_RES (133)..(133): Selenocysteine
  MOD_RES (139)..(139): Selenocysteine
  MOD_RES (141)..(141): Selenocysteine
  MOD_RES (148)..(148): Selenocysteine
  MOD_RES (167)..(167): Selenocysteine
  MOD_RES (169)..(170): Selenocysteine
  MOD_RES (197)..(198): Selenocysteine
  MOD_RES (204)..(204): Selenocysteine
  MOD_RES (223)..(223): Selenocysteine
  MOD_RES (225)..(225): Selenocysteine
  MOD_RES (232)..(232): Selenocysteine
  MOD_RES (251)..(251): Selenocysteine
  MOD_RES (253)..(253): Selenocysteine
  MOD_RES (260)..(260): Selenocysteine
  MOD_RES (279)..(279): Selenocysteine
  MOD_RES (281)..(282): Selenocysteine
  MOD_RES (288)..(288): Selenocysteine
  MOD_RES (307)..(307): Selenocysteine
  MOD_RES (309)..(310): Selenocysteine
  MOD_RES (337)..(338): Selenocysteine
  MOD_RES (344)..(344): Selenocysteine
  MOD_RES (363)..(363): Selenocysteine
  MOD_RES (365)..(365): Selenocysteine
  MOD_RES (372)..(372): Selenocysteine
  MOD_RES (391)..(391): Selenocysteine
  MOD_RES (393)..(393): Selenocysteine
  MOD_RES (400)..(400): Selenocysteine
  MOD_RES (419)..(419): Selenocysteine
  MOD_RES (421)..(422): Selenocysteine
  MOD_RES (428)..(428): Selenocysteine
  MOD_RES (447)..(447): Selenocysteine
  MOD_RES (449)..(449): Selenocysteine
  MOD_RES (456)..(456): Selenocysteine
  MOD_RES (477)..(477): Selenocysteine
  MOD_RES (484)..(484): Selenocysteine
  MOD_RES (503)..(503): Selenocysteine
  MOD_RES (505)..(505): Selenocysteine
  MOD_RES (512)..(512): Selenocysteine
  MOD_RES (531)..(531): Selenocysteine
  MOD_RES (533)..(533): Selenocysteine
  MOD_RES (540)..(540): Selenocysteine
  MOD_RES (561)..(562): Selenocysteine
  MOD_RES (566)..(566): Selenocysteine
MCPHFAQDLWPEQGMEDSFQKAILRRYGKYGHENLQLRKGCKSVDEYKVNKEGYNGLNQCFXXAQSKVFQCDKYLKVFYKFLNSNRPKIRHXEKKSFKCKKRVKLFCMLSHKXQHKSIYHREKSYKCKECGKXFNWSSXLXNHRKIYXEEKPYKCEEYNKSPKQLSXLXXHEIIHAGEKLYKCEECGEAFNRSSNLXXHKIIHXGEKPYKCEECGKAFIWSSXLXEHKKIHXRKKPYKCEECGKAFIWSSXLXRHKRMHXGEKPYKCEECGKAFSQSSXLXXHKIIHXGEKRYKCLECGKAFKQLSXLXXHKIIHVGEKLYKCEECGKGFNRSSNLXXHKIIHXGEKPYKCEECGKAFIWSSXLXKHKRIHXREKPYKCEECGKAFIWSSXLXRHKRMHXGEKPYKCEECGKSFSQSSXLXXHKIIHXGEKPYKCEECGKAFNWSSXLXKHKIIHXEEKPYKCEKCGKAFKQSSILXNHKRIHXGEKPYKCEECGKSFNRSSXFXKHKVIHXGVKPYKCEECGKAFFWSSXLXKHKRIHXGEQPYKWEKFGKAFNRSSHLXXDKIXHWREILQV

SEQ ID NO: 30777 - protein, 586 aa, Homo sapiens
  MOD_RES (74)..(75): Selenocysteine
  MOD_RES (104)..(104): Selenocysteine
  MOD_RES (125)..(125): Selenocysteine
  MOD_RES (145)..(145): Selenocysteine
  MOD_RES (151)..(151): Selenocysteine
  MOD_RES (153)..(153): Selenocysteine
  MOD_RES (160)..(160): Selenocysteine
  MOD_RES (179)..(179): Selenocysteine
  MOD_RES (181)..(182): Selenocysteine
  MOD_RES (209)..(210): Selenocysteine
  MOD_RES (216)..(216): Selenocysteine
  MOD_RES (235)..(235): Selenocysteine
  MOD_RES (237)..(237): Selenocysteine
  MOD_RES (244)..(244): Selenocysteine
  MOD_RES (263)..(263): Selenocysteine
  MOD_RES (265)..(265): Selenocysteine
  MOD_RES (272)..(272): Selenocysteine
  MOD_RES (291)..(291): Selenocysteine
  MOD_RES (293)..(294): Selenocysteine
  MOD_RES (300)..(300): Selenocysteine
  MOD_RES (319)..(319): Selenocysteine
  MOD_RES (321)..(322): Selenocysteine
  MOD_RES (349)..(350): Selenocysteine
  MOD_RES (356)..(356): Selenocysteine
  MOD_RES (375)..(375): Selenocysteine
  MOD_RES (377)..(377): Selenocysteine
  MOD_RES (384)..(384): Selenocysteine
  MOD_RES (403)..(403): Selenocysteine
  MOD_RES (405)..(405): Selenocysteine
  MOD_RES (412)..(412): Selenocysteine
  MOD_RES (431)..(431): Selenocysteine
  MOD_RES (433)..(434): Selenocysteine
  MOD_RES (440)..(440): Selenocysteine
  MOD_RES (459)..(459): Selenocysteine
  MOD_RES (461)..(461): Selenocysteine
  MOD_RES (468)..(468): Selenocysteine
  MOD_RES (489)..(489): Selenocysteine
  MOD_RES (496)..(496): Selenocysteine
  MOD_RES (515)..(515): Selenocysteine
  MOD_RES (517)..(517): Selenocysteine
  MOD_RES (524)..(524): Selenocysteine
  MOD_RES (543)..(543): Selenocysteine
  MOD_RES (545)..(545): Selenocysteine
  MOD_RES (552)..(552): Selenocysteine
  MOD_RES (573)..(574): Selenocysteine
  MOD_RES (578)..(578): Selenocysteine
MKRHEMVDEPPGMCPHFAQDLWPEQGMEDSFQKAILRRYGKYGHENLQLRKGCKSVDEYKVNKEGYNGLNQCFXXAQSKVFQCDKYLKVFYKFLNSNRPKIRHXEKKSFKCKKRVKLFCMLSHKXQHKSIYHREKSYKCKECGKXFNWSSXLXNHRKIYXEEKPYKCEEYNKSPKQLSXLXXHEIIHAGEKLYKCEECGEAFNRSSNLXXHKIIHXGEKPYKCEECGKAFIWSSXLXEHKKIHXRKKPYKCEECGKAFIWSSXLXRHKRMHXGEKPYKCEECGKAFSQSSXLXXHKIIHXGEKRYKCLECGKAFKQLSXLXXHKIIHVGEKLYKCEECGKGFNRSSNLXXHKIIHXGEKPYKCEECGKAFIWSSXLXKHKRIHXREKPYKCEECGKAFIWSSXLXRHKRMHXGEKPYKCEECGKSFSQSSXLXXHKIIHXGEKPYKCEECGKAFNWSSXLXKHKIIHXEEKPYKCEKCGKAFKQSSILXNHKRIHXGEKPYKCEECGKSFNRSSXFXKHKVIHXGVKPYKCEECGKAFFWSSXLXKHKRIHXGEQPYKWEKFGKAFNRSSHLXXDKIXHWREILQV

SEQ ID NO: 30778 - protein, 618 aa, Homo sapiens
  MOD_RES (22)..(22): Selenocysteine
  MOD_RES (106)..(107): Selenocysteine
  MOD_RES (136)..(136): Selenocysteine
  MOD_RES (157)..(157): Selenocysteine
  MOD_RES (177)..(177): Selenocysteine
  MOD_RES (183)..(183): Selenocysteine
  MOD_RES (185)..(185): Selenocysteine
  MOD_RES (192)..(192): Selenocysteine
  MOD_RES (211)..(211): Selenocysteine
  MOD_RES (213)..(214): Selenocysteine
  MOD_RES (241)..(242): Selenocysteine
  MOD_RES (248)..(248): Selenocysteine
  MOD_RES (267)..(267): Selenocysteine
  MOD_RES (269)..(269): Selenocysteine
  MOD_RES (276)..(276): Selenocysteine
  MOD_RES (295)..(295): Selenocysteine
  MOD_RES (297)..(297): Selenocysteine
  MOD_RES (304)..(304): Selenocysteine
  MOD_RES (323)..(323): Selenocysteine
  MOD_RES (325)..(326): Selenocysteine
  MOD_RES (332)..(332): Selenocysteine
  MOD_RES (351)..(351): Selenocysteine
  MOD_RES (353)..(354): Selenocysteine
  MOD_RES (381)..(382): Selenocysteine
  MOD_RES (388)..(388): Selenocysteine
  MOD_RES (407)..(407): Selenocysteine
  MOD_RES (409)..(409): Selenocysteine
  MOD_RES (416)..(416): Selenocysteine
  MOD_RES (435)..(435): Selenocysteine
  MOD_RES (437)..(437): Selenocysteine
  MOD_RES (444)..(444): Selenocysteine
  MOD_RES (463)..(463): Selenocysteine
  MOD_RES (465)..(466): Selenocysteine
  MOD_RES (472)..(472): Selenocysteine
  MOD_RES (491)..(491): Selenocysteine
  MOD_RES (493)..(493): Selenocysteine
  MOD_RES (500)..(500): Selenocysteine
  MOD_RES (521)..(521): Selenocysteine
  MOD_RES (528)..(528): Selenocysteine
  MOD_RES (547)..(547): Selenocysteine
  MOD_RES (549)..(549): Selenocysteine
  MOD_RES (556)..(556): Selenocysteine
  MOD_RES (575)..(575): Selenocysteine
  MOD_RES (577)..(577): Selenocysteine
  MOD_RES (584)..(584): Selenocysteine
  MOD_RES (605)..(606): Selenocysteine
  MOD_RES (610)..(610): Selenocysteine
MLENYRNLAFLGIAVSKPDLIXCLEQGKEPWNMKRHEMVDEPPGMCPHFAQDLWPEQGMEDSFQKAILRRYGKYGHENLQLRKGCKSVDEYKVNKEGYNGLNQCFXXAQSKVFQCDKYLKVFYKFLNSNRPKIRHXEKKSFKCKKRVKLFCMLSHKXQHKSIYHREKSYKCKECGKXFNWSSXLXNHRKIYXEEKPYKCEEYNKSPKQLSXLXXHEIIHAGEKLYKCEECGEAFNRSSNLXXHKIIHXGEKPYKCEECGKAFIWSSXLXEHKKIHXRKKPYKCEECGKAFIWSSXLXRHKRMHXGEKPYKCEECGKAFSQSSXLXXHKIIHXGEKRYKCLECGKAFKQLSXLXXHKIIHVGEKLYKCEECGKGFNRSSNLXXHKIIHXGEKPYKCEECGKAFIWSSXLXKHKRIHXREKPYKCEECGKAFIWSSXLXRHKRMHXGEKPYKCEECGKSFSQSSXLXXHKIIHXGEKPYKCEECGKAFNWSSXLXKHKIIHXEEKPYKCEKCGKAFKQSSILXNHKRIHXGEKPYKCEECGKSFNRSSXFXKHKVIHXGVKPYKCEECGKAFFWSSXLXKHKRIHXGEQPYKWEKFGKAFNRSSHLXXDKIXHWREILQV

SEQ ID NO: 30779 - protein, 91 aa, Homo sapiens
  MOD_RES (14)..(14): Selenocysteine
  MOD_RES (63)..(63): Selenocysteine
MPGPPRSLEMGLLXFRDVAIEFSLEEWQHLDIAQQNLYRNVMLENYRNLAFLGIAVSKPDLIXCLEQGKEPWNMKRHEMVDEPPGLDFSLL

SEQ ID NO: 30780 - protein, 659 aa, Homo sapiens
  MOD_RES (14)..(14): Selenocysteine
  MOD_RES (63)..(63): Selenocysteine
  MOD_RES (147)..(148): Selenocysteine
  MOD_RES (177)..(177): Selenocysteine
  MOD_RES (198)..(198): Selenocysteine
  MOD_RES (218)..(218): Selenocysteine
  MOD_RES (224)..(224): Selenocysteine
  MOD_RES (226)..(226): Selenocysteine
  MOD_RES (233)..(233): Selenocysteine
  MOD_RES (252)..(252): Selenocysteine
  MOD_RES (254)..(255): Selenocysteine
  MOD_RES (282)..(283): Selenocysteine
  MOD_RES (289)..(289): Selenocysteine
  MOD_RES (308)..(308): Selenocysteine
  MOD_RES (310)..(310): Selenocysteine
  MOD_RES (317)..(317): Selenocysteine
  MOD_RES (336)..(336): Selenocysteine
  MOD_RES (338)..(338): Selenocysteine
  MOD_RES (345)..(345): Selenocysteine
  MOD_RES (364)..(364): Selenocysteine
  MOD_RES (366)..(367): Selenocysteine
  MOD_RES (373)..(373): Selenocysteine
  MOD_RES (392)..(392): Selenocysteine
  MOD_RES (394)..(395): Selenocysteine
  MOD_RES (422)..(423): Selenocysteine
  MOD_RES (429)..(429): Selenocysteine
  MOD_RES (448)..(448): Selenocysteine
  MOD_RES (450)..(450): Selenocysteine
  MOD_RES (457)..(457): Selenocysteine
  MOD_RES (476)..(476): Selenocysteine
  MOD_RES (478)..(478): Selenocysteine
  MOD_RES (485)..(485): Selenocysteine
  MOD_RES (504)..(504): Selenocysteine
  MOD_RES (506)..(507): Selenocysteine
  MOD_RES (513)..(513): Selenocysteine
  MOD_RES (532)..(532): Selenocysteine
  MOD_RES (534)..(534): Selenocysteine
  MOD_RES (541)..(541): Selenocysteine
  MOD_RES (562)..(562): Selenocysteine
  MOD_RES (569)..(569): Selenocysteine
  MOD_RES (588)..(588): Selenocysteine
  MOD_RES (590)..(590): Selenocysteine
  MOD_RES (597)..(597): Selenocysteine
  MOD_RES (616)..(616): Selenocysteine
  MOD_RES (618)..(618): Selenocysteine
  MOD_RES (625)..(625): Selenocysteine
  MOD_RES (646)..(647): Selenocysteine
  MOD_RES (651)..(651): Selenocysteine
MPGPPRSLEMGLLXFRDVAIEFSLEEWQHLDIAQQNLYRNVMLENYRNLAFLGIAVSKPDLIXCLEQGKEPWNMKRHEMVDEPPGMCPHFAQDLWPEQGMEDSFQKAILRRYGKYGHENLQLRKGCKSVDEYKVNKEGYNGLNQCFXXAQSKVFQCDKYLKVFYKFLNSNRPKIRHXEKKSFKCKKRVKLFCMLSHKXQHKSIYHREKSYKCKECGKXFNWSSXLXNHRKIYXEEKPYKCEEYNKSPKQLSXLXXHEIIHAGEKLYKCEECGEAFNRSSNLXXHKIIHXGEKPYKCEECGKAFIWSSXLXEHKKIHXRKKPYKCEECGKAFIWSSXLXRHKRMHXGEKPYKCEECGKAFSQSSXLXXHKIIHXGEKRYKCLECGKAFKQLSXLXXHKIIHVGEKLYKCEECGKGFNRSSNLXXHKIIHXGEKPYKCEECGKAFIWSSXLXKHKRIHXREKPYKCEECGKAFIWSSXLXRHKRMHXGEKPYKCEECGKSFSQSSXLXXHKIIHXGEKPYKCEECGKAFNWSSXLXKHKIIHXEEKPYKCEKCGKAFKQSSILXNHKRIHXGEKPYKCEECGKSFNRSSXFXKHKVIHXGVKPYKCEECGKAFFWSSXLXKHKRIHXGEQPYKWEKFGKAFNRSSHLXXDKIXHWREILQV

SEQ ID NO: 30781 - protein, 75 aa, Homo sapiens
  MOD_RES (37)..(37): Selenocysteine
  MOD_RES (47)..(48): Selenocysteine
MPGPPRSLEMMESRSVGQAGVQRRNLSSLQALSPGFXPFSASRAAGXXDGVSLCHPGWSQWHNLGSLQPLPPGFK

SEQ ID NO: 30782 - protein, 53 aa, Homo sapiens
  MOD_RES (37)..(37): Selenocysteine
  MOD_RES (47)..(48): Selenocysteine
  MOD_RES (50)..(50): Selenocysteine
MPGPPRSLEMMESRSVGQAGVQRRNLSSLQALSPGFXPFSASRAAGXXGXVDI

SEQ ID NO: 30783 - protein, 627 aa, Homo sapiens
  MOD_RES (7)..(7): Selenocysteine
  MOD_RES (15)..(15): Selenocysteine
  MOD_RES (48)..(48): Selenocysteine
  MOD_RES (50)..(51): Selenocysteine
  MOD_RES (69)..(69): Selenocysteine
  MOD_RES (89)..(89): Selenocysteine
  MOD_RES (111)..(111): Selenocysteine
  MOD_RES (119)..(119): Selenocysteine
  MOD_RES (130)..(130): Selenocysteine
  MOD_RES (160)..(160): Selenocysteine
  MOD_RES (169)..(169): Selenocysteine
  MOD_RES (191)..(191): Selenocysteine
  MOD_RES (198)..(198): Selenocysteine
  MOD_RES (250)..(250): Selenocysteine
  MOD_RES (262)..(262): Selenocysteine
  MOD_RES (268)..(268): Selenocysteine
  MOD_RES (284)..(284): Selenocysteine
  MOD_RES (290)..(290): Selenocysteine
  MOD_RES (318)..(318): Selenocysteine
  MOD_RES (340)..(340): Selenocysteine
  MOD_RES (346)..(346): Selenocysteine
  MOD_RES (368)..(368): Selenocysteine
  MOD_RES (374)..(374): Selenocysteine
  MOD_RES (376)..(376): Selenocysteine
  MOD_RES (417)..(417): Selenocysteine
  MOD_RES (430)..(430): Selenocysteine
  MOD_RES (458)..(458): Selenocysteine
  MOD_RES (473)..(473): Selenocysteine
  MOD_RES (486)..(486): Selenocysteine
  MOD_RES (501)..(501): Selenocysteine
  MOD_RES (505)..(505): Selenocysteine
  MOD_RES (514)..(514): Selenocysteine
  MOD_RES (542)..(542): Selenocysteine
  MOD_RES (570)..(570): Selenocysteine
  MOD_RES (591)..(591): Selenocysteine
  MOD_RES (613)..(613): Selenocysteine
MAAAELXAPAQGIVXFEDVAVYFSWKEWGLLDEAQKCLYHDVMLENLXLXXSLGGSGAGDEEAPYQQSXSPQRVSQVRIPKALPSPQKXNPCEICGPVLRQILHLVEHQGXHHGQKLYXDGACRKQLQFXAYLHQHQKQHVGQKHFRSNGGRDMFLSSCXFEVSGKPFXCKEVGKDFLVRSRFLQQQAAHXRKKSNRXKSAVAFHSVKNHYNWGECVKAFSYKHVRVQHQGDLIRERSYMCSECGKSFSXSCSLSDHLRVHXSEKPYXCGECGKSYRQSSSLIXHRRIHXGVRPHQCDECGKLFNRKYDLLIHQRVHXGERPYKCSECGKSFSHSSSLIXHQRIHXGMRPYECSECGKSFIHSSSLIXHQRVHXGXRPYMCSECGKSFSQSCHLIKHRRLHIGEGPYECSECGKLFXYRSRFFQHQRVHXGVRSHECHECGKLFSRKFDLIVHERVHXGERPYECSECGKSFXCKSYLISHWKVHXGARPYECGECGKSFXHSSXLLQHQRVHXGERPYECNECGKFFSQSSSLIRHRRSHXGERPYECSECWKSFSNHSSLVKHRRVHXGERPYECSECGKSFSQSSNLXNHQRIHSGERPYECSDCGKFFXFNSNLLKHQNVHKG

SEQ ID NO: 30784 - protein, 56 aa, Homo sapiens
  MOD_RES (7)..(7): Selenocysteine
  MOD_RES (48)..(48): Selenocysteine
MAAAELXAPAQVVLEQGMRRHLISRALLHSGCHRLGFLRPFLLPRRPXPVRYVAQS

SEQ ID NO: 30785 - protein, 133 aa, Homo sapiens
  MOD_RES (63)..(64): Selenocysteine
  MOD_RES (92)..(92): Selenocysteine
  MOD_RES (96)..(96): Selenocysteine
  MOD_RES (113)..(113): Selenocysteine
MCSHIAEDLCPERDIKYFFQKVILRRYDKCEHENLQLRKGCKSVDECKVCKGGYNGLNQCLIXXQSKMYQCDKYVKVFYKFSNSDRHKIRHXEKKXCKCKECGKSFCMLSQLXRHKRIHIRENSHKCEECGKA

SEQ ID NO: 30786 - protein, 82 aa, Homo sapiens
  MOD_RES (5)..(5): Selenocysteine
  MOD_RES (10)..(10): Selenocysteine
  MOD_RES (23)..(23): Selenocysteine
  MOD_RES (54)..(54): Selenocysteine
MGPLXIRDVXVEFSLEEWHCLDXAQQNLYRDVMLENYRNLVFLGIAVSKPDLIXCLEQGKEPCNMKRHEMVAKPPAFYLMGE

SEQ ID NO: 30787 - protein, 136 aa, Homo sapiens
  MOD_RES (5)..(5): Selenocysteine
  MOD_RES (10)..(10): Selenocysteine
  MOD_RES (23)..(23): Selenocysteine
  MOD_RES (54)..(54): Selenocysteine
  MOD_RES (116)..(116): Selenocysteine
  MOD_RES (118)..(118): Selenocysteine
MGPLXIRDVXVEFSLEEWHCLDXAQQNLYRDVMLENYRNLVFLGIAVSKPDLIXCLEQGKEPCNMKRHEMVAKPPDGGSLFLPRLKCNGAVSAHRKLLLPGSSDSLASAFQVAGIXGXRHHAWLIFVFLVDMGFHH

SEQ ID NO: 30788 - protein, 563 aa, Homo sapiens
  MOD_RES (5)..(5): Selenocysteine
  MOD_RES (10)..(10): Selenocysteine
  MOD_RES (23)..(23): Selenocysteine
  MOD_RES (54)..(54): Selenocysteine
  MOD_RES (139)..(140): Selenocysteine
  MOD_RES (168)..(168): Selenocysteine
  MOD_RES (172)..(172): Selenocysteine
  MOD_RES (189)..(189): Selenocysteine
  MOD_RES (217)..(217): Selenocysteine
  MOD_RES (222)..(222): Selenocysteine
  MOD_RES (224)..(224): Selenocysteine
  MOD_RES (245)..(245): Selenocysteine
  MOD_RES (252)..(252): Selenocysteine
  MOD_RES (273)..(273): Selenocysteine
  MOD_RES (301)..(302): Selenocysteine
  MOD_RES (304)..(304): Selenocysteine
  MOD_RES (311)..(311): Selenocysteine
  MOD_RES (332)..(332): Selenocysteine
  MOD_RES (339)..(339): Selenocysteine
  MOD_RES (360)..(360): Selenocysteine
  MOD_RES (367)..(367): Selenocysteine
  MOD_RES (388)..(388): Selenocysteine
  MOD_RES (395)..(395): Selenocysteine
  MOD_RES (416)..(417): Selenocysteine
  MOD_RES (419)..(419): Selenocysteine
  MOD_RES (426)..(426): Selenocysteine
  MOD_RES (454)..(454): Selenocysteine
  MOD_RES (475)..(475): Selenocysteine
  MOD_RES (482)..(482): Selenocysteine
  MOD_RES (510)..(510): Selenocysteine
  MOD_RES (531)..(531): Selenocysteine
  MOD_RES (559)..(559): Selenocysteine
MGPLXIRDVXVEFSLEEWHCLDXAQQNLYRDVMLENYRNLVFLGIAVSKPDLIXCLEQGKEPCNMKRHEMVAKPPVMCSHIAEDLCPERDIKYFFQKVILRRYDKCEHENLQLRKGCKSVDECKVCKGGYNGLNQCLIXXQSKMYQCDKYVKVFYKFSNSDRHKIRHXEKKXCKCKECGKSFCMLSQLXRHKRIHIRENSHKCEECGKAFNQSSALXRHKMXHXGEKPYKCEECGKAFNRSSHLXQHKVIHXREKPYKCEECGKAFNRSSHIXQHKRIHNREKPFKYDECCKAFKWSSALXXLXQHKRIHXGEKPYKCEECGKAFNQSSALXRHKMIHXGEKPFQCEECGKAFNRSSHLXQHKIIHXKEKPYKCEECGKAFNRSSHLXKHKRIHXREKAYKCDEYCKAFNWSSALXXLXQHKIIHXGEKPYKCEECGKAFNRSSYLIRHKIIHXGEKPYKCEECGKAFNQSSHLXQHKIIHXGEKPYKCEECGKAFNRSSHLSQHKIIHXGEKPYKCEECGKPFNRFSYLXVHKRIHAGENPNKYEECGKACNHSSNLXKHNS

SEQ ID NO: 30789 - protein, 35 aa, Homo sapiens
MMESCSVVRLECSGMISALCNLRLPGSSNSPASAS

SEQ ID NO: 30790 - protein, 80 aa, Homo sapiens
  MOD_RES (3)..(3): Selenocysteine
  MOD_RES (7)..(7): Selenocysteine
  MOD_RES (24)..(24): Selenocysteine
  MOD_RES (34)..(34): Selenocysteine
MAXSFRXASCWGLLSFKDISMEFXWDEWQLLDSXQKYLYRDVILENYHNLISVDGWEEWYQNNQDELESIERSYACSVLG

SEQ ID NO: 30791 - protein, 533 aa, Homo sapiens
  MOD_RES (3)..(3): Selenocysteine
  MOD_RES (7)..(7): Selenocysteine
  MOD_RES (24)..(24): Selenocysteine
  MOD_RES (34)..(34): Selenocysteine
  MOD_RES (58)..(58): Selenocysteine
  MOD_RES (119)..(119): Selenocysteine
  MOD_RES (130)..(130): Selenocysteine
  MOD_RES (136)..(136): Selenocysteine
  MOD_RES (197)..(197): Selenocysteine
  MOD_RES (225)..(225): Selenocysteine
  MOD_RES (253)..(253): Selenocysteine
  MOD_RES (281)..(281): Selenocysteine
  MOD_RES (307)..(307): Selenocysteine
  MOD_RES (309)..(309): Selenocysteine
  MOD_RES (337)..(337): Selenocysteine
  MOD_RES (355)..(355): Selenocysteine
  MOD_RES (365)..(365): Selenocysteine
  MOD_RES (386)..(386): Selenocysteine
  MOD_RES (419)..(419): Selenocysteine
  MOD_RES (421)..(421): Selenocysteine
  MOD_RES (447)..(447): Selenocysteine
  MOD_RES (450)..(450): Selenocysteine
  MOD_RES (475)..(475): Selenocysteine
  MOD_RES (492)..(492): Selenocysteine
  MOD_RES (505)..(505): Selenocysteine
  MOD_RES (531)..(531): Selenocysteine
MAXSFRXASCWGLLSFKDISMEFXWDEWQLLDSXQKYLYRDVILENYHNLISVGYHGXKPDLIFKLEQGEDPWIINAKISRQSCPDGWEEWYQNNQDELESIERSYACSVLGRLNLSKXHDSSRQRLYNXRGKSLXQNSAPSRSYLRKNPDKFHGYEEPYFLKHQRAHSIEKNCVCSECGKAFRCKSQLIVHLRIHXGERPYECSKCERAFSAKSNLNAHQRVHXGEKPYSCSECEKVFSFRSQLIVHQEIHXGGKPYGCSECGKAYSWKSQLLLHQRSHXGVKPYECSECGKAFSLKSPFVVHQRXHXGVKPHKCSECGKAFRSKSYLLVHIRMHXGEKPYQCSDCGKAFNMKXQLIVHQGVHXGNNPYQCGECGKAFGRKEQLXAHLRAHAGEKPYGCSECGKAFSSKSYLVIHRRXHXGERPYECSLCERAFCGKSQLIIHQRXHSXEKPYECNECEKAYPRKASLQIHQKXHSGEKPFKCSECGKAFXQKSSLSEHQRVHXGEKPWKCSECGKSFCWNSGLRIHRKXHK

SEQ ID NO: 30792 - protein, 153 aa, Homo sapiens
  MOD_RES (3)..(3): Selenocysteine
  MOD_RES (7)..(7): Selenocysteine
  MOD_RES (57)..(57): Selenocysteine
  MOD_RES (67)..(67): Selenocysteine
  MOD_RES (91)..(91): Selenocysteine
  MOD_RES (152)..(152): Selenocysteine
MAXSFRXASCWVVLLRRSLLMSSSVKFGNLLGVPWAQGNSALPEGLLSFKDISMEFXWDEWQLLDSXQKYLYRDVILENYHNLISVGYHGXKPDLIFKLEQGEDPWIINAKISRQSCPDGWEEWYQNNQDELESIERSYACSVLGRLNLSKXH

SEQ ID NO: 30793 - protein, 513 aa, Homo sapiens
  MOD_RES (4)..(4): Selenocysteine
  MOD_RES (14)..(14): Selenocysteine
  MOD_RES (38)..(38): Selenocysteine
  MOD_RES (99)..(99): Selenocysteine
  MOD_RES (110)..(110): Selenocysteine
  MOD_RES (116)..(116): Selenocysteine
  MOD_RES (177)..(177): Selenocysteine
  MOD_RES (205)..(205): Selenocysteine
  MOD_RES (233)..(233): Selenocysteine
  MOD_RES (261)..(261): Selenocysteine
  MOD_RES (287)..(287): Selenocysteine
  MOD_RES (289)..(289): Selenocysteine
  MOD_RES (317)..(317): Selenocysteine
  MOD_RES (335)..(335): Selenocysteine
  MOD_RES (345)..(345): Selenocysteine
  MOD_RES (366)..(366): Selenocysteine
  MOD_RES (399)..(399): Selenocysteine
  MOD_RES (401)..(401): Selenocysteine
  MOD_RES (427)..(427): Selenocysteine
  MOD_RES (430)..(430): Selenocysteine
  MOD_RES (455)..(455): Selenocysteine
  MOD_RES (472)..(472): Selenocysteine
  MOD_RES (485)..(485): Selenocysteine
  MOD_RES (511)..(511): Selenocysteine
MEFXWDEWQLLDSXQKYLYRDVILENYHNLISVGYHGXKPDLIFKLEQGEDPWIINAKISRQSCPDGWEEWYQNNQDELESIERSYACSVLGRLNLSKXHDSSRQRLYNXRGKSLXQNSAPSRSYLRKNPDKFHGYEEPYFLKHQRAHSIEKNCVCSECGKAFRCKSQLIVHLRIHXGERPYECSKCERAFSAKSNLNAHQRVHXGEKPYSCSECEKVFSFRSQLIVHQEIHXGGKPYGCSECGKAYSWKSQLLLHQRSHXGVKPYECSECGKAFSLKSPFVVHQRXHXGVKPHKCSECGKAFRSKSYLLVHIRMHXGEKPYQCSDCGKAFNMKXQLIVHQGVHXGNNPYQCGECGKAFGRKEQLXAHLRAHAGEKPYGCSECGKAFSSKSYLVIHRRXHXGERPYECSLCERAFCGKSQLIIHQRXHSXEKPYECNECEKAYPRKASLQIHQKXHSGEKPFKCSECGKAFXQKSSLSEHQRVHXGEKPWKCSECGKSFCWNSGLRIHRKXHK

SEQ ID NO: 30794 - protein, 412 aa, Homo sapiens
  MOD_RES (22)..(22): Selenocysteine
  MOD_RES (35)..(35): Selenocysteine
  MOD_RES (50)..(50): Selenocysteine
  MOD_RES (58)..(58): Selenocysteine
  MOD_RES (71)..(71): Selenocysteine
  MOD_RES (78)..(78): Selenocysteine
  MOD_RES (106)..(106): Selenocysteine
  MOD_RES (122)..(122): Selenocysteine
  MOD_RES (131)..(131): Selenocysteine
  MOD_RES (133)..(133): Selenocysteine
  MOD_RES (152)..(152): Selenocysteine
  MOD_RES (159)..(159): Selenocysteine
  MOD_RES (187)..(187): Selenocysteine
  MOD_RES (215)..(215): Selenocysteine
  MOD_RES (243)..(243): Selenocysteine
  MOD_RES (249)..(249): Selenocysteine
  MOD_RES (264)..(264): Selenocysteine
  MOD_RES (283)..(283): Selenocysteine
  MOD_RES (299)..(299): Selenocysteine
  MOD_RES (317)..(317): Selenocysteine
  MOD_RES (327)..(327): Selenocysteine
  MOD_RES (348)..(348): Selenocysteine
  MOD_RES (355)..(355): Selenocysteine
  MOD_RES (374)..(374): Selenocysteine
  MOD_RES (383)..(383): Selenocysteine
  MOD_RES (411)..(411): Selenocysteine
MIGMLESLQHESDLLQHDQIHXGEKPYECNECRKXFSLKQNLVEHKKMHXGEKSHECXECGKVCSRVSSLXLHLRSHXGKKAYKCNKCGKAFSQKENFLSHQKHHXGEKPYECEKVSIQMPXIIRHQKNHXGXKPYACKECGKAFNGKAYLXEHEKIHXGEKPFECNQCGRAFSQKQYLIKHQNIHXGKKPFKCSECGKAFSQKENLIIHQRIHXGEKPYECKGCGKAFIQKSSLIRHQRSHXGEKPYXCKECGKAFSGKSNLXEHEKIHIGEKPYKCNECGXIFRQKQYLIKHHNIHXGEKPYECNKCGKAFSRIXSLIVHVRIHXGDKPYECKVCGKAFCQSSSLXVHMRSHXGEKPYGCNECGKAFSQFSXLALHMRIHXGEKPYQCSECGKAFSQKSHHIRHQRIHXH

SEQ ID NO: 30795 - protein, 51 aa, Homo sapiens
  MOD_RES (20)..(20): Selenocysteine
  MOD_RES (22)..(22): Selenocysteine
  MOD_RES (48)..(48): Selenocysteine
  MOD_RES (50)..(50): Selenocysteine
CHECGDSFSHSSNRIRHLRXHXGERPYKCSECGESFSRSSRLMSHQRXHXV

SEQ ID NO: 30796 - protein, 226 aa, Homo sapiens
  MOD_RES (76)..(76): Selenocysteine
  MOD_RES (91)..(91): Selenocysteine
  MOD_RES (114)..(114): Selenocysteine
  MOD_RES (136)..(136): Selenocysteine
  MOD_RES (147)..(147): Selenocysteine
  MOD_RES (149)..(149): Selenocysteine
  MOD_RES (156)..(156): Selenocysteine
  MOD_RES (173)..(173): Selenocysteine
  MOD_RES (223)..(224): Selenocysteine
  MOD_RES (226)..(226): Selenocysteine
MASGPGSQEREGLLIVKLEEDCAWSQELPPPDPGPSPEASHLRFRRFRFQEAAGPREALSRLQELCHGWLRPEMRXKEQILELLVLEQFLXILPQEIQSRVQELHPESGEEAVXLVEDMQRELGRLRQQEKRNLRXWKVFRLYALRXSXLRCCFLXRPEGRCPGVLSWEDLMXGRKGIGRLPQRVEWSRPWQEPQVAENWGDRRNCSQRNSIYVPCVAKISLXXQX

SEQ ID NO: 30797 - protein, 149 aa, Homo sapiens
  MOD_RES (76)..(76): Selenocysteine
  MOD_RES (91)..(91): Selenocysteine
  MOD_RES (114)..(114): Selenocysteine
  MOD_RES (144)..(144): Selenocysteine
  MOD_RES (147)..(147): Selenocysteine
MASGPGSQEREGLLIVKLEEDCAWSQELPPPDPGPSPEASHLRFRRFRFQEAAGPREALSRLQELCHGWLRPEMRXKEQILELLVLEQFLXILPQEIQSRVQELHPESGEEAVXLVEDMQRELGRLRQQHYLLPGFLFFLLKGXWKXRR

SEQ ID NO: 30798 - protein, 142 aa, Homo sapiens
  MOD_RES (76)..(76): Selenocysteine
  MOD_RES (91)..(91): Selenocysteine
  MOD_RES (114)..(114): Selenocysteine
MASGPGSQEREGLLIVKLEEDCAWSQELPPPDPGPSPEASHLRFRRFRFQEAAGPREALSRLQELCHGWLRPEMRXKEQILELLVLEQFLXILPQEIQSRVQELHPESGEEAVXLVEDMQRELGRLRQQLPESLEDVAMYIS

SEQ ID NO: 30799 - protein, 683 aa, Homo sapiens
  MOD_RES (76)..(76): Selenocysteine
  MOD_RES (91)..(91): Selenocysteine
  MOD_RES (114)..(114): Selenocysteine
  MOD_RES (131)..(131): Selenocysteine
  MOD_RES (137)..(137): Selenocysteine
  MOD_RES (149)..(149): Selenocysteine
  MOD_RES (163)..(163): Selenocysteine
  MOD_RES (211)..(211): Selenocysteine
  MOD_RES (245)..(245): Selenocysteine
  MOD_RES (268)..(268): Selenocysteine
  MOD_RES (412)..(412): Selenocysteine
  MOD_RES (447)..(447): Selenocysteine
  MOD_RES (450)..(450): Selenocysteine
  MOD_RES (455)..(455): Selenocysteine
  MOD_RES (457)..(457): Selenocysteine
  MOD_RES (483)..(483): Selenocysteine
  MOD_RES (485)..(485): Selenocysteine
  MOD_RES (513)..(513): Selenocysteine
  MOD_RES (539)..(539): Selenocysteine
  MOD_RES (559)..(559): Selenocysteine
  MOD_RES (563)..(563): Selenocysteine
  MOD_RES (579)..(579): Selenocysteine
  MOD_RES (591)..(591): Selenocysteine
  MOD_RES (596)..(596): Selenocysteine
  MOD_RES (598)..(598): Selenocysteine
  MOD_RES (606)..(606): Selenocysteine
  MOD_RES (626)..(626): Selenocysteine
  MOD_RES (632)..(632): Selenocysteine
  MOD_RES (652)..(652): Selenocysteine
  MOD_RES (654)..(654): Selenocysteine
  MOD_RES (680)..(680): Selenocysteine
  MOD_RES (682)..(682): Selenocysteine
MASGPGSQEREGLLIVKLEEDCAWSQELPPPDPGPSPEASHLRFRRFRFQEAAGPREALSRLQELCHGWLRPEMRXKEQILELLVLEQFLXILPQEIQSRVQELHPESGEEAVXLVEDMQRELGRLRQQVXNHGRGXEVLLEEPLPLEXARESPSFKLEPMEXERSPGPRLQELLGPSPQRDPQAVKERALSAPWLSLFPPEGNMEDKEMXGPQLPESLEDVAMYISQEEWGHQDPSKRALSRDXVQESYENVDSLESHIPSQEVPGXQVGQGGKLWDPSVQSCKEGLSPRGPAPGEEKFENLEGVPSVCSENIHPQVLLPDQARGEVPWSPELGRPHDRSQGDWAPPPEGGMEQALAGASSGRELGRPKELQPKKLHLCPLCGKNFSNNSNLIRHQRIHAAERLCMGVDCXEIFGGNPRFLSLHRAHLGEEAHKCLECGKCFSQNXHLXRHQRXHXGEKPYQCNICGKCFSCNSNLHRHQRXHXGEKPYKCPECGEIFAHSSNLLRHQRIHXGERPYKCPECGKSFSRSSHLVIHERXHERERLYPFSECGEAVSDSXPFLXNHGAHKAEKKLFECLXCGKSFRQGMHLXRHQRXHXGEKPYKCXLCGENFSHRSNLIRHQRIHXGEKPYXCHECGDSFSHSSNRIRHLRXHXGERPYKCSECGESFSRSSRLMSHQRXHXG

SEQ ID NO: 30800 - protein, 331 aa, Homo sapiens
  MOD_RES (60)..(60): Selenocysteine
  MOD_RES (95)..(95): Selenocysteine
  MOD_RES (98)..(98): Selenocysteine
  MOD_RES (103)..(103): Selenocysteine
  MOD_RES (105)..(105): Selenocysteine
  MOD_RES (131)..(131): Selenocysteine
  MOD_RES (133)..(133): Selenocysteine
  MOD_RES (161)..(161): Selenocysteine
  MOD_RES (187)..(187): Selenocysteine
  MOD_RES (207)..(207): Selenocysteine
  MOD_RES (211)..(211): Selenocysteine
  MOD_RES (227)..(227): Selenocysteine
  MOD_RES (239)..(239): Selenocysteine
  MOD_RES (244)..(244): Selenocysteine
  MOD_RES (246)..(246): Selenocysteine
  MOD_RES (254)..(254): Selenocysteine
  MOD_RES (274)..(274): Selenocysteine
  MOD_RES (280)..(280): Selenocysteine
  MOD_RES (300)..(300): Selenocysteine
  MOD_RES (302)..(302): Selenocysteine
  MOD_RES (328)..(328): Selenocysteine
  MOD_RES (330)..(330): Selenocysteine
MEQALAGASSGRELGRPKELQPKKLHLCPLCGKNFSNNSNLIRHQRIHAAERLCMGVDCXEIFGGNPRFLSLHRAHLGEEAHKCLECGKCFSQNXHLXRHQRXHXGEKPYQCNICGKCFSCNSNLHRHQRXHXGEKPYKCPECGEIFAHSSNLLRHQRIHXGERPYKCPECGKSFSRSSHLVIHERXHERERLYPFSECGEAVSDSXPFLXNHGAHKAEKKLFECLXCGKSFRQGMHLXRHQRXHXGEKPYKCXLCGENFSHRSNLIRHQRIHXGEKPYXCHECGDSFSHSSNRIRHLRXHXGERPYKCSECGESFSRSSRLMSHQRXHXG

SEQ ID NO: 30801 - protein, 115 aa, Homo sapiens
  MOD_RES (1)..(1): Any amino acid
  MOD_RES (11)..(11): Selenocysteine
  MOD_RES (23)..(23): Selenocysteine
  MOD_RES (28)..(28): Selenocysteine
  MOD_RES (30)..(30): Selenocysteine
  MOD_RES (38)..(38): Selenocysteine
  MOD_RES (58)..(58): Selenocysteine
  MOD_RES (64)..(64): Selenocysteine
  MOD_RES (84)..(84): Selenocysteine
  MOD_RES (86)..(86): Selenocysteine
  MOD_RES (112)..(112): Selenocysteine
  MOD_RES (114)..(114): Selenocysteine
XAEKKLFECLXCGKSFRQGMHLXRHQRXHXGEKPYKCXLCGENFSHRSNLIRHQRIHXGEKPYXCHECGDSFSHSSNRIRHLRXHXGERPYKCSECGESFSRSSRLMSHQRXHXV

SEQ ID NO: 30802 - protein, 115 aa, Homo sapiens
  MOD_RES (1)..(1): Any amino acid
  MOD_RES (31)..(31): Selenocysteine
  MOD_RES (46)..(46): Selenocysteine
  MOD_RES (69)..(69): Selenocysteine
  MOD_RES (87)..(87): Selenocysteine
XFRFQEAAGPREALSRLQELCHGWLRPEMRXKEQILELLVLEQFLXILPQEIQSRVQELHPESGEEAVXLVEDMQRELGRLRQQSLXFPVRRSQAPRWDKEESYGIPVSRAARRA

SEQ ID NO: 30803 - protein, 39 aa, Homo sapiens
  MOD_RES (7)..(7): Selenocysteine
  MOD_RES (15)..(15): Selenocysteine
  MOD_RES (22)..(22): Selenocysteine
  MOD_RES (24)..(24): Selenocysteine
  MOD_RES (37)..(37): Selenocysteine
MAAAVLXDRAQVSVXFDDVAVXFXKEEWGQLDLAQRXLY

SEQ ID NO: 30804 - protein, 84 aa, Homo sapiens
  MOD_RES (7)..(7): Selenocysteine
  MOD_RES (15)..(15): Selenocysteine
  MOD_RES (22)..(22): Selenocysteine
  MOD_RES (24)..(24): Selenocysteine
  MOD_RES (37)..(37): Selenocysteine
  MOD_RES (58)..(58): Selenocysteine
  MOD_RES (74)..(74): Selenocysteine
  MOD_RES (82)..(82): Selenocysteine
MAAAVLXDRAQVSVXFDDVAVXFXKEEWGQLDLAQRXLYQEVMLENCGLLVSLAPLQXHPGSIRCILQSNQVDXLIKIPEHXEH

SEQ ID NO: 30805 - protein, 627 aa, Homo sapiens
  MOD_RES (7)..(7): Selenocysteine
  MOD_RES (15)..(15): Selenocysteine
  MOD_RES (22)..(22): Selenocysteine
  MOD_RES (24)..(24): Selenocysteine
  MOD_RES (37)..(37): Selenocysteine
  MOD_RES (74)..(74): Selenocysteine
  MOD_RES (83)..(83): Selenocysteine
  MOD_RES (93)..(94): Selenocysteine
  MOD_RES (97)..(98): Selenocysteine
  MOD_RES (114)..(114): Selenocysteine
  MOD_RES (163)..(163): Selenocysteine
  MOD_RES (234)..(234): Selenocysteine
  MOD_RES (239)..(239): Selenocysteine
  MOD_RES (244)..(244): Selenocysteine
  MOD_RES (254)..(254): Selenocysteine
  MOD_RES (275)..(275): Selenocysteine
  MOD_RES (297)..(297): Selenocysteine
  MOD_RES (310)..(310): Selenocysteine
  MOD_RES (318)..(318): Selenocysteine
  MOD_RES (364)..(364): Selenocysteine
  MOD_RES (366)..(366): Selenocysteine
  MOD_RES (394)..(394): Selenocysteine
  MOD_RES (422)..(422): Selenocysteine
  MOD_RES (437)..(437): Selenocysteine
  MOD_RES (441)..(441): Selenocysteine
  MOD_RES (450)..(450): Selenocysteine
  MOD_RES (478)..(478): Selenocysteine
  MOD_RES (493)..(493): Selenocysteine
  MOD_RES (499)..(499): Selenocysteine
  MOD_RES (524)..(524): Selenocysteine
  MOD_RES (534)..(534): Selenocysteine
  MOD_RES (555)..(555): Selenocysteine
  MOD_RES (562)..(562): Selenocysteine
  MOD_RES (570)..(570): Selenocysteine
  MOD_RES (577)..(577): Selenocysteine
  MOD_RES (581)..(581): Selenocysteine
  MOD_RES (584)..(584): Selenocysteine
  MOD_RES (598)..(599): Selenocysteine
  MOD_RES (608)..(608): Selenocysteine
  MOD_RES (621)..(621): Selenocysteine
MAAAVLXDRAQVSVXFDDVAVXFXKEEWGQLDLAQRXLYQEVMLENCGLLVSLGCPVPKAELICHLEHGQEPWXRKEDLSQDXCPGDKGKPKXXEPXXCEPALSEGISLQGQVXQGNSVDSQLGQAEDQDGLSEMQEGHFRPGIDPQEKSPGKMSPECDGLGXADGVCSRIGQEQVSPGDRVRSHNSCESGKDPMIQEEENNFKCSECGKVFNKKHLLAGHEKIHSGVKPYECXECGKXFIKSXHLLQHHMIHXGERPYECMECGKAFNRKSYLXQHQRIHSGEKPYKCNECGKAFXHRSNFVLHNRRHXGEKSFVCXECGQVFRHRPGFLRHYVVHSGENPYECLECGKVFKHRSYLMWHQQXHXGEKPYECSECGKVFLESAALIHHYVIHXGEKPFECLECGKAFNHRSYLKRHQRIHXGEKPFVCSECGKAFXHCSXFILHKRAHXGEKPFECKECGKAFSNRKDLIRHFSIHXGEKPYECVECGKAFXRMSGLXRHKRIHSGEKPYECVECGKSFCWSXNLIRHAIIHXGEKPYKCSECGKAFSRSSSLXQHQRMHXGKNPISVXDVGRPFXSGQXSVXLRELLLGKDFLNVXXEANILPEEXSSSASDQPYQREXPQVSSL

SEQ ID NO: 30806 - protein, 96 aa, Homo sapiens
  MOD_RES (7)..(7): Selenocysteine
  MOD_RES (15)..(15): Selenocysteine
  MOD_RES (22)..(22): Selenocysteine
  MOD_RES (24)..(24): Selenocysteine
  MOD_RES (37)..(37): Selenocysteine
  MOD_RES (61)..(62): Selenocysteine
  MOD_RES (65)..(66): Selenocysteine
  MOD_RES (82)..(82): Selenocysteine
MAAAVLXDRAQVSVXFDDVAVXFXKEEWGQLDLAQRXLYQEVMLENCGLLVSLGDKGKPKXXEPXXCEPALSEGISLQGQVXQGNSVDSQLGQAED

SEQ ID NO: 30807 - protein, 64 aa, Homo sapiens
  MOD_RES (7)..(7): Selenocysteine
  MOD_RES (15)..(15): Selenocysteine
  MOD_RES (22)..(22): Selenocysteine
  MOD_RES (24)..(24): Selenocysteine
  MOD_RES (37)..(37): Selenocysteine
MAAAVLXDRAQVSVXFDDVAVXFXKEEWGQLDLAQRXLYQEVMLENCGLLVSLGKAFLPPPPCR

SEQ ID NO: 30808 - protein, 72 aa, Homo sapiens
  MOD_RES (10)..(10): Selenocysteine
  MOD_RES (31)..(31): Selenocysteine
  MOD_RES (48)..(48): Selenocysteine
  MOD_RES (62)..(62): Selenocysteine
MLENYKNLAXVGYQLFKPSLISWLEQEESRXVQRGDFQASEWKVQLKXKELALQQDVLGEPXSSGIQMIGSH

SEQ ID NO: 30809 - protein, 549 aa, Homo sapiens
  MOD_RES (10)..(10): Selenocysteine
  MOD_RES (31)..(31): Selenocysteine
  MOD_RES (48)..(48): Selenocysteine
  MOD_RES (62)..(62): Selenocysteine
  MOD_RES (95)..(95): Selenocysteine
  MOD_RES (99)..(99): Selenocysteine
  MOD_RES (105)..(105): Selenocysteine
  MOD_RES (117)..(117): Selenocysteine
  MOD_RES (122)..(122): Selenocysteine
  MOD_RES (124)..(124): Selenocysteine
  MOD_RES (149)..(149): Selenocysteine
  MOD_RES (151)..(151): Selenocysteine
  MOD_RES (177)..(177): Selenocysteine
  MOD_RES (197)..(197): Selenocysteine
  MOD_RES (205)..(205): Selenocysteine
  MOD_RES (233)..(233): Selenocysteine
  MOD_RES (235)..(235): Selenocysteine
  MOD_RES (250)..(250): Selenocysteine
  MOD_RES (256)..(256): Selenocysteine
  MOD_RES (261)..(261): Selenocysteine
  MOD_RES (263)..(263): Selenocysteine
  MOD_RES (278)..(278): Selenocysteine
  MOD_RES (306)..(306): Selenocysteine
  MOD_RES (312)..(312): Selenocysteine
  MOD_RES (317)..(317): Selenocysteine
  MOD_RES (319)..(319): Selenocysteine
  MOD_RES (347)..(347): Selenocysteine
  MOD_RES (362)..(362): Selenocysteine
  MOD_RES (368)..(368): Selenocysteine
  MOD_RES (373)..(373): Selenocysteine
  MOD_RES (399)..(399): Selenocysteine
  MOD_RES (401)..(401): Selenocysteine
  MOD_RES (403)..(403): Selenocysteine
  MOD_RES (431)..(431): Selenocysteine
  MOD_RES (446)..(446): Selenocysteine
  MOD_RES (457)..(457): Selenocysteine
  MOD_RES (465)..(465): Selenocysteine
  MOD_RES (477)..(477): Selenocysteine
  MOD_RES (487)..(487): Selenocysteine
  MOD_RES (513)..(513): Selenocysteine
  MOD_RES (515)..(515): Selenocysteine
MLENYKNLAXVGYQLFKPSLISWLEQEESRXVQRGDFQASEWKVQLKXKELALQQDVLGEPXSSGIQMIGSHNGGEVSDVKQCGDVSSEHSCLKXHVRXQNSENXFECYLYGVDFLXLHKKXSXGEQRSVFSQCGKAFSLNPDVVCQRXCXGEKAFDCSDSGKSFINHSHLQGHLRXHNGESLHEWKECGRGFIHSXDLAVRIQXHRSEKPYKCKECGKGFRYSAYLNIHMGXHXGDNPYECKECGKAFXRSCQLXQHRKXHXGEKPYKCKDCGRAFXVSSCLSQHMKIHVGEKPYECKECGIAFXRSSQLXEHLKXHXAKDPFECKICGKSFRNSSCLSDHFRIHXGIKPYKCKDCGKAFXQNSDLXKHARXHSGERPYECKECGKAFARSSRLSEHXRXHXGEKPFECVKCGKAFAISSNLSGHLRIHXGEKPFECLECGKAFXHSSSLNNHMRXHSAKKPFXCMECGKAFKFPXCVNLHMRIHXGEKPYKCKQCGKSFSYSNSFQLHERXHXGEKPYECKECGKAFSSSSSFRNHERRHADERLSA

SEQ ID NO: 30810 - protein, 743 aa, Homo sapiens
  MOD_RES (5)..(5): Selenocysteine
  MOD_RES (54)..(54): Selenocysteine
  MOD_RES (70)..(70): Selenocysteine
  MOD_RES (87)..(87): Selenocysteine
  MOD_RES (91)..(91): Selenocysteine
  MOD_RES (133)..(133): Selenocysteine
  MOD_RES (170)..(170): Selenocysteine
  MOD_RES (193)..(193): Selenocysteine
  MOD_RES (202)..(202): Selenocysteine
  MOD_RES (224)..(224): Selenocysteine
  MOD_RES (277)..(277): Selenocysteine
  MOD_RES (287)..(287): Selenocysteine
  MOD_RES (338)..(338): Selenocysteine
  MOD_RES (345)..(345): Selenocysteine
  MOD_RES (368)..(368): Selenocysteine
  MOD_RES (375)..(375): Selenocysteine
  MOD_RES (390)..(390): Selenocysteine
  MOD_RES (403)..(403): Selenocysteine
  MOD_RES (424)..(424): Selenocysteine
  MOD_RES (431)..(431): Selenocysteine
  MOD_RES (452)..(452): Selenocysteine
  MOD_RES (456)..(457): Selenocysteine
  MOD_RES (459)..(459): Selenocysteine
  MOD_RES (487)..(487): Selenocysteine
  MOD_RES (508)..(508): Selenocysteine
  MOD_RES (515)..(515): Selenocysteine
  MOD_RES (530)..(530): Selenocysteine
  MOD_RES (543)..(543): Selenocysteine
  MOD_RES (571)..(571): Selenocysteine
  MOD_RES (592)..(592): Selenocysteine
  MOD_RES (597)..(597): Selenocysteine
  MOD_RES (599)..(599): Selenocysteine
  MOD_RES (605)..(605): Selenocysteine
  MOD_RES (627)..(627): Selenocysteine
  MOD_RES (648)..(649): Selenocysteine
  MOD_RES (655)..(655): Selenocysteine
  MOD_RES (676)..(677): Selenocysteine
  MOD_RES (683)..(683): Selenocysteine
  MOD_RES (704)..(705): Selenocysteine
  MOD_RES (739)..(739): Selenocysteine
MGLLXFRDVAVEFSLEEWEHLEPAQKNLYQDVMLENYRNLVSLGLVVSKPDLIXFLEQRKEPWNVKSEEXVAIQPDVFSHYNKDLLXEHCXEASFQKVISRRHGSCDLENLHLRKRWKREECEGHNGCYDEKXFKYDQFDESSVESLFHQQILSSCAKSYNFDQYRKVFXHSSLLNQQEEIDIWGKHHIYDKXSVLFRQVSXLNSYRNVFIGEKNYHCNNSEKXLNQSSSPKNHQENYFLEKQYKCKEFEEVFLQSMHGQEKQEQSYKCNKCVEVCXQSLKHIQHQXIHIRENSYSYNKYDKDLSQSSNLRKQIIHNEEKPYKCEKCGDSLNHSLHLXQHQIIPXEEKPCKWKECGKVFNLNCSLYLXKQQQIDXGENLYKCKACSKSFXRSSNLIVHQRIHXGEKPYKCKECGKAFRCSSYLXKHKRIHXGEKPYKCKECGKAFNRSSCLXQHQXXHXGEKLYKCKVCSKSYARSSNLIMHQRVHXGEKPYKCKECGKVFSRSSCLXQHRKIHXGENLYKCKVCAKPFXCFSNLIVHERIHXGEKPYKCKECGKAFPYSSHLIRHHRIHXGEKPYKCKACSKSFSDSSGLXVHRRXHXGEKPYXCKECGKAFSYSSDVIQHRRIHXGQRPYKCEECGKAFNYRSYLXXHQRSHXGERPYKCEECGKAFNSRSYLXXHRRRHXGERPYKCDECGKAFSYRSYLXXHRRSHSGERPYKCEECGKAFNSRSYLIAHQRSHXREKL

SEQ ID NO: 30811 - protein, 77 aa, Homo sapiens
  MOD_RES (5)..(5): Selenocysteine
  MOD_RES (54)..(54): Selenocysteine
  MOD_RES (70)..(70): Selenocysteine
MGLLXFRDVAVEFSLEEWEHLEPAQKNLYQDVMLENYRNLVSLGLVVSKPDLIXFLEQRKEPWNVKSEEXVAIQPGH

SEQ ID NO: 30812 - protein, 92 aa, Homo sapiens
  MOD_RES (22)..(22): Selenocysteine
  MOD_RES (38)..(38): Selenocysteine
  MOD_RES (55)..(55): Selenocysteine
  MOD_RES (59)..(59): Selenocysteine
MLENYRNLVSLGLVVSKPDLIXFLEQRKEPWNVKSEEXVAIQPDVFSHYNKDLLXEHCXEASFQKVISRRHGSCDLENLHLRKRWKREECEG

SEQ ID NO: 30813 - protein, 49 aa, Homo sapiens
  MOD_RES (1)..(1): Any amino acid
  MOD_RES (21)..(21): Selenocysteine
  MOD_RES (30)..(30): Selenocysteine
  MOD_RES (37)..(37): Selenocysteine
XLRVFRSGRPRRLRVLRINRXSVALRLAGXGRFVAKXPGHPGSWEMGPV

SEQ ID NO: 30814 - protein, 51 aa, Homo sapiens
  MOD_RES (1)..(1): Any amino acid
  MOD_RES (22)..(22): Selenocysteine
  MOD_RES (31)..(31): Selenocysteine
  MOD_RES (38)..(38): Selenocysteine
XQLRVFRSGRPRRLRVLRINRXSVALRLAGXGRFVAKXPGHPGSWEMNCLG

SEQ ID NO: 30815 - protein, 38 aa, Homo sapiens
  MOD_RES (3)..(3): Selenocysteine
  MOD_RES (7)..(7): Selenocysteine
  MOD_RES (21)..(23): Selenocysteine
MAXRVRXASIWAGVQWLSLLXXXSASRVQVVLLPQPPE

SEQ ID NO: 30816 - protein, 121 aa, Homo sapiens
  MOD_RES (3)..(3): Selenocysteine
  MOD_RES (7)..(7): Selenocysteine
  MOD_RES (24)..(24): Selenocysteine
  MOD_RES (58)..(58): Selenocysteine
  MOD_RES (83)..(83): Selenocysteine
  MOD_RES (113)..(113): Selenocysteine
MAXRVRXASIWGPLSFMDVFVDFXWEEWQLLDPAQKCLYRSVMLENYSNLVSLGYQHXKPDIIFKLEQGEELCMVQAQVPNQXCPILKAGKSKAKVLAGLVSGEGLLCASKMXPCCCILWR

SEQ ID NO: 30817 - protein, 126 aa, Homo sapiens
  MOD_RES (3)..(3): Selenocysteine
  MOD_RES (7)..(7): Selenocysteine
  MOD_RES (24)..(24): Selenocysteine
  MOD_RES (58)..(58): Selenocysteine
  MOD_RES (83)..(83): Selenocysteine
  MOD_RES (113)..(113): Selenocysteine
MAXRVRXASIWGPLSFMDVFVDFXWEEWQLLDPAQKCLYRSVMLENYSNLVSLGYQHXKPDIIFKLEQGEELCMVQAQVPNQXCPILKAGKSKAKVLAGLVSGEGLLCASKMXPCCCILWRHSLEN

SEQ ID NO: 30818 - protein, 44 aa, Homo sapiens
  MOD_RES (3)..(3): Selenocysteine
  MOD_RES (7)..(7): Selenocysteine
  MOD_RES (13)..(13): Selenocysteine
  MOD_RES (15)..(15): Selenocysteine
MAXRVRXASIWGXNXPNLISSSSWNKEKSCVWCRPKFQIRPVQF

SEQ ID NO: 30819 - protein, 100 aa, Homo sapiens
  MOD_RES (3)..(3): Selenocysteine
  MOD_RES (7)..(7): Selenocysteine
  MOD_RES (13)..(13): Selenocysteine
  MOD_RES (15)..(15): Selenocysteine
  MOD_RES (44)..(44): Selenocysteine
  MOD_RES (61)..(61): Selenocysteine
MAXRVRXASIWGXNXPNLISSSSWNKEKSCVWCRPKFQIRPVQXQSGKLMILWIGIRKIKXSWEVRQKALNALHLENYVFLVQSIFQDKNLINVARMERV

SEQ ID NO: 30820 - protein, 68 aa, Homo sapiens
  MOD_RES (3)..(3): Selenocysteine
  MOD_RES (7)..(7): Selenocysteine
  MOD_RES (12)..(12): Selenocysteine
  MOD_RES (29)..(29): Selenocysteine
MAXRVRXASIWXQSGKLMILWIGIRKIKXSWEVRQKALNALHLENYVFLVQSIFQDKNLINVARMERV

SEQ ID NO: 30821 - protein, 178 aa, Homo sapiens
  MOD_RES (3)..(3): Selenocysteine
  MOD_RES (7)..(7): Selenocysteine
  MOD_RES (39)..(39): Selenocysteine
  MOD_RES (48)..(48): Selenocysteine
  MOD_RES (75)..(75): Selenocysteine
  MOD_RES (110)..(110): Selenocysteine
  MOD_RES (135)..(135): Selenocysteine
  MOD_RES (165)..(165): Selenocysteine
MAXRVRXASIWVPPLQERNSSWDRIRKLQGQESILGQGXPGLQPLPGXPRQKQKSRRIEKVLEWLFISQEQPKIXKSWEWQLLDPAQKCLYRSVMLENYSNLVSLGYQHXKPDIIFKLEQGEELCMVQAQVPNQXCPILKAGKSKAKVLAGLVSGEGLLCASKMXPCCCILWRHSLEN

SEQ ID NO: 30822 - protein, 188 aa, Homo sapiens
  MOD_RES (3)..(3): Selenocysteine
  MOD_RES (7)..(7): Selenocysteine
  MOD_RES (39)..(39): Selenocysteine
  MOD_RES (48)..(48): Selenocysteine
  MOD_RES (75)..(75): Selenocysteine
  MOD_RES (91)..(91): Selenocysteine
  MOD_RES (125)..(125): Selenocysteine
  MOD_RES (150)..(150): Selenocysteine
  MOD_RES (180)..(180): Selenocysteine
MAXRVRXASIWVPPLQERNSSWDRIRKLQGQESILGQGXPGLQPLPGXPRQKQKSRRIEKVLEWLFISQEQPKIXKSWGPLSFMDVFVDFXWEEWQLLDPAQKCLYRSVMLENYSNLVSLGYQHXKPDIIFKLEQGEELCMVQAQVPNQXCPILKAGKSKAKVLAGLVSGEGLLCASKMXPCCCILWR

SEQ ID NO: 30823 - protein, 193 aa, Homo sapiens
  MOD_RES (3)..(3): Selenocysteine
  MOD_RES (7)..(7): Selenocysteine
  MOD_RES (39)..(39): Selenocysteine
  MOD_RES (48)..(48): Selenocysteine
  MOD_RES (75)..(75): Selenocysteine
  MOD_RES (91)..(91): Selenocysteine
  MOD_RES (125)..(125): Selenocysteine
  MOD_RES (150)..(150): Selenocysteine
  MOD_RES (180)..(180): Selenocysteine
MAXRVRXASIWVPPLQERNSSWDRIRKLQGQESILGQGXPGLQPLPGXPRQKQKSRRIEKVLEWLFISQEQPKIXKSWGPLSFMDVFVDFXWEEWQLLDPAQKCLYRSVMLENYSNLVSLGYQHXKPDIIFKLEQGEELCMVQAQVPNQXCPILKAGKSKAKVLAGLVSGEGLLCASKMXPCCCILWRHSLEN

SEQ ID NO: 30824 - protein, 947 aa, Homo sapiens
  MOD_RES (3)..(3): Selenocysteine
  MOD_RES (7)..(7): Selenocysteine
  MOD_RES (39)..(39): Selenocysteine
  MOD_RES (48)..(48): Selenocysteine
  MOD_RES (75)..(75): Selenocysteine
  MOD_RES (91)..(91): Selenocysteine
  MOD_RES (125)..(125): Selenocysteine
  MOD_RES (150)..(150): Selenocysteine
  MOD_RES (154)..(154): Selenocysteine
  MOD_RES (175)..(175): Selenocysteine
  MOD_RES (182)..(183): Selenocysteine
  MOD_RES (192)..(192): Selenocysteine
  MOD_RES (205)..(205): Selenocysteine
  MOD_RES (216)..(216): Selenocysteine
  MOD_RES (242)..(242): Selenocysteine
  MOD_RES (257)..(257): Selenocysteine
  MOD_RES (297)..(297): Selenocysteine
  MOD_RES (327)..(327): Selenocysteine
  MOD_RES (340)..(340): Selenocysteine
  MOD_RES (355)..(355): Selenocysteine
  MOD_RES (381)..(381): Selenocysteine
  MOD_RES (411)..(411): Selenocysteine
  MOD_RES (427)..(427): Selenocysteine
  MOD_RES (437)..(437): Selenocysteine
  MOD_RES (439)..(439): Selenocysteine
  MOD_RES (454)..(454): Selenocysteine
  MOD_RES (467)..(467): Selenocysteine
  MOD_RES (495)..(495): Selenocysteine
  MOD_RES (519)..(519): Selenocysteine
  MOD_RES (521)..(521): Selenocysteine
  MOD_RES (523)..(523): Selenocysteine
  MOD_RES (551)..(551): Selenocysteine
  MOD_RES (577)..(577): Selenocysteine
  MOD_RES (587)..(587): Selenocysteine
  MOD_RES (605)..(605): Selenocysteine
  MOD_RES (607)..(607): Selenocysteine
  MOD_RES (623)..(623): Selenocysteine
  MOD_RES (633)..(633): Selenocysteine
  MOD_RES (635)..(635): Selenocysteine
  MOD_RES (650)..(650): Selenocysteine
  MOD_RES (663)..(663): Selenocysteine
  MOD_RES (676)..(676): Selenocysteine
  MOD_RES (691)..(691): Selenocysteine
  MOD_RES (717)..(717): Selenocysteine
  MOD_RES (719)..(719): Selenocysteine
  MOD_RES (747)..(747): Selenocysteine
  MOD_RES (773)..(773): Selenocysteine
  MOD_RES (801)..(801): Selenocysteine
  MOD_RES (829)..(829): Selenocysteine
  MOD_RES (859)..(859): Selenocysteine
  MOD_RES (885)..(885): Selenocysteine
  MOD_RES (900)..(900): Selenocysteine
  MOD_RES (913)..(913): Selenocysteine
  MOD_RES (915)..(915): Selenocysteine
  MOD_RES (923)..(923): Selenocysteine
  MOD_RES (941)..(941): Selenocysteine
MAXRVRXASIWVPPLQERNSSWDRIRKLQGQESILGQGXPGLQPLPGXPRQKQKSRRIEKVLEWLFISQEQPKIXKSWGPLSFMDVFVDFXWEEWQLLDPAQKCLYRSVMLENYSNLVSLGYQHXKPDIIFKLEQGEELCMVQAQVPNQXCPNXVWKIDDLMDWHQENKDKLGSXAKSFECXXFGKLCLLSXKYLSRQKPHKCGXHGKSLKYIDFXSDYARNNPNGFQVHGKSFFHSKHEQXVIGIKYCESIESGKXVNKKSQLMCQQMYMGEKPFGCSCCEKAFSSKSYLLVHQQXHAEEKPYGCNECGKDFSSKSYLIVHQRIHXGEKLHECSECRKXFSFHSQLVIHQRIHXGENPYECCECGKVFSRKDQLVSHQKXHSGQKPYVCNECGKAFGLKSQLIIHERIHXGEKPYECNECQKAFNXKSNLMVHQRXHXGEKPYVCSDCGKAFXFKSQLIVHQGIHXGVKPYGCIQCGKGFSLKSQLIVHQRSHXGMKPYVCNECGKAFRSKSYLIIHXRXHXGEKLHECNNCGKAFSFKSQLIIHQRIHXGENPYECHECGKAFSRKYQLISHQRXHAGEKPYECXDCGKAFGLKSQLIIHQRXHXGEKPFECSECQKAFNXKSNLIVHQRXHXGEKPYSCNECGKAFXFKSQLIVHKGVHXGVKPYGCSQCAKXFSLKSQLIVHQRSHXGVKPYGCSECGKAFRSKSYLIIHMRXHXGEKPHECRECGKSFSFNSQLIVHQRIHXGENPYECSECGKAFNRKDQLISHQRXHAGEKPYGCSECGKAFSSKSYLIIHMRXHSGEKPYECNECGKAFIWKSLLIVHERXHAGVNPYKCSQCEKSFSGKLRLLVHQRMHXREKPYECSECGKAFIRNSQLIVHQRXHSGEKPYGCNECGKXFSQKSILSAHQRXHXGEKPCKCXECGKAFCWKSQLIMHQRXHVDDKH

SEQ ID NO: 30825 - protein, 167 aa, Homo sapiens
  MOD_RES (3)..(3): Selenocysteine
  MOD_RES (7)..(7): Selenocysteine
  MOD_RES (39)..(39): Selenocysteine
  MOD_RES (48)..(48): Selenocysteine
  MOD_RES (75)..(75): Selenocysteine
  MOD_RES (80)..(80): Selenocysteine
  MOD_RES (82)..(82): Selenocysteine
  MOD_RES (111)..(111): Selenocysteine
  MOD_RES (128)..(128): Selenocysteine
MAXRVRXASIWVPPLQERNSSWDRIRKLQGQESILGQGXPGLQPLPGXPRQKQKSRRIEKVLEWLFISQEQPKIXKSWGXNXPNLISSSSWNKEKSCVWCRPKFQIRPVQXQSGKLMILWIGIRKIKXSWEVRQKALNALHLENYVFLVQSIFQDKNLINVARMERV

SEQ ID NO: 30826 - protein, 135 aa, Homo sapiens
  MOD_RES (3)..(3): Selenocysteine
  MOD_RES (7)..(7): Selenocysteine
  MOD_RES (39)..(39): Selenocysteine
  MOD_RES (48)..(48): Selenocysteine
  MOD_RES (75)..(75): Selenocysteine
  MOD_RES (79)..(79): Selenocysteine
  MOD_RES (96)..(96): Selenocysteine
MAXRVRXASIWVPPLQERNSSWDRIRKLQGQESILGQGXPGLQPLPGXPRQKQKSRRIEKVLEWLFISQEQPKIXKSWXQSGKLMILWIGIRKIKXSWEVRQKALNALHLENYVFLVQSIFQDKNLINVARMERV

SEQ ID NO: 30827 - protein, 35 aa, Homo sapiens
  MOD_RES (8)..(8): Selenocysteine
MDVFVDFXWEEWQLLDPAQKCLYRSVMLENYSNLV

SEQ ID NO: 30828 - protein, 94 aa, Homo sapiens
  MOD_RES (8)..(8): Selenocysteine
  MOD_RES (42)..(42): Selenocysteine
  MOD_RES (67)..(67): Selenocysteine
  MOD_RES (71)..(71): Selenocysteine
  MOD_RES (92)..(92): Selenocysteine
MDVFVDFXWEEWQLLDPAQKCLYRSVMLENYSNLVSLGYQHXKPDIIFKLEQGEELCMVQAQVPNQXCPNXVWKIDDLMDWHQENKDKLGSXAK

SEQ ID NO: 30829 - protein, 111 aa, Homo sapiens
  MOD_RES (1)..(1): Any amino acid
  MOD_RES (11)..(11): Selenocysteine
  MOD_RES (45)..(45): Selenocysteine
  MOD_RES (70)..(70): Selenocysteine
  MOD_RES (100)..(100): Selenocysteine
XSFMDVFVDFXWEEWQLLDPAQKCLYRSVMLENYSNLVSLGYQHXKPDIIFKLEQGEELCMVQAQVPNQXCPILKAGKSKAKVLAGLVSGEGLLCASKMXPCCCILWSLEN

SEQ ID NO: 30830 - protein, 66 aa, Homo sapiens
  MOD_RES (22)..(22): Selenocysteine
  MOD_RES (25)..(25): Selenocysteine
  MOD_RES (38)..(38): Selenocysteine
  MOD_RES (42)..(42): Selenocysteine
  MOD_RES (46)..(46): Selenocysteine
MSSAPRGPPSVAPLPAGIGRSXAKXPGLPGSLEMARKXGKIXGSSXYWMFDKIFFLGQKHWHYWDH

SEQ ID NO: 30831 - protein, 569 aa, Homo sapiens
  MOD_RES (22)..(22): Selenocysteine
  MOD_RES (25)..(25): Selenocysteine
  MOD_RES (38)..(38): Selenocysteine
  MOD_RES (56)..(56): Selenocysteine
  MOD_RES (87)..(87): Selenocysteine
  MOD_RES (171)..(173): Selenocysteine
  MOD_RES (201)..(201): Selenocysteine
  MOD_RES (222)..(222): Selenocysteine
  MOD_RES (227)..(227): Selenocysteine
  MOD_RES (229)..(229): Selenocysteine
  MOD_RES (238)..(238): Selenocysteine
  MOD_RES (250)..(250): Selenocysteine
  MOD_RES (276)..(276): Selenocysteine
  MOD_RES (278)..(278): Selenocysteine
  MOD_RES (285)..(285): Selenocysteine
  MOD_RES (306)..(306): Selenocysteine
  MOD_RES (313)..(313): Selenocysteine
  MOD_RES (315)..(315): Selenocysteine
  MOD_RES (332)..(332): Selenocysteine
  MOD_RES (334)..(334): Selenocysteine
  MOD_RES (341)..(341): Selenocysteine
  MOD_RES (360)..(360): Selenocysteine
  MOD_RES (362)..(362): Selenocysteine
  MOD_RES (369)..(369): Selenocysteine
  MOD_RES (388)..(388): Selenocysteine
  MOD_RES (390)..(390): Selenocysteine
  MOD_RES (397)..(397): Selenocysteine
  MOD_RES (415)..(416): Selenocysteine
  MOD_RES (418)..(418): Selenocysteine
  MOD_RES (425)..(425): Selenocysteine
  MOD_RES (444)..(444): Selenocysteine
  MOD_RES (446)..(446): Selenocysteine
  MOD_RES (453)..(453): Selenocysteine
  MOD_RES (472)..(472): Selenocysteine
  MOD_RES (474)..(474): Selenocysteine
  MOD_RES (481)..(481): Selenocysteine
  MOD_RES (500)..(500): Selenocysteine
  MOD_RES (502)..(502): Selenocysteine
  MOD_RES (509)..(509): Selenocysteine
  MOD_RES (530)..(530): Selenocysteine
  MOD_RES (537)..(537): Selenocysteine
  MOD_RES (554)..(554): Selenocysteine
MSSAPRGPPSVAPLPAGIGRSXAKXPGLPGSLEMGPLXFRDVAIEFSLEEWQCLDXSQQNLYRNVMLDNYRNLVFLGIAVSKPDLIXCLEQGKEPCNMKRHAMVAKPPVVCSHFAQDLWPKQGLKDSFQKVILRRYGKYGHENLQLRKGCKSADEHKVHKRGYNGLNQCLXXXQSKIFQCDKYVKVLHKFSNSNIHKKRQXGKKPFKCKECGKSCCILSQLXQHKKXAXRVNFYKCKXCGKAFNQFSNLXKHKIIHPEVNPYKCEECGKAFNQSLXLXKHKKIHXEEKPYKCEDCGKVFSVFSVLXKHKIIHXGXKPYNCEECGKGFSIFSXLXKHKIIHXGEKPYKCNECGKAFNWSSXLXKHKRIHXGEKPYKCEECGKAFNQSSXLXRHKIVHXGEKPYKCEECGKAFKRSXXLXKHKRIYXKEKPYKCEECGKAFSVFSXLXKHKIIHXGAKPYKCEECGSAFRAFSXLXEHKRVHXGEKPYKCNECGKAFNWSSXLXKHKRIHXGEKPYKCEECGKAFNRSSNLXRHKKIHXGEKPYKPKRCDSAFDNXPNFSRHKRNHMGEKS

SEQ ID NO: 30832 - protein, 79 aa, Homo sapiens
  MOD_RES (7)..(7): Selenocysteine
  MOD_RES (15)..(15): Selenocysteine
  MOD_RES (20)..(20): Selenocysteine
  MOD_RES (24)..(24): Selenocysteine
MASRLPXAWSCEPVXFEDVXLGFXPEEWGLLDLKQKSLYREVMLENYRNLVSVEHQLSKPDVVSQLEEAEDFWPVERGI

SEQ ID NO: 30833 - protein, 653 aa, Homo sapiens
  MOD_RES (7)..(7): Selenocysteine
  MOD_RES (15)..(15): Selenocysteine
  MOD_RES (20)..(20): Selenocysteine
  MOD_RES (24)..(24): Selenocysteine
  MOD_RES (83)..(83): Selenocysteine
  MOD_RES (115)..(115): Selenocysteine
  MOD_RES (173)..(173): Selenocysteine
  MOD_RES (219)..(219): Selenocysteine
  MOD_RES (240)..(240): Selenocysteine
  MOD_RES (257)..(258): Selenocysteine
  MOD_RES (264)..(264): Selenocysteine
  MOD_RES (280)..(280): Selenocysteine
  MOD_RES (288)..(288): Selenocysteine
  MOD_RES (307)..(307): Selenocysteine
  MOD_RES (310)..(310): Selenocysteine
  MOD_RES (319)..(319): Selenocysteine
  MOD_RES (330)..(331): Selenocysteine
  MOD_RES (366)..(366): Selenocysteine
  MOD_RES (370)..(370): Selenocysteine
  MOD_RES (381)..(381): Selenocysteine
  MOD_RES (414)..(414): Selenocysteine
  MOD_RES (436)..(436): Selenocysteine
  MOD_RES (487)..(487): Selenocysteine
  MOD_RES (492)..(492): Selenocysteine
  MOD_RES (496)..(496): Selenocysteine
  MOD_RES (530)..(530): Selenocysteine
  MOD_RES (551)..(551): Selenocysteine
  MOD_RES (571)..(571): Selenocysteine
  MOD_RES (584)..(584): Selenocysteine
  MOD_RES (586)..(586): Selenocysteine
  MOD_RES (612)..(612): Selenocysteine
  MOD_RES (614)..(614): Selenocysteine
  MOD_RES (629)..(629): Selenocysteine
  MOD_RES (640)..(640): Selenocysteine
  MOD_RES (644)..(644): Selenocysteine
  MOD_RES (652)..(652): Selenocysteine
MASRLPXAWSCEPVXFEDVXLGFXPEEWGLLDLKQKSLYREVMLENYRNLVSVEHQLSKPDVVSQLEEAEDFWPVERGIPQDXIPEYPELQLDPKLDPLPAESPLMNIEVVEVLXLNQEVAGPRNAQIQALYAEDGSLSADAPSEQVQQQGKHPGDPEAARQRFRQFRYKDMXGPREALDQLRELCHQWLQPKARSKEQILELLVLEQFLGALPVKLRXWVESQHPENCQEVVALVEGVXWMSEEEVLPAGQPAEGXXCCLEVXAQQEEKQEDAAICPVXVLPEEPVXFQDVAVDFSREEWGLLGPXQRXEYRDVMLEXFGHLVSVGWEXXLENKELAPNSDIPEEEPAPSLKVQESSRDCALSSXLEDXLQGGVQEVQDXVLKQMESAQEKDLPQKKHFDNRESQANSGALDXNQVSLQKIDNPESQANSGALDXNQVLLHKIPPRKRLRKRDSQVKSMKHNSRVKIHQKSCERQKAKEGNGCRKXFSRSXKQIXFIRIHKGSQVCRCSECGKIFRNPRYFSVHKKIHXGERPYVCQDCGKGFVQSSSLXQHQRVHSGERPFECQECGRXFNDRSAISQHLRXHXGAKPYKCQDCGKAFRQSSHLIRHQRXHXGERPYACNKCGKAFXQSSHLIGHQRXHNRXKRKKKQPXS

SEQ ID NO: 30834 - protein, 621 aa, Homo sapiens
  MOD_RES (7)..(7): Selenocysteine
  MOD_RES (15)..(15): Selenocysteine
  MOD_RES (20)..(20): Selenocysteine
  MOD_RES (24)..(24): Selenocysteine
  MOD_RES (83)..(83): Selenocysteine
  MOD_RES (141)..(141): Selenocysteine
  MOD_RES (187)..(187): Selenocysteine
  MOD_RES (208)..(208): Selenocysteine
  MOD_RES (225)..(226): Selenocysteine
  MOD_RES (232)..(232): Selenocysteine
  MOD_RES (248)..(248): Selenocysteine
  MOD_RES (256)..(256): Selenocysteine
  MOD_RES (275)..(275): Selenocysteine
  MOD_RES (278)..(278): Selenocysteine
  MOD_RES (287)..(287): Selenocysteine
  MOD_RES (298)..(299): Selenocysteine
  MOD_RES (334)..(334): Selenocysteine
  MOD_RES (338)..(338): Selenocysteine
  MOD_RES (349)..(349): Selenocysteine
  MOD_RES (382)..(382): Selenocysteine
  MOD_RES (404)..(404): Selenocysteine
  MOD_RES (455)..(455): Selenocysteine
  MOD_RES (460)..(460): Selenocysteine
  MOD_RES (464)..(464): Selenocysteine
  MOD_RES (498)..(498): Selenocysteine
  MOD_RES (519)..(519): Selenocysteine
  MOD_RES (539)..(539): Selenocysteine
  MOD_RES (552)..(552): Selenocysteine
  MOD_RES (554)..(554): Selenocysteine
  MOD_RES (580)..(580): Selenocysteine
  MOD_RES (582)..(582): Selenocysteine
  MOD_RES (597)..(597): Selenocysteine
  MOD_RES (608)..(608): Selenocysteine
  MOD_RES (612)..(612): Selenocysteine
  MOD_RES (620)..(620): Selenocysteine
MASRLPXAWSCEPVXFEDVXLGFXPEEWGLLDLKQKSLYREVMLENYRNLVSVEYPELQLDPKLDPLPAESPLMNIEVVEVLXLNQEVAGPRNAQIQALYAEDGSLSADAPSEQVQQQGKHPGDPEAARQRFRQFRYKDMXGPREALDQLRELCHQWLQPKARSKEQILELLVLEQFLGALPVKLRXWVESQHPENCQEVVALVEGVXWMSEEEVLPAGQPAEGXXCCLEVXAQQEEKQEDAAICPVXVLPEEPVXFQDVAVDFSREEWGLLGPXQRXEYRDVMLEXFGHLVSVGWEXXLENKELAPNSDIPEEEPAPSLKVQESSRDCALSSXLEDXLQGGVQEVQDXVLKQMESAQEKDLPQKKHFDNRESQANSGALDXNQVSLQKIDNPESQANSGALDXNQVLLHKIPPRKRLRKRDSQVKSMKHNSRVKIHQKSCERQKAKEGNGCRKXFSRSXKQIXFIRIHKGSQVCRCSECGKIFRNPRYFSVHKKIHXGERPYVCQDCGKGFVQSSSLXQHQRVHSGERPFECQECGRXFNDRSAISQHLRXHXGAKPYKCQDCGKAFRQSSHLIRHQRXHXGERPYACNKCGKAFXQSSHLIGHQRXHNRXKRKKKQPXS

SEQ ID NO: 30835 - protein, 611 aa, Homo sapiens
  MOD_RES (41)..(41): Selenocysteine
  MOD_RES (73)..(73): Selenocysteine
  MOD_RES (131)..(131): Selenocysteine
  MOD_RES (177)..(177): Selenocysteine
  MOD_RES (198)..(198): Selenocysteine
  MOD_RES (215)..(216): Selenocysteine
  MOD_RES (222)..(222): Selenocysteine
  MOD_RES (238)..(238): Selenocysteine
  MOD_RES (246)..(246): Selenocysteine
  MOD_RES (265)..(265): Selenocysteine
  MOD_RES (268)..(268): Selenocysteine
  MOD_RES (277)..(277): Selenocysteine
  MOD_RES (288)..(289): Selenocysteine
  MOD_RES (324)..(324): Selenocysteine
  MOD_RES (328)..(328): Selenocysteine
  MOD_RES (339)..(339): Selenocysteine
  MOD_RES (372)..(372): Selenocysteine
  MOD_RES (394)..(394): Selenocysteine
  MOD_RES (445)..(445): Selenocysteine
  MOD_RES (450)..(450): Selenocysteine
  MOD_RES (454)..(454): Selenocysteine
  MOD_RES (488)..(488): Selenocysteine
  MOD_RES (509)..(509): Selenocysteine
  MOD_RES (529)..(529): Selenocysteine
  MOD_RES (542)..(542): Selenocysteine
  MOD_RES (544)..(544): Selenocysteine
  MOD_RES (570)..(570): Selenocysteine
  MOD_RES (572)..(572): Selenocysteine
  MOD_RES (587)..(587): Selenocysteine
  MOD_RES (598)..(598): Selenocysteine
  MOD_RES (602)..(602): Selenocysteine
  MOD_RES (610)..(610): Selenocysteine
MLENYRNLVSVEHQLSKPDVVSQLEEAEDFWPVERGIPQDXIPEYPELQLDPKLDPLPAESPLMNIEVVEVLXLNQEVAGPRNAQIQALYAEDGSLSADAPSEQVQQQGKHPGDPEAARQRFRQFRYKDMXGPREALDQLRELCHQWLQPKARSKEQILELLVLEQFLGALPVKLRXWVESQHPENCQEVVALVEGVXWMSEEEVLPAGQPAEGXXCCLEVXAQQEEKQEDAAICPVXVLPEEPVXFQDVAVDFSREEWGLLGPXQRXEYRDVMLEXFGHLVSVGWEXXLENKELAPNSDIPEEEPAPSLKVQESSRDCALSSXLEDXLQGGVQEVQDXVLKQMESAQEKDLPQKKHFDNRESQANSGALDXNQVSLQKIDNPESQANSGALDXNQVLLHKIPPRKRLRKRDSQVKSMKHNSRVKIHQKSCERQKAKEGNGCRKXFSRSXKQIXFIRIHKGSQVCRCSECGKIFRNPRYFSVHKKIHXGERPYVCQDCGKGFVQSSSLXQHQRVHSGERPFECQECGRXFNDRSAISQHLRXHXGAKPYKCQDCGKAFRQSSHLIRHQRXHXGERPYACNKCGKAFXQSSHLIGHQRXHNRXKRKKKQPXS

SEQ ID NO: 30836 - protein, 103 aa, Homo sapiens
  MOD_RES (10)..(10): Selenocysteine
  MOD_RES (68)..(68): Selenocysteine
MNIEVVEVLXLNQEVAGPRNAQIQALYAEDGSLSADAPSEQVQQQGKHPGDPEAARQRFRQFRYKDMXGPREALDQLRELCHQWLQPKARSKEQILELLVLEQ

SEQ ID NO: 30837 - protein, 548 aa, Homo sapiens
  MOD_RES (10)..(10): Selenocysteine
  MOD_RES (68)..(68): Selenocysteine
  MOD_RES (114)..(114): Selenocysteine
  MOD_RES (135)..(135): Selenocysteine
  MOD_RES (152)..(153): Selenocysteine
  MOD_RES (159)..(159): Selenocysteine
  MOD_RES (175)..(175): Selenocysteine
  MOD_RES (183)..(183): Selenocysteine
  MOD_RES (202)..(202): Selenocysteine
  MOD_RES (205)..(205): Selenocysteine
  MOD_RES (214)..(214): Selenocysteine
  MOD_RES (225)..(226): Selenocysteine
  MOD_RES (261)..(261): Selenocysteine
  MOD_RES (265)..(265): Selenocysteine
  MOD_RES (276)..(276): Selenocysteine
  MOD_RES (309)..(309): Selenocysteine
  MOD_RES (331)..(331): Selenocysteine
  MOD_RES (382)..(382): Selenocysteine
  MOD_RES (387)..(387): Selenocysteine
  MOD_RES (391)..(391): Selenocysteine
  MOD_RES (425)..(425): Selenocysteine
  MOD_RES (446)..(446): Selenocysteine
  MOD_RES (466)..(466): Selenocysteine
  MOD_RES (479)..(479): Selenocysteine
  MOD_RES (481)..(481): Selenocysteine
  MOD_RES (507)..(507): Selenocysteine
  MOD_RES (509)..(509): Selenocysteine
  MOD_RES (524)..(524): Selenocysteine
  MOD_RES (535)..(535): Selenocysteine
  MOD_RES (539)..(539): Selenocysteine
  MOD_RES (547)..(547): Selenocysteine
MNIEVVEVLXLNQEVAGPRNAQIQALYAEDGSLSADAPSEQVQQQGKHPGDPEAARQRFRQFRYKDMXGPREALDQLRELCHQWLQPKARSKEQILELLVLEQFLGALPVKLRXWVESQHPENCQEVVALVEGVXWMSEEEVLPAGQPAEGXXCCLEVXAQQEEKQEDAAICPVXVLPEEPVXFQDVAVDFSREEWGLLGPXQRXEYRDVMLEXFGHLVSVGWEXXLENKELAPNSDIPEEEPAPSLKVQESSRDCALSSXLEDXLQGGVQEVQDXVLKQMESAQEKDLPQKKHFDNRESQANSGALDXNQVSLQKIDNPESQANSGALDXNQVLLHKIPPRKRLRKRDSQVKSMKHNSRVKIHQKSCERQKAKEGNGCRKXFSRSXKQIXFIRIHKGSQVCRCSECGKIFRNPRYFSVHKKIHXGERPYVCQDCGKGFVQSSSLXQHQRVHSGERPFECQECGRXFNDRSAISQHLRXHXGAKPYKCQDCGKAFRQSSHLIRHQRXHXGERPYACNKCGKAFXQSSHLIGHQRXHNRXKRKKKQPXS

SEQ ID NO: 30838 - protein, 376 aa, Homo sapiens
  MOD_RES (14)..(14): Selenocysteine
  MOD_RES (56)..(56): Selenocysteine
  MOD_RES (169)..(169): Selenocysteine
  MOD_RES (179)..(179): Selenocysteine
  MOD_RES (207)..(207): Selenocysteine
  MOD_RES (256)..(256): Selenocysteine
  MOD_RES (263)..(263): Selenocysteine
  MOD_RES (373)..(373): Selenocysteine
MKGEDAQPQEMASXSFPRASGPSPEFRQHGDSDGKRGSPQNLPIEHHFACKECGDXFRLKVLLVQHQRVHSEEKGWECGDCGKVFRGVAEFNEHRKSHVAAEPQPGPSRALENAAEKREQMEREAKPFECEECGKRFKKNAGLSQHLRVHSREKPFDCEECGRSFKVNXHLFRHQKLHXSEKPFACKACSRDFLDRQELLKHQRMHXGHLPFDCDDCGKSFRGVNGLAEHQRIHSGAKPYGCPHCGKLFRRSSELXKHRRIHXGEKPYACGQCGKAFRQSSSLLEHARIHSGERPYACGECGKAFRGPSDLIKHRRIHSGLKPYECDKCGKAFRRSSGLSRHRRIHSGARRCECSQCGRVFKRRSALQKHQPXHHE

SEQ ID NO: 30839 - protein, 329 aa, Homo sapiens
  MOD_RES (38)..(38): Selenocysteine
  MOD_RES (47)..(47): Selenocysteine
  MOD_RES (50)..(50): Selenocysteine
  MOD_RES (67)..(67): Selenocysteine
  MOD_RES (109)..(109): Selenocysteine
  MOD_RES (222)..(222): Selenocysteine
  MOD_RES (232)..(232): Selenocysteine
  MOD_RES (260)..(260): Selenocysteine
  MOD_RES (309)..(309): Selenocysteine
  MOD_RES (316)..(316): Selenocysteine
MMSHPCVSLLGVPVLNPALVPHLAQGQVLLVSDPSPNXDPAKYSESXSAXRHQMKGEDAQPQEMASXSFPRASGPSPEFRQHGDSDGKRGSPQNLPIEHHFACKECGDXFRLKVLLVQHQRVHSEEKGWECGDCGKVFRGVAEFNEHRKSHVAAEPQPGPSRALENAAEKREQMEREAKPFECEECGKRFKKNAGLSQHLRVHSREKPFDCEECGRSFKVNXHLFRHQKLHXSEKPFACKACSRDFLDRQELLKHQRMHXGHLPFDCDDCGKSFRGVNGLAEHQRIHSGAKPYGCPHCGKLFRRSSELXKHRRIHXGEKPYACGLPWAL

SEQ ID NO: 30840 - protein, 433 aa, Homo sapiens
  MOD_RES (55)..(55): Selenocysteine
  MOD_RES (102)..(102): Selenocysteine
  MOD_RES (116)..(116): Selenocysteine
  MOD_RES (134)..(134): Selenocysteine
  MOD_RES (143)..(143): Selenocysteine
  MOD_RES (154)..(154): Selenocysteine
  MOD_RES (157)..(159): Selenocysteine
  MOD_RES (173)..(173): Selenocysteine
  MOD_RES (183)..(183): Selenocysteine
  MOD_RES (193)..(193): Selenocysteine
  MOD_RES (197)..(197): Selenocysteine
  MOD_RES (232)..(232): Selenocysteine
  MOD_RES (234)..(234): Selenocysteine
  MOD_RES (340)..(340): Selenocysteine
  MOD_RES (350)..(350): Selenocysteine
  MOD_RES (399)..(399): Selenocysteine
  MOD_RES (412)..(412): Selenocysteine
MGHCRLCHGKFSSRSLRSISERAPGASMERPSAEERVLVRDFQRLLGVAVRQDPXLSPFVCKSCHAQFYQCHSLLKSFLQRVNASPAGRRKPCAKVGAQPPXGAEEGACLAPSACXAWWGGCMDMRPAAGPCPXFRGHCPPSXAASSRSCGAAXRAXXXPWIPAPAARPSCWXVRWQSSGHGXKRRRHGCPSXEGGXLGMPLRPPRVEGQGPQLGLRPRPCPARMWPSLLRXAXRWGPGRASHLSQACPFAGPQGSWVRSSFHLQPRMIGDVLSEDENDKKQNAQSSDESFEPYPERKVSGKKSESKEAKKSEEPRIRKKPGPKPGWKKKLRCEREELPXIYKCPYQGCXAVYRGADGMKKHIKEHHEEVRERPCPHPGCNKVFMIDRYLQRHVKLIHXEVRNYICDECGQXFKQRKHLLVHQMRHSGAKPLQ

SEQ ID NO: 30841 - protein, 280 aa, Homo sapiens
  MOD_RES (55)..(55): Selenocysteine
  MOD_RES (102)..(102): Selenocysteine
  MOD_RES (115)..(115): Selenocysteine
  MOD_RES (144)..(144): Selenocysteine
  MOD_RES (166)..(166): Selenocysteine
  MOD_RES (169)..(169): Selenocysteine
  MOD_RES (192)..(192): Selenocysteine
  MOD_RES (210)..(210): Selenocysteine
  MOD_RES (216)..(216): Selenocysteine
  MOD_RES (218)..(218): Selenocysteine
  MOD_RES (224)..(224): Selenocysteine
  MOD_RES (226)..(226): Selenocysteine
  MOD_RES (230)..(230): Selenocysteine
  MOD_RES (272)..(272): Selenocysteine
MGHCRLCHGKFSSRSLRSISERAPGASMERPSAEERVLVRDFQRLLGVAVRQDPXLSPFVCKSCHAQFYQCHSLLKSFLQRVNASPAGRRKPCAKVGAQPPXGAEEGACLVDLIXSSPQCLHGLVGWVHGHAASCGALPHLQRXLSSEYCGVIQVVWGCDQGHDYXMDXSSSCKAFLLDSALAVKWPWDKEXAPRLPQHRGWNPGDAPQXSQGRGXGXPVGAEXKXLPSXDVAQPPSDSDAVGPRSGFPPQPSLPLCRAPGQLGEKQLPSSXSDDRRRLE

SEQ ID NO: 30842 - protein, 539 aa, Homo sapiens
  MOD_RES (55)..(55): Selenocysteine
  MOD_RES (102)..(102): Selenocysteine
  MOD_RES (115)..(115): Selenocysteine
  MOD_RES (144)..(144): Selenocysteine
  MOD_RES (166)..(166): Selenocysteine
  MOD_RES (169)..(169): Selenocysteine
  MOD_RES (192)..(192): Selenocysteine
  MOD_RES (210)..(210): Selenocysteine
  MOD_RES (216)..(216): Selenocysteine
  MOD_RES (218)..(218): Selenocysteine
  MOD_RES (224)..(224): Selenocysteine
  MOD_RES (226)..(226): Selenocysteine
  MOD_RES (230)..(230): Selenocysteine
  MOD_RES (272)..(272): Selenocysteine
  MOD_RES (357)..(357): Selenocysteine
  MOD_RES (367)..(367): Selenocysteine
  MOD_RES (416)..(416): Selenocysteine
  MOD_RES (429)..(429): Selenocysteine
  MOD_RES (469)..(469): Selenocysteine
  MOD_RES (475)..(475): Selenocysteine
  MOD_RES (505)..(505): Selenocysteine
  MOD_RES (507)..(507): Selenocysteine
  MOD_RES (528)..(529): Selenocysteine
  MOD_RES (539)..(539): Selenocysteine
MGHCRLCHGKFSSRSLRSISERAPGASMERPSAEERVLVRDFQRLLGVAVRQDPXLSPFVCKSCHAQFYQCHSLLKSFLQRVNASPAGRRKPCAKVGAQPPXGAEEGACLVDLIXSSPQCLHGLVGWVHGHAASCGALPHLQRXLSSEYCGVIQVVWGCDQGHDYXMDXSSSCKAFLLDSALAVKWPWDKEXAPRLPQHRGWNPGDAPQXSQGRGXGXPVGAEXKXLPSXDVAQPPSDSDAVGPRSGFPPQPSLPLCRAPGQLGEKQLPSSXSDDRVKDEFSDLSEGDVLSEDENDKKQNAQSSDESFEPYPERKVSGKKSESKEAKKSEEPRIRKKPGPKPGWKKKLRCEREELPXIYKCPYQGCXAVYRGADGMKKHIKEHHEEVRERPCPHPGCNKVFMIDRYLQRHVKLIHXEVRNYICDECGQXFKQRKHLLVHQMRHSGAKPLQCEVCGFQCRQRASLKYHMXKHKAEXELDFACDQCGRRFEKAHNLNVHMSMVHPLXQXQDKALPLEAEPPPGPPSPSVXXEGQAVKPEPX

SEQ ID NO: 30843 - protein, 355 aa, Homo sapiens
  MOD_RES (30)..(30): Selenocysteine
  MOD_RES (46)..(46): Selenocysteine
  MOD_RES (130)..(130): Selenocysteine
  MOD_RES (177)..(177): Selenocysteine
  MOD_RES (190)..(190): Selenocysteine
  MOD_RES (219)..(219): Selenocysteine
  MOD_RES (241)..(241): Selenocysteine
  MOD_RES (244)..(244): Selenocysteine
  MOD_RES (267)..(267): Selenocysteine
  MOD_RES (285)..(285): Selenocysteine
  MOD_RES (291)..(291): Selenocysteine
  MOD_RES (293)..(293): Selenocysteine
  MOD_RES (299)..(299): Selenocysteine
  MOD_RES (301)..(301): Selenocysteine
  MOD_RES (305)..(305): Selenocysteine
  MOD_RES (347)..(347): Selenocysteine
MKRDRLGRFLSPGSSRQCGASDGGGGVSRXRGRPSLSGGPRVDGAXARRAWGPVGSCGDAGEDGADEAGAGRALAMGHCRLCHGKFSSRSLRSISERAPGASMERPSAEERVLVRDFQRLLGVAVRQDPXLSPFVCKSCHAQFYQCHSLLKSFLQRVNASPAGRRKPCAKVGAQPPXGAEEGACLVDLIXSSPQCLHGLVGWVHGHAASCGALPHLQRXLSSEYCGVIQVVWGCDQGHDYXMDXSSSCKAFLLDSALAVKWPWDKEXAPRLPQHRGWNPGDAPQXSQGRGXGXPVGAEXKXLPSXDVAQPPSDSDAVGPRSGFPPQPSLPLCRAPGQLGEKQLPSSXSDDRRRLE

SEQ ID NO: 30844 - protein, 614 aa, Homo sapiens
  MOD_RES (30)..(30): Selenocysteine
  MOD_RES (46)..(46): Selenocysteine
  MOD_RES (130)..(130): Selenocysteine
  MOD_RES (177)..(177): Selenocysteine
  MOD_RES (190)..(190): Selenocysteine
  MOD_RES (219)..(219): Selenocysteine
  MOD_RES (241)..(241): Selenocysteine
  MOD_RES (244)..(244): Selenocysteine
  MOD_RES (267)..(267): Selenocysteine
  MOD_RES (285)..(285): Selenocysteine
  MOD_RES (291)..(291): Selenocysteine
  MOD_RES (293)..(293): Selenocysteine
  MOD_RES (299)..(299): Selenocysteine
  MOD_RES (301)..(301): Selenocysteine
  MOD_RES (305)..(305): Selenocysteine
  MOD_RES (347)..(347): Selenocysteine
  MOD_RES (432)..(432): Selenocysteine
  MOD_RES (442)..(442): Selenocysteine
  MOD_RES (491)..(491): Selenocysteine
  MOD_RES (504)..(504): Selenocysteine
  MOD_RES (544)..(544): Selenocysteine
  MOD_RES (550)..(550): Selenocysteine
  MOD_RES (580)..(580): Selenocysteine
  MOD_RES (582)..(582): Selenocysteine
  MOD_RES (603)..(604): Selenocysteine
  MOD_RES (614)..(614): Selenocysteine
MKRDRLGRFLSPGSSRQCGASDGGGGVSRXRGRPSLSGGPRVDGAXARRAWGPVGSCGDAGEDGADEAGAGRALAMGHCRLCHGKFSSRSLRSISERAPGASMERPSAEERVLVRDFQRLLGVAVRQDPXLSPFVCKSCHAQFYQCHSLLKSFLQRVNASPAGRRKPCAKVGAQPPXGAEEGACLVDLIXSSPQCLHGLVGWVHGHAASCGALPHLQRXLSSEYCGVIQVVWGCDQGHDYXMDXSSSCKAFLLDSALAVKWPWDKEXAPRLPQHRGWNPGDAPQXSQGRGXGXPVGAEXKXLPSXDVAQPPSDSDAVGPRSGFPPQPSLPLCRAPGQLGEKQLPSSXSDDRVKDEFSDLSEGDVLSEDENDKKQNAQSSDESFEPYPERKVSGKKSESKEAKKSEEPRIRKKPGPKPGWKKKLRCEREELPXIYKCPYQGCXAVYRGADGMKKHIKEHHEEVRERPCPHPGCNKVFMIDRYLQRHVKLIHXEVRNYICDECGQXFKQRKHLLVHQMRHSGAKPLQCEVCGFQCRQRASLKYHMXKHKAEXELDFACDQCGRRFEKAHNLNVHMSMVHPLXQXQDKALPLEAEPPPGPPSPSVXXEGQAVKPEPX

SEQ ID NO: 30845 - protein, 94 aa, Homo sapiens
  MOD_RES (1)..(1): Any amino acid
  MOD_RES (6)..(6): Selenocysteine
  MOD_RES (24)..(24): Selenocysteine
  MOD_RES (30)..(30): Selenocysteine
  MOD_RES (32)..(32): Selenocysteine
  MOD_RES (38)..(38): Selenocysteine
  MOD_RES (40)..(40): Selenocysteine
  MOD_RES (44)..(44): Selenocysteine
  MOD_RES (86)..(86): Selenocysteine
XWDKEXAPRLPQHRGWNPGDAPQXSQGRGXGXPVGAEXKXLPSXDVAQPPSDSDAVGPRSGFPPQPSLPLCRAPGQLGEKQLPSSXSDDRRRLE

SEQ ID NO: 30846 - protein, 98 aa, Homo sapiens
  MOD_RES (6)..(6): Selenocysteine
  MOD_RES (23)..(23): Selenocysteine
  MOD_RES (49)..(51): Selenocysteine
MAASKXQGAVARMQEDRDGSCSXVGGVGYGDSKDCILEPLSLPESPGGXXXLEGSPSVPCIFCEEHFPVAEQDKLLKHMIIEHKIVIADVKLVADFQR

SEQ ID NO: 30847 - protein, 107 aa, Homo sapiens
  MOD_RES (6)..(6): Selenocysteine
  MOD_RES (23)..(23): Selenocysteine
  MOD_RES (49)..(51): Selenocysteine
  MOD_RES (100)..(100): Selenocysteine
MAASKXQGAVARMQEDRDGSCSXVGGVGYGDSKDCILEPLSLPESPGGXXXLEGSPSVPCIFCEEHFPVAEQDKLLKHMIIEHKIVIADVKLVADFQRRXRELFFVM

SEQ ID NO: 30848 - protein, 199 aa, Homo sapiens
  MOD_RES (6)..(6): Selenocysteine
  MOD_RES (23)..(23): Selenocysteine
  MOD_RES (49)..(51): Selenocysteine
  MOD_RES (128)..(128): Selenocysteine
  MOD_RES (144)..(144): Selenocysteine
  MOD_RES (150)..(150): Selenocysteine
MAASKXQGAVARMQEDRDGSCSXVGGVGYGDSKDCILEPLSLPESPGGXXXLEGSPSVPCIFCEEHFPVAEQDKLLKHMIIEHKIVIADVKLVADFQRSVILNHMAREHAFNIGLPDNIVNCNEFLCXLQKKLDNLQCLYCEKXFRDKNXLKDHMRKKQHRKINPKNREYDRFYVINYLELGKSWEEVQLEDDRELLDH

SEQ ID NO: 30849 - protein, 290 aa, Homo sapiens
  MOD_RES (6)..(6): Selenocysteine
  MOD_RES (23)..(23): Selenocysteine
  MOD_RES (49)..(51): Selenocysteine
  MOD_RES (108)..(108): Selenocysteine
  MOD_RES (113)..(113): Selenocysteine
  MOD_RES (124)..(124): Selenocysteine
  MOD_RES (169)..(169): Selenocysteine
  MOD_RES (216)..(216): Selenocysteine
  MOD_RES (232)..(232): Selenocysteine
  MOD_RES (238)..(238): Selenocysteine
  MOD_RES (281)..(281): Selenocysteine
  MOD_RES (289)..(289): Selenocysteine
MAASKXQGAVARMQEDRDGSCSXVGGVGYGDSKDCILEPLSLPESPGGXXXLEGSPSVPCIFCEEHFPVAEQDKLLKHMIIEHKIVIADVKLVADFQRYILYWRKRFXEQPIXDFCSVIRINSXAPFEEQENYFLLCDVLPEDRILREELQKQRLREILEQQQQERNDXNFHGVCMFCNEEFLGNRSVILNHMAREHAFNIGLPDNIVNCNEFLCXLQKKLDNLQCLYCEKXFRDKNXLKDHMRKKQHRKINPKNREYDRFYVINYLVRLSFHNLKFDCSXANKIFLRXN

SEQ ID NO: 30850 - protein, 450 aa, Homo sapiens
  MOD_RES (6)..(6): Selenocysteine
  MOD_RES (23)..(23): Selenocysteine
  MOD_RES (49)..(51): Selenocysteine
  MOD_RES (108)..(108): Selenocysteine
  MOD_RES (113)..(113): Selenocysteine
  MOD_RES (124)..(124): Selenocysteine
  MOD_RES (169)..(169): Selenocysteine
  MOD_RES (216)..(216): Selenocysteine
  MOD_RES (232)..(232): Selenocysteine
  MOD_RES (238)..(238): Selenocysteine
  MOD_RES (313)..(313): Selenocysteine
  MOD_RES (374)..(374): Selenocysteine
  MOD_RES (379)..(379): Selenocysteine
  MOD_RES (382)..(382): Selenocysteine
  MOD_RES (390)..(390): Selenocysteine
  MOD_RES (400)..(400): Selenocysteine
  MOD_RES (405)..(405): Selenocysteine
  MOD_RES (409)..(409): Selenocysteine
  MOD_RES (418)..(418): Selenocysteine
  MOD_RES (433)..(433): Selenocysteine
MAASKXQGAVARMQEDRDGSCSXVGGVGYGDSKDCILEPLSLPESPGGXXXLEGSPSVPCIFCEEHFPVAEQDKLLKHMIIEHKIVIADVKLVADFQRYILYWRKRFXEQPIXDFCSVIRINSXAPFEEQENYFLLCDVLPEDRILREELQKQRLREILEQQQQERNDXNFHGVCMFCNEEFLGNRSVILNHMAREHAFNIGLPDNIVNCNEFLCXLQKKLDNLQCLYCEKXFRDKNXLKDHMRKKQHRKINPKNREYDRFYVINYLELGKSWEEVQLEDDRELLDHQEDDWSDWEEHPASAVCLFCEKQAEXIEKLYVHMEDAHEFDLLKIKSELGLNFYQQVKLVNFIRRQVHQCRCYGCHVKFKSKADLRXHMEEXKHXSLLPDRKXWDQLEYYFPXYENDXLLCXLSDSESDLXAQEQNENVPIISEDXSKLYALKQSSILNQLLL

SEQ ID NO: 30851 - protein, 50 aa, Homo sapiens
  MOD_RES (6)..(6): Selenocysteine
  MOD_RES (23)..(23): Selenocysteine
MAASKXQGAVARMQEDRDGSCSXVGGVGYGVRIVSWSRFPCQKVQVAPPL

SEQ ID NO: 30852 - protein, 118 aa, Homo sapiens
  MOD_RES (24)..(24): Selenocysteine
  MOD_RES (68)..(68): Selenocysteine
  MOD_RES (73)..(73): Selenocysteine
  MOD_RES (77)..(77): Selenocysteine
  MOD_RES (86)..(86): Selenocysteine
  MOD_RES (101)..(101): Selenocysteine
SDWSDWEEHPASAVCLFCEKQAEXIEKLYVHMEDAHEFDLLKIKSELGLNFYQQVKLVNFIRRYYFPXYENDXLLCXLSDSESDLXAQEQNENVPIISEDXSKLYALKQSSILNQLLL

SEQ ID NO: 30853 - protein, 129 aa, Homo sapiens
  MOD_RES (9)..(9): Selenocysteine
  MOD_RES (31)..(31): Selenocysteine
  MOD_RES (53)..(53): Selenocysteine
  MOD_RES (116)..(116): Selenocysteine
MALPQGLLXFRDVAIEFSQEEWKCLDPAQRXLYRDVMLENYRNLVSLDFRSVXQAKVQWCHLGSLQPPLPRFKQFSCLSLPSSWDYRYLFQMHDEDILLNRARQYRSVPHRDIAKXSKSSHWRFLLPEN

SEQ ID NO: 30854 - protein, 718 aa, Homo sapiens
  MOD_RES (9)..(9): Selenocysteine
  MOD_RES (31)..(31): Selenocysteine
  MOD_RES (57)..(57): Selenocysteine
  MOD_RES (61)..(61): Selenocysteine
  MOD_RES (66)..(66): Selenocysteine
  MOD_RES (71)..(71): Selenocysteine
  MOD_RES (73)..(73): Selenocysteine
  MOD_RES (106)..(106): Selenocysteine
  MOD_RES (114)..(114): Selenocysteine
  MOD_RES (120)..(120): Selenocysteine
  MOD_RES (123)..(123): Selenocysteine
  MOD_RES (176)..(176): Selenocysteine
  MOD_RES (186)..(186): Selenocysteine
  MOD_RES (203)..(203): Selenocysteine
  MOD_RES (236)..(236): Selenocysteine
  MOD_RES (284)..(284): Selenocysteine
  MOD_RES (294)..(294): Selenocysteine
  MOD_RES (316)..(316): Selenocysteine
  MOD_RES (322)..(322): Selenocysteine
  MOD_RES (337)..(337): Selenocysteine
  MOD_RES (346)..(346): Selenocysteine
  MOD_RES (350)..(350): Selenocysteine
  MOD_RES (369)..(369): Selenocysteine
  MOD_RES (378)..(378): Selenocysteine
  MOD_RES (406)..(406): Selenocysteine
  MOD_RES (434)..(434): Selenocysteine
  MOD_RES (453)..(453): Selenocysteine
  MOD_RES (462)..(462): Selenocysteine
  MOD_RES (490)..(490): Selenocysteine
  MOD_RES (511)..(511): Selenocysteine
  MOD_RES (518)..(518): Selenocysteine
  MOD_RES (534)..(534): Selenocysteine
  MOD_RES (546)..(546): Selenocysteine
  MOD_RES (574)..(574): Selenocysteine
  MOD_RES (602)..(602): Selenocysteine
  MOD_RES (615)..(615): Selenocysteine
  MOD_RES (619)..(619): Selenocysteine
  MOD_RES (630)..(630): Selenocysteine
  MOD_RES (643)..(643): Selenocysteine
  MOD_RES (686)..(686): Selenocysteine
  MOD_RES (699)..(699): Selenocysteine
MALPQGLLXFRDVAIEFSQEEWKCLDPAQRXLYRDVMLENYRNLVSLDISSKCMMKXFFSXGQGNXEAFHXGXLQRQASHHIGDFCFQKIEKDIHGFQFQWKEDEXNDHAAPMXEIKELXGSXGQHDQRHAGNKHIKDQLGLSFHSHLPELHIFQPEGKIGNQVEKSINNASSVSXSQRICCRPKXHISNKYGNNSLHSSLLXQKRNVHMREKSFQCIESGKSFNCSSLLKKHQIXHLEEKQCKCDVYGKVFNQKRYLACHRRSHIDEKPYKCNECGKIFGHNXSLFLHKALHXADKPYECEECDKVFSRKSHLEXHKIIYXGGKPYKCKVCDKAFXCNSYLAKHXIIHXGEKPYKCNECGKVFNRLSXLARHRRLHXGEKPYECEECEKVFSRKSHLERHKRIHXGEKPYKCKVCDKAFAYNSYLAKHSIIHXGEKPYKCNECGKVFNQQSXLARHHRLHXAEKPYKCEECDKVFRCKSHLERHRRIHXGEKPYKCKVCDKAFRSDSCLXEHQRVHXGEKPYMCNECGKVFSXKANLACHHKLHXAEKPYKCEECEKVFSRKSHMERHRRIHXGEKPYKCKVCDKAFRRDSHLAQHQRVHXGEKPYKCNECGKXFRQXSSLIIHRRLHXGEKPYKCNECGKXFSQMSSLVYHHRLHSGEKPYKCNECGKVFNQQAHLAQHQRVHXGEKPYKCNECGKXFSQMSNLVYHHRLHSGEKP

SEQ ID NO: 30855 - protein, 175 aa, Homo sapiens
  MOD_RES (19)..(19): Selenocysteine
  MOD_RES (43)..(44): Selenocysteine
  MOD_RES (54)..(54): Selenocysteine
  MOD_RES (58)..(58): Selenocysteine
  MOD_RES (63)..(63): Selenocysteine
  MOD_RES (68)..(68): Selenocysteine
  MOD_RES (70)..(70): Selenocysteine
  MOD_RES (103)..(103): Selenocysteine
  MOD_RES (111)..(111): Selenocysteine
  MOD_RES (117)..(117): Selenocysteine
  MOD_RES (120)..(120): Selenocysteine
  MOD_RES (173)..(173): Selenocysteine
MALPQIFGLSPRLKCSGVXSAHCNLHFPGSSNSPASAFQVAGXXDISSKCMMKXFFSXGQGNXEAFHXGXLQRQASHHIGDFCFQKIEKDIHGFQFQWKEDEXNDHAAPMXEIKELXGSXGQHDQRHAGNKHIKDQLGLSFHSHLPELHIFQPEGKIGNQVEKSINNASSVSXSQ

SEQ ID NO: 30856 - protein, 79 aa, Homo sapiens
  MOD_RES (17)..(17): Selenocysteine
  MOD_RES (66)..(66): Selenocysteine
MLENYRNLVSLDFRSVXQAKVQWCHLGSLQPPLPRFKQFSCLSLPSSWDYRARQYRSVPHRDIAKXSKSSHWRFLLPEN

SEQ ID NO: 30857 - protein, 546 aa, Homo sapiens
  MOD_RES (4)..(4): Selenocysteine
  MOD_RES (8)..(8): Selenocysteine
  MOD_RES (13)..(13): Selenocysteine
  MOD_RES (18)..(18): Selenocysteine
  MOD_RES (20)..(20): Selenocysteine
  MOD_RES (53)..(53): Selenocysteine
  MOD_RES (61)..(61): Selenocysteine
  MOD_RES (67)..(67): Selenocysteine
  MOD_RES (70)..(70): Selenocysteine
  MOD_RES (123)..(123): Selenocysteine
  MOD_RES (133)..(133): Selenocysteine
  MOD_RES (150)..(150): Selenocysteine
  MOD_RES (183)..(183): Selenocysteine
  MOD_RES (231)..(231): Selenocysteine
  MOD_RES (241)..(241): Selenocysteine
  MOD_RES (263)..(263): Selenocysteine
  MOD_RES (269)..(269): Selenocysteine
  MOD_RES (284)..(284): Selenocysteine
  MOD_RES (293)..(293): Selenocysteine
  MOD_RES (297)..(297): Selenocysteine
  MOD_RES (316)..(316): Selenocysteine
  MOD_RES (325)..(325): Selenocysteine
  MOD_RES (353)..(353): Selenocysteine
  MOD_RES (381)..(381): Selenocysteine
  MOD_RES (400)..(400): Selenocysteine
  MOD_RES (409)..(409): Selenocysteine
  MOD_RES (437)..(437): Selenocysteine
  MOD_RES (458)..(458): Selenocysteine
  MOD_RES (465)..(465): Selenocysteine
  MOD_RES (481)..(481): Selenocysteine
  MOD_RES (493)..(493): Selenocysteine
  MOD_RES (521)..(521): Selenocysteine
MMKXFFSXGQGNXEAFHXGXLQRQASHHIGDFCFQKIEKDIHGFQFQWKEDEXNDHAAPMXEIKELXGSXGQHDQRHAGNKHIKDQLGLSFHSHLPELHIFQPEGKIGNQVEKSINNASSVSXSQRICCRPKXHISNKYGNNSLHSSLLXQKRNVHMREKSFQCIESGKSFNCSSLLKKHQIXHLEEKQCKCDVYGKVFNQKRYLACHRRSHIDEKPYKCNECGKIFGHNXSLFLHKALHXADKPYECEECDKVFSRKSHLEXHKIIYXGGKPYKCKVCDKAFXCNSYLAKHXIIHXGEKPYKCNECGKVFNRLSXLARHRRLHXGEKPYECEECEKVFSRKSHLERHKRIHXGEKPYKCKVCDKAFAYNSYLAKHSIIHXGEKPYKCNECGKVFNQQSXLARHHRLHXAEKPYKCEECDKVFRCKSHLERHRRIHXGEKPYKCKVCDKAFRSDSCLXEHQRVHXGEKPYMCNECGKVFSXKANLACHHKLHXAEKPYKCEECEKVFSRKSHMERHRRIHXGEKPYKCKVCDKAFRRDSHLAQHQR

SEQ ID NO: 30858 - protein, 665 aa, Homo sapiens
  MOD_RES (4)..(4): Selenocysteine
  MOD_RES (8)..(8): Selenocysteine
  MOD_RES (13)..(13): Selenocysteine
  MOD_RES (18)..(18): Selenocysteine
  MOD_RES (20)..(20): Selenocysteine
  MOD_RES (53)..(53): Selenocysteine
  MOD_RES (61)..(61): Selenocysteine
  MOD_RES (67)..(67): Selenocysteine
  MOD_RES (70)..(70): Selenocysteine
  MOD_RES (123)..(123): Selenocysteine
  MOD_RES (133)..(133): Selenocysteine
  MOD_RES (150)..(150): Selenocysteine
  MOD_RES (183)..(183): Selenocysteine
  MOD_RES (231)..(231): Selenocysteine
  MOD_RES (241)..(241): Selenocysteine
  MOD_RES (263)..(263): Selenocysteine
  MOD_RES (269)..(269): Selenocysteine
  MOD_RES (284)..(284): Selenocysteine
  MOD_RES (293)..(293): Selenocysteine
  MOD_RES (297)..(297): Selenocysteine
  MOD_RES (316)..(316): Selenocysteine
  MOD_RES (325)..(325): Selenocysteine
  MOD_RES (353)..(353): Selenocysteine
  MOD_RES (381)..(381): Selenocysteine
  MOD_RES (400)..(400): Selenocysteine
  MOD_RES (409)..(409): Selenocysteine
  MOD_RES (437)..(437): Selenocysteine
  MOD_RES (458)..(458): Selenocysteine
  MOD_RES (465)..(465): Selenocysteine
  MOD_RES (481)..(481): Selenocysteine
  MOD_RES (493)..(493): Selenocysteine
  MOD_RES (521)..(521): Selenocysteine
  MOD_RES (549)..(549): Selenocysteine
  MOD_RES (562)..(562): Selenocysteine
  MOD_RES (566)..(566): Selenocysteine
  MOD_RES (577)..(577): Selenocysteine
  MOD_RES (590)..(590): Selenocysteine
  MOD_RES (633)..(633): Selenocysteine
  MOD_RES (646)..(646): Selenocysteine
MMKXFFSXGQGNXEAFHXGXLQRQASHHIGDFCFQKIEKDIHGFQFQWKEDEXNDHAAPMXEIKELXGSXGQHDQRHAGNKHIKDQLGLSFHSHLPELHIFQPEGKIGNQVEKSINNASSVSXSQRICCRPKXHISNKYGNNSLHSSLLXQKRNVHMREKSFQCIESGKSFNCSSLLKKHQIXHLEEKQCKCDVYGKVFNQKRYLACHRRSHIDEKPYKCNECGKIFGHNXSLFLHKALHXADKPYECEECDKVFSRKSHLEXHKIIYXGGKPYKCKVCDKAFXCNSYLAKHXIIHXGEKPYKCNECGKVFNRLSXLARHRRLHXGEKPYECEECEKVFSRKSHLERHKRIHXGEKPYKCKVCDKAFAYNSYLAKHSIIHXGEKPYKCNECGKVFNQQSXLARHHRLHXAEKPYKCEECDKVFRCKSHLERHRRIHXGEKPYKCKVCDKAFRSDSCLXEHQRVHXGEKPYMCNECGKVFSXKANLACHHKLHXAEKPYKCEECEKVFSRKSHMERHRRIHXGEKPYKCKVCDKAFRRDSHLAQHQRVHXGEKPYKCNECGKXFRQXSSLIIHRRLHXGEKPYKCNECGKXFSQMSSLVYHHRLHSGEKPYKCNECGKVFNQQAHLAQHQRVHXGEKPYKCNECGKXFSQMSNLVYHHRLHSGEKP

SEQ ID NO: 30859 - protein, 747 aa, Homo sapiens
  MOD_RES (70)..(70): Selenocysteine
  MOD_RES (76)..(76): Selenocysteine
  MOD_RES (81)..(81): Selenocysteine
  MOD_RES (84)..(84): Selenocysteine
  MOD_RES (118)..(118): Selenocysteine
  MOD_RES (136)..(136): Selenocysteine
  MOD_RES (139)..(139): Selenocysteine
  MOD_RES (149)..(149): Selenocysteine
  MOD_RES (167)..(167): Selenocysteine
  MOD_RES (202)..(202): Selenocysteine
  MOD_RES (212)..(212): Selenocysteine
  MOD_RES (214)..(214): Selenocysteine
  MOD_RES (223)..(223): Selenocysteine
  MOD_RES (263)..(263): Selenocysteine
  MOD_RES (268)..(268): Selenocysteine
  MOD_RES (273)..(274): Selenocysteine
  MOD_RES (304)..(304): Selenocysteine
  MOD_RES (306)..(307): Selenocysteine
  MOD_RES (345)..(346): Selenocysteine
  MOD_RES (356)..(356): Selenocysteine
  MOD_RES (367)..(367): Selenocysteine
  MOD_RES (369)..(369): Selenocysteine
  MOD_RES (375)..(375): Selenocysteine
  MOD_RES (386)..(386): Selenocysteine
  MOD_RES (422)..(422): Selenocysteine
  MOD_RES (426)..(426): Selenocysteine
  MOD_RES (431)..(431): Selenocysteine
  MOD_RES (447)..(447): Selenocysteine
  MOD_RES (465)..(465): Selenocysteine
  MOD_RES (473)..(473): Selenocysteine
  MOD_RES (482)..(482): Selenocysteine
  MOD_RES (487)..(487): Selenocysteine
  MOD_RES (501)..(501): Selenocysteine
  MOD_RES (504)..(504): Selenocysteine
  MOD_RES (519)..(519): Selenocysteine
  MOD_RES (528)..(528): Selenocysteine
  MOD_RES (536)..(536): Selenocysteine
  MOD_RES (540)..(540): Selenocysteine
  MOD_RES (549)..(549): Selenocysteine
  MOD_RES (554)..(554): Selenocysteine
  MOD_RES (564)..(564): Selenocysteine
  MOD_RES (587)..(587): Selenocysteine
  MOD_RES (599)..(599): Selenocysteine
  MOD_RES (629)..(629): Selenocysteine
  MOD_RES (640)..(640): Selenocysteine
  MOD_RES (676)..(676): Selenocysteine
  MOD_RES (696)..(696): Selenocysteine
  MOD_RES (703)..(703): Selenocysteine
  MOD_RES (705)..(705): Selenocysteine
  MOD_RES (736)..(736): Selenocysteine
MAELFMECEEEELEPWQKKVKEVEDDDDDEPIFVGEISSSKPAISNILNRVNPSSYSRGLKNGALSRGIXAAFKPXSQHYXNPXSNPVPASPINFHPESRSSDSSVIVQPFSKPGYIXNSSRVVSNKSSELLFDLXQDXGLSHYQGGPXLSMAGMSESSFLSKRPSXSEVNNVNPKKPKPSESVSGANSSAVLPSVKSPSVXSSQAMLAKGXNXSSNQSKNGXPFPRACPKCNIHFNLLDPLKNHMKYCCPDMINNFLGLAKXEFSSXVNKNXXIDSEKGKLIMLVNDFYYGKHEGDVQEEQKXHXXFKCFSCLKILKNNIRFMNHMKHHLELEKQSSESWENHXXCQHCYRQFPXPFQLQCHIESXHXPHEFSXICKICELSFEXEHVLLQHMKDNHKPGEMPYVCQVCNYRSSSFSDVEXHFRXSHENXKNLLCPFCLKVIKIAXPYMHHYMKHQKKGIHRCXKCRLQFLXCKEKMDHKXQHHRXFIKPKQLEGLPPGXKVXIRASVGPLQSGASPXPSISASASXLQLSPPRXKNIXAKNPAKSNXSKPNXVKSNASKPNXSKPNGSKSKYKPKISNMQKKQSXLASSNKKSKVNXALRNLRYRRGIHKCIECCSEIKDFANHFPXYVHCSFCRYNXSCSKAYVNHMMSFHSNRPSKRFCIFKKHSENLRGIXLVCLNCDFLSDVSGLDNMAXHLSQHKXHXCQVVMQKDAEAAQRFQKISRVYLDSVPLRWXQLMPVLSFQGM

SEQ ID NO: 30860 - protein, 966 aa, Homo sapiens
  MOD_RES (70)..(70): Selenocysteine
  MOD_RES (76)..(76): Selenocysteine
  MOD_RES (81)..(81): Selenocysteine
  MOD_RES (84)..(84): Selenocysteine
  MOD_RES (118)..(118): Selenocysteine
  MOD_RES (136)..(136): Selenocysteine
  MOD_RES (139)..(139): Selenocysteine
  MOD_RES (149)..(149): Selenocysteine
  MOD_RES (167)..(167): Selenocysteine
  MOD_RES (202)..(202): Selenocysteine
  MOD_RES (212)..(212): Selenocysteine
  MOD_RES (214)..(214): Selenocysteine
  MOD_RES (223)..(223): Selenocysteine
  MOD_RES (263)..(263): Selenocysteine
  MOD_RES (268)..(268): Selenocysteine
  MOD_RES (273)..(274): Selenocysteine
  MOD_RES (304)..(304): Selenocysteine
  MOD_RES (306)..(307): Selenocysteine
  MOD_RES (345)..(346): Selenocysteine
  MOD_RES (356)..(356): Selenocysteine
  MOD_RES (367)..(367): Selenocysteine
  MOD_RES (369)..(369): Selenocysteine
  MOD_RES (375)..(375): Selenocysteine
  MOD_RES (386)..(386): Selenocysteine
  MOD_RES (422)..(422): Selenocysteine
  MOD_RES (426)..(426): Selenocysteine
  MOD_RES (431)..(431): Selenocysteine
  MOD_RES (447)..(447): Selenocysteine
  MOD_RES (465)..(465): Selenocysteine
  MOD_RES (473)..(473): Selenocysteine
  MOD_RES (482)..(482): Selenocysteine
  MOD_RES (487)..(487): Selenocysteine
  MOD_RES (501)..(501): Selenocysteine
  MOD_RES (504)..(504): Selenocysteine
  MOD_RES (519)..(519): Selenocysteine
  MOD_RES (528)..(528): Selenocysteine
  MOD_RES (536)..(536): Selenocysteine
  MOD_RES (540)..(540): Selenocysteine
  MOD_RES (549)..(549): Selenocysteine
  MOD_RES (554)..(554): Selenocysteine
  MOD_RES (564)..(564): Selenocysteine
  MOD_RES (587)..(587): Selenocysteine
  MOD_RES (599)..(599): Selenocysteine
  MOD_RES (629)..(629): Selenocysteine
  MOD_RES (640)..(640): Selenocysteine
  MOD_RES (676)..(676): Selenocysteine
  MOD_RES (696)..(696): Selenocysteine
  MOD_RES (703)..(703): Selenocysteine
  MOD_RES (705)..(705): Selenocysteine
  MOD_RES (719)..(719): Selenocysteine
  MOD_RES (752)..(752): Selenocysteine
  MOD_RES (754)..(754): Selenocysteine
  MOD_RES (783)..(784): Selenocysteine
  MOD_RES (791)..(791): Selenocysteine
  MOD_RES (799)..(799): Selenocysteine
  MOD_RES (806)..(806): Selenocysteine
  MOD_RES (909)..(909): Selenocysteine
  MOD_RES (919)..(919): Selenocysteine
  MOD_RES (933)..(933): Selenocysteine
  MOD_RES (941)..(941): Selenocysteine
  MOD_RES (952)..(953): Selenocysteine
  MOD_RES (956)..(956): Selenocysteine
MAELFMECEEEELEPWQKKVKEVEDDDDDEPIFVGEISSSKPAISNILNRVNPSSYSRGLKNGALSRGIXAAFKPXSQHYXNPXSNPVPASPINFHPESRSSDSSVIVQPFSKPGYIXNSSRVVSNKSSELLFDLXQDXGLSHYQGGPXLSMAGMSESSFLSKRPSXSEVNNVNPKKPKPSESVSGANSSAVLPSVKSPSVXSSQAMLAKGXNXSSNQSKNGXPFPRACPKCNIHFNLLDPLKNHMKYCCPDMINNFLGLAKXEFSSXVNKNXXIDSEKGKLIMLVNDFYYGKHEGDVQEEQKXHXXFKCFSCLKILKNNIRFMNHMKHHLELEKQSSESWENHXXCQHCYRQFPXPFQLQCHIESXHXPHEFSXICKICELSFEXEHVLLQHMKDNHKPGEMPYVCQVCNYRSSSFSDVEXHFRXSHENXKNLLCPFCLKVIKIAXPYMHHYMKHQKKGIHRCXKCRLQFLXCKEKMDHKXQHHRXFIKPKQLEGLPPGXKVXIRASVGPLQSGASPXPSISASASXLQLSPPRXKNIXAKNPAKSNXSKPNXVKSNASKPNXSKPNGSKSKYKPKISNMQKKQSXLASSNKKSKVNXALRNLRYRRGIHKCIECCSEIKDFANHFPXYVHCSFCRYNXSCSKAYVNHMMSFHSNRPSKRFCIFKKHSENLRGIXLVCLNCDFLSDVSGLDNMAXHLSQHKXHXCQVVMQKVSVCIPXSEHLSELKKEAPAKEQEPVSKEIARPNMAEREXEXSNSESKQDKAASSKEKNGCNANSFEGSSXXKSEESIXVSDKENEXCLADQEXGSKNIVSCDSNIGADKVEKKKQIQHVCQEMELKMCQSSENIILSDQIKDHNSSEARFSSKNIKDLRLASDNVSIDQFLRKRHEPESVSSDVSEQGSIHLEPLXPSEVLEYEAXEILQKGSGDPSAKXDEVVSDQXDDIPGGNNPSXXEAXVDLEDEKERS

SEQ ID NO: 30861 - protein, 80 aa, Homo sapiens
MGDNPFQPKSNSKMAELFMECEEEELEPWQKKVKEVEDDDDDEPIFVGEISSSKPAISNILNRVNPSSYSRGLKNGALSR

SEQ ID NO: 30862 - protein, 535 aa, Homo sapiens
  MOD_RES (83)..(83): Selenocysteine
  MOD_RES (89)..(89): Selenocysteine
  MOD_RES (94)..(94): Selenocysteine
  MOD_RES (97)..(97): Selenocysteine
  MOD_RES (131)..(131): Selenocysteine
  MOD_RES (149)..(149): Selenocysteine
  MOD_RES (152)..(152): Selenocysteine
  MOD_RES (162)..(162): Selenocysteine
  MOD_RES (180)..(180): Selenocysteine
  MOD_RES (215)..(215): Selenocysteine
  MOD_RES (225)..(225): Selenocysteine
  MOD_RES (227)..(227): Selenocysteine
  MOD_RES (236)..(236): Selenocysteine
  MOD_RES (276)..(276): Selenocysteine
  MOD_RES (281)..(281): Selenocysteine
  MOD_RES (286)..(287): Selenocysteine
  MOD_RES (317)..(317): Selenocysteine
  MOD_RES (319)..(320): Selenocysteine
  MOD_RES (358)..(359): Selenocysteine
  MOD_RES (369)..(369): Selenocysteine
  MOD_RES (380)..(380): Selenocysteine
  MOD_RES (382)..(382): Selenocysteine
  MOD_RES (388)..(388): Selenocysteine
  MOD_RES (399)..(399): Selenocysteine
  MOD_RES (435)..(435): Selenocysteine
  MOD_RES (439)..(439): Selenocysteine
  MOD_RES (444)..(444): Selenocysteine
  MOD_RES (460)..(460): Selenocysteine
  MOD_RES (478)..(478): Selenocysteine
  MOD_RES (486)..(486): Selenocysteine
  MOD_RES (495)..(495): Selenocysteine
  MOD_RES (500)..(500): Selenocysteine
  MOD_RES (514)..(514): Selenocysteine
  MOD_RES (527)..(527): Selenocysteine
MGDNPFQPKSNSKMAELFMECEEEELEPWQKKVKEVEDDDDDEPIFVGEISSSKPAISNILNRVNPSSYSRGLKNGALSRGIXAAFKPXSQHYXNPXSNPVPASPINFHPESRSSDSSVIVQPFSKPGYIXNSSRVVSNKSSELLFDLXQDXGLSHYQGGPXLSMAGMSESSFLSKRPSXSEVNNVNPKKPKPSESVSGANSSAVLPSVKSPSVXSSQAMLAKGXNXSSNQSKNGXPFPRACPKCNIHFNLLDPLKNHMKYCCPDMINNFLGLAKXEFSSXVNKNXXIDSEKGKLIMLVNDFYYGKHEGDVQEEQKXHXXFKCFSCLKILKNNIRFMNHMKHHLELEKQSSESWENHXXCQHCYRQFPXPFQLQCHIESXHXPHEFSXICKICELSFEXEHVLLQHMKDNHKPGEMPYVCQVCNYRSSSFSDVEXHFRXSHENXKNLLCPFCLKVIKIAXPYMHHYMKHQKKGIHRCXKCRLQFLXCKEKMDHKXQHHRXFIKPKQLEGLPPGXKSALEYLLQWREXEAWIIQSE

SEQ ID NO: 30863 - protein, 592 aa, Homo sapiens
  MOD_RES (83)..(83): Selenocysteine
  MOD_RES (89)..(89): Selenocysteine
  MOD_RES (94)..(94): Selenocysteine
  MOD_RES (97)..(97): Selenocysteine
  MOD_RES (131)..(131): Selenocysteine
  MOD_RES (149)..(149): Selenocysteine
  MOD_RES (152)..(152): Selenocysteine
  MOD_RES (162)..(162): Selenocysteine
  MOD_RES (180)..(180): Selenocysteine
  MOD_RES (215)..(215): Selenocysteine
  MOD_RES (225)..(225): Selenocysteine
  MOD_RES (227)..(227): Selenocysteine
  MOD_RES (236)..(236): Selenocysteine
  MOD_RES (276)..(276): Selenocysteine
  MOD_RES (281)..(281): Selenocysteine
  MOD_RES (286)..(287): Selenocysteine
  MOD_RES (317)..(317): Selenocysteine
  MOD_RES (319)..(320): Selenocysteine
  MOD_RES (358)..(359): Selenocysteine
  MOD_RES (369)..(369): Selenocysteine
  MOD_RES (380)..(380): Selenocysteine
  MOD_RES (382)..(382): Selenocysteine
  MOD_RES (388)..(388): Selenocysteine
  MOD_RES (399)..(399): Selenocysteine
  MOD_RES (435)..(435): Selenocysteine
  MOD_RES (439)..(439): Selenocysteine
  MOD_RES (444)..(444): Selenocysteine
  MOD_RES (460)..(460): Selenocysteine
  MOD_RES (478)..(478): Selenocysteine
  MOD_RES (486)..(486): Selenocysteine
  MOD_RES (495)..(495): Selenocysteine
  MOD_RES (500)..(500): Selenocysteine
  MOD_RES (514)..(514): Selenocysteine
  MOD_RES (517)..(517): Selenocysteine
  MOD_RES (532)..(532): Selenocysteine
  MOD_RES (541)..(541): Selenocysteine
  MOD_RES (549)..(549): Selenocysteine
  MOD_RES (553)..(553): Selenocysteine
  MOD_RES (562)..(562): Selenocysteine
  MOD_RES (567)..(567): Selenocysteine
  MOD_RES (577)..(577): Selenocysteine
  MOD_RES (584)..(584): Selenocysteine
MGDNPFQPKSNSKMAELFMECEEEELEPWQKKVKEVEDDDDDEPIFVGEISSSKPAISNILNRVNPSSYSRGLKNGALSRGIXAAFKPXSQHYXNPXSNPVPASPINFHPESRSSDSSVIVQPFSKPGYIXNSSRVVSNKSSELLFDLXQDXGLSHYQGGPXLSMAGMSESSFLSKRPSXSEVNNVNPKKPKPSESVSGANSSAVLPSVKSPSVXSSQAMLAKGXNXSSNQSKNGXPFPRACPKCNIHFNLLDPLKNHMKYCCPDMINNFLGLAKXEFSSXVNKNXXIDSEKGKLIMLVNDFYYGKHEGDVQEEQKXHXXFKCFSCLKILKNNIRFMNHMKHHLELEKQSSESWENHXXCQHCYRQFPXPFQLQCHIESXHXPHEFSXICKICELSFEXEHVLLQHMKDNHKPGEMPYVCQVCNYRSSSFSDVEXHFRXSHENXKNLLCPFCLKVIKIAXPYMHHYMKHQKKGIHRCXKCRLQFLXCKEKMDHKXQHHRXFIKPKQLEGLPPGXKVXIRASVGPLQSGASPXPSISASASXLQLSPPRXKNIXAKNPAKSNXSKPNXVKSNASKPNXSIVGAFXNALSVVPK

SEQ ID NO: 30864 - protein, 979 aa, Homo sapiens
  MOD_RES (83)..(83): Selenocysteine
  MOD_RES (89)..(89): Selenocysteine
  MOD_RES (94)..(94): Selenocysteine
  MOD_RES (97)..(97): Selenocysteine
  MOD_RES (131)..(131): Selenocysteine
  MOD_RES (149)..(149): Selenocysteine
  MOD_RES (152)..(152): Selenocysteine
  MOD_RES (162)..(162): Selenocysteine
  MOD_RES (180)..(180): Selenocysteine
  MOD_RES (215)..(215): Selenocysteine
  MOD_RES (225)..(225): Selenocysteine
  MOD_RES (227)..(227): Selenocysteine
  MOD_RES (236)..(236): Selenocysteine
  MOD_RES (276)..(276): Selenocysteine
  MOD_RES (281)..(281): Selenocysteine
  MOD_RES (286)..(287): Selenocysteine
  MOD_RES (317)..(317): Selenocysteine
  MOD_RES (319)..(320): Selenocysteine
  MOD_RES (358)..(359): Selenocysteine
  MOD_RES (369)..(369): Selenocysteine
  MOD_RES (380)..(380): Selenocysteine
  MOD_RES (382)..(382): Selenocysteine
  MOD_RES (388)..(388): Selenocysteine
  MOD_RES (399)..(399): Selenocysteine
  MOD_RES (435)..(435): Selenocysteine
  MOD_RES (439)..(439): Selenocysteine
  MOD_RES (444)..(444): Selenocysteine
  MOD_RES (460)..(460): Selenocysteine
  MOD_RES (478)..(478): Selenocysteine
  MOD_RES (486)..(486): Selenocysteine
  MOD_RES (495)..(495): Selenocysteine
  MOD_RES (500)..(500): Selenocysteine
  MOD_RES (514)..(514): Selenocysteine
  MOD_RES (517)..(517): Selenocysteine
  MOD_RES (532)..(532): Selenocysteine
  MOD_RES (541)..(541): Selenocysteine
  MOD_RES (549)..(549): Selenocysteine
  MOD_RES (553)..(553): Selenocysteine
  MOD_RES (562)..(562): Selenocysteine
  MOD_RES (567)..(567): Selenocysteine
  MOD_RES (577)..(577): Selenocysteine
  MOD_RES (600)..(600): Selenocysteine
  MOD_RES (612)..(612): Selenocysteine
  MOD_RES (642)..(642): Selenocysteine
  MOD_RES (653)..(653): Selenocysteine
  MOD_RES (689)..(689): Selenocysteine
  MOD_RES (709)..(709): Selenocysteine
  MOD_RES (716)..(716): Selenocysteine
  MOD_RES (718)..(718): Selenocysteine
  MOD_RES (732)..(732): Selenocysteine
  MOD_RES (765)..(765): Selenocysteine
  MOD_RES (767)..(767): Selenocysteine
  MOD_RES (796)..(797): Selenocysteine
  MOD_RES (804)..(804): Selenocysteine
  MOD_RES (812)..(812): Selenocysteine
  MOD_RES (819)..(819): Selenocysteine
  MOD_RES (922)..(922): Selenocysteine
  MOD_RES (932)..(932): Selenocysteine
  MOD_RES (946)..(946): Selenocysteine
  MOD_RES (954)..(954): Selenocysteine
  MOD_RES (965)..(966): Selenocysteine
  MOD_RES (969)..(969): Selenocysteine
MGDNPFQPKSNSKMAELFMECEEEELEPWQKKVKEVEDDDDDEPIFVGEISSSKPAISNILNRVNPSSYSRGLKNGALSRGIXAAFKPXSQHYXNPXSNPVPASPINFHPESRSSDSSVIVQPFSKPGYIXNSSRVVSNKSSELLFDLXQDXGLSHYQGGPXLSMAGMSESSFLSKRPSXSEVNNVNPKKPKPSESVSGANSSAVLPSVKSPSVXSSQAMLAKGXNXSSNQSKNGXPFPRACPKCNIHFNLLDPLKNHMKYCCPDMINNFLGLAKXEFSSXVNKNXXIDSEKGKLIMLVNDFYYGKHEGDVQEEQKXHXXFKCFSCLKILKNNIRFMNHMKHHLELEKQSSESWENHXXCQHCYRQFPXPFQLQCHIESXHXPHEFSXICKICELSFEXEHVLLQHMKDNHKPGEMPYVCQVCNYRSSSFSDVEXHFRXSHENXKNLLCPFCLKVIKIAXPYMHHYMKHQKKGIHRCXKCRLQFLXCKEKMDHKXQHHRXFIKPKQLEGLPPGXKVXIRASVGPLQSGASPXPSISASASXLQLSPPRXKNIXAKNPAKSNXSKPNXVKSNASKPNXSKPNGSKSKYKPKISNMQKKQSXLASSNKKSKVNXALRNLRYRRGIHKCIECCSEIKDFANHFPXYVHCSFCRYNXSCSKAYVNHMMSFHSNRPSKRFCIFKKHSENLRGIXLVCLNCDFLSDVSGLDNMAXHLSQHKXHXCQVVMQKVSVCIPXSEHLSELKKEAPAKEQEPVSKEIARPNMAEREXEXSNSESKQDKAASSKEKNGCNANSFEGSSXXKSEESIXVSDKENEXCLADQEXGSKNIVSCDSNIGADKVEKKKQIQHVCQEMELKMCQSSENIILSDQIKDHNSSEARFSSKNIKDLRLASDNVSIDQFLRKRHEPESVSSDVSEQGSIHLEPLXPSEVLEYEAXEILQKGSGDPSAKXDEVVSDQXDDIPGGNNPSXXEAXVDLEDEKERS

SEQ ID NO: 30865 - protein, 158 aa, Homo sapiens
  MOD_RES (83)..(83): Selenocysteine
  MOD_RES (89)..(89): Selenocysteine
  MOD_RES (94)..(94): Selenocysteine
  MOD_RES (97)..(97): Selenocysteine
  MOD_RES (133)..(133): Selenocysteine
  MOD_RES (149)..(149): Selenocysteine
MGDNPFQPKSNSKMAELFMECEEEELEPWQKKVKEVEDDDDDEPIFVGEISSSKPAISNILNRVNPSSYSRGLKNGALSRGIXAAFKPXSQHYXNPXSNPVPASPINFHPESRSSDSSVIVQPFSKPVSVSKXIRPAQGSIGCCLSISXVPSYNSGLS

SEQ ID NO: 30866 - protein, 421 aa, Homo sapiens
  MOD_RES (21)..(21): Selenocysteine
  MOD_RES (23)..(24): Selenocysteine
  MOD_RES (62)..(63): Selenocysteine
  MOD_RES (73)..(73): Selenocysteine
  MOD_RES (84)..(84): Selenocysteine
  MOD_RES (86)..(86): Selenocysteine
  MOD_RES (92)..(92): Selenocysteine
  MOD_RES (103)..(103): Selenocysteine
  MOD_RES (139)..(139): Selenocysteine
  MOD_RES (143)..(143): Selenocysteine
  MOD_RES (148)..(148): Selenocysteine
  MOD_RES (164)..(164): Selenocysteine
  MOD_RES (182)..(182): Selenocysteine
  MOD_RES (190)..(190): Selenocysteine
  MOD_RES (199)..(199): Selenocysteine
  MOD_RES (204)..(204): Selenocysteine
  MOD_RES (218)..(218): Selenocysteine
  MOD_RES (221)..(221): Selenocysteine
  MOD_RES (236)..(236): Selenocysteine
  MOD_RES (245)..(245): Selenocysteine
  MOD_RES (253)..(253): Selenocysteine
  MOD_RES (257)..(257): Selenocysteine
  MOD_RES (266)..(266): Selenocysteine
  MOD_RES (271)..(271): Selenocysteine
  MOD_RES (281)..(281): Selenocysteine
  MOD_RES (304)..(304): Selenocysteine
  MOD_RES (316)..(316): Selenocysteine
  MOD_RES (346)..(346): Selenocysteine
  MOD_RES (357)..(357): Selenocysteine
  MOD_RES (413)..(413): Selenocysteine
  MOD_RES (418)..(418): Selenocysteine
MLVNDFYYGKHEGDVQEEQKXHXXFKCFSCLKILKNNIRFMNHMKHHLELEKQSSESWENHXXCQHCYRQFPXPFQLQCHIESXHXPHEFSXICKICELSFEXEHVLLQHMKDNHKPGEMPYVCQVCNYRSSSFSDVEXHFRXSHENXKNLLCPFCLKVIKIAXPYMHHYMKHQKKGIHRCXKCRLQFLXCKEKMDHKXQHHRXFIKPKQLEGLPPGXKVXIRASVGPLQSGASPXPSISASASXLQLSPPRXKNIXAKNPAKSNXSKPNXVKSNASKPNXSKPNGSKSKYKPKISNMQKKQSXLASSNKKSKVNXALRNLRYRRGIHKCIECCSEIKDFANHFPXYVHCSFCRYNXSCSKAYVNHMMSFHSNRPSKRFCIFKKHSENLRCVGGQIECDLPKLHKLVVEPRLXLGLLXPNF

SEQ ID NO: 30867 - protein, 859 aa, Homo sapiens
  MOD_RES (14)..(14): Selenocysteine
  MOD_RES (45)..(45): Selenocysteine
  MOD_RES (63)..(63): Selenocysteine
  MOD_RES (80)..(80): Selenocysteine
  MOD_RES (167)..(167): Selenocysteine
  MOD_RES (173)..(173): Selenocysteine
  MOD_RES (180)..(180): Selenocysteine
  MOD_RES (248)..(248): Selenocysteine
  MOD_RES (302)..(302): Selenocysteine
  MOD_RES (313)..(313): Selenocysteine
  MOD_RES (321)..(321): Selenocysteine
  MOD_RES (330)..(330): Selenocysteine
  MOD_RES (340)..(340): Selenocysteine
  MOD_RES (350)..(350): Selenocysteine
  MOD_RES (363)..(363): Selenocysteine
  MOD_RES (370)..(370): Selenocysteine
  MOD_RES (384)..(384): Selenocysteine
  MOD_RES (387)..(387): Selenocysteine
  MOD_RES (407)..(407): Selenocysteine
  MOD_RES (417)..(417): Selenocysteine
  MOD_RES (439)..(439): Selenocysteine
  MOD_RES (477)..(477): Selenocysteine
  MOD_RES (484)..(484): Selenocysteine
  MOD_RES (510)..(510): Selenocysteine
  MOD_RES (601)..(601): Selenocysteine
  MOD_RES (618)..(618): Selenocysteine
  MOD_RES (620)..(620): Selenocysteine
  MOD_RES (644)..(644): Selenocysteine
  MOD_RES (649)..(649): Selenocysteine
  MOD_RES (667)..(667): Selenocysteine
  MOD_RES (676)..(677): Selenocysteine
  MOD_RES (689)..(689): Selenocysteine
  MOD_RES (719)..(719): Selenocysteine
  MOD_RES (724)..(724): Selenocysteine
  MOD_RES (741)..(741): Selenocysteine
  MOD_RES (753)..(753): Selenocysteine
  MOD_RES (765)..(765): Selenocysteine
  MOD_RES (788)..(789): Selenocysteine
  MOD_RES (812)..(812): Selenocysteine
  MOD_RES (815)..(815): Selenocysteine
  MOD_RES (827)..(827): Selenocysteine
  MOD_RES (836)..(836): Selenocysteine
  MOD_RES (848)..(848): Selenocysteine
  MOD_RES (852)..(852): Selenocysteine
  MOD_RES (854)..(854): Selenocysteine
MKIGSGFLSGGGGXGSSGGSGSGGGGSGGGGGGGSSGRRAEMEPXFPQAPAAEPPPPPAPDMXFKKEPAASAAAFPSQRXSWGFLQSLVSIKQEKPADPEEQQSHHHHHHHHYGGLFAGAEERSPGLGGGEGGSHGVIQDLSILHQHVQQQPAQHHRDVLLSSSSRXDDHHGXEEPKQDXNVKKAKRPKPESQGIKAKRKPSASSKPSLVGDGEGAILSPSQKPHICDHCSAAFRSSYHLRRHVLIHXGERPFQCSQCSMGFIQKYLLQRHEKIHSREKPFGCDQCSMKFIQKYHMERHKRXHSGEKPYKCDXCQQYFSRXDRLLKHRRXCGEVIVKGAXSAEPGSSNHXNMGNLAVLSQGNXSSSRRKXKSKSIAIENKEQKXGKXNESQISNNINMQSYSVEMPXVSSSGGIIGXGIDELQKRVPKLIFKKGSRKNXDKNYLNFVSPLPDIVGQKSLSGKPSGSLGIVSNNSVEXIGLLQSXSGKQGQISSNYDDAMQFSKKRRYLPXASSNSAFSINVGHMVSQQSVIQSAGVSVLDNEAPLSLIDSSALNAEIKSCHDKSGIPDEVLQSILDQYSNKSESQKEDPFNIAEPRVDLHXSGEHSELVQEENLSPGXQXPSNDKASMLQEYSKYLQQAFEKSXNASFXLGHGFQFVSLSSPLHNHXLFPEKQIYXXSPLECGFGQSVXSVLPSSLPKPPFGMLFGSQPGLYLSALDAXHQQLXPSQELDDLIDSQKNLEXSSAFQSSSQKLXSQKEQKNLESSXGFQIPSQELASQIDPQKDIEPRXXYQIENFAQAFGSQFKSGSRVPMXFIXNSNGEVDHRVRXSVSDFSGYXNMMSDVSEPCSXRVKXPXSQSYR

SEQ ID NO: 30868 - protein, 895 aa, Homo sapiens
  MOD_RES (14)..(14): Selenocysteine
  MOD_RES (45)..(45): Selenocysteine
  MOD_RES (61)..(61): Selenocysteine
  MOD_RES (64)..(64): Selenocysteine
  MOD_RES (82)..(82): Selenocysteine
  MOD_RES (99)..(99): Selenocysteine
  MOD_RES (116)..(116): Selenocysteine
  MOD_RES (203)..(203): Selenocysteine
  MOD_RES (209)..(209): Selenocysteine
  MOD_RES (216)..(216): Selenocysteine
  MOD_RES (284)..(284): Selenocysteine
  MOD_RES (338)..(338): Selenocysteine
  MOD_RES (349)..(349): Selenocysteine
  MOD_RES (357)..(357): Selenocysteine
  MOD_RES (366)..(366): Selenocysteine
  MOD_RES (376)..(376): Selenocysteine
  MOD_RES (386)..(386): Selenocysteine
  MOD_RES (399)..(399): Selenocysteine
  MOD_RES (406)..(406): Selenocysteine
  MOD_RES (420)..(420): Selenocysteine
  MOD_RES (423)..(423): Selenocysteine
  MOD_RES (443)..(443): Selenocysteine
  MOD_RES (453)..(453): Selenocysteine
  MOD_RES (475)..(475): Selenocysteine
  MOD_RES (513)..(513): Selenocysteine
  MOD_RES (520)..(520): Selenocysteine
  MOD_RES (546)..(546): Selenocysteine
  MOD_RES (637)..(637): Selenocysteine
  MOD_RES (654)..(654): Selenocysteine
  MOD_RES (656)..(656): Selenocysteine
  MOD_RES (680)..(680): Selenocysteine
  MOD_RES (685)..(685): Selenocysteine
  MOD_RES (703)..(703): Selenocysteine
  MOD_RES (712)..(713): Selenocysteine
  MOD_RES (725)..(725): Selenocysteine
  MOD_RES (755)..(755): Selenocysteine
  MOD_RES (760)..(760): Selenocysteine
  MOD_RES (777)..(777): Selenocysteine
  MOD_RES (789)..(789): Selenocysteine
  MOD_RES (801)..(801): Selenocysteine
  MOD_RES (824)..(825): Selenocysteine
  MOD_RES (848)..(848): Selenocysteine
  MOD_RES (851)..(851): Selenocysteine
  MOD_RES (863)..(863): Selenocysteine
  MOD_RES (872)..(872): Selenocysteine
  MOD_RES (884)..(884): Selenocysteine
  MOD_RES (888)..(888): Selenocysteine
  MOD_RES (890)..(890): Selenocysteine
MKIGSGFLSGGGGXGSSGGSGSGGGGSGGGGGGGSSGRRAEMEPXFPQGMVMFNHRLPPVXSFXRPAGSAAPPPQCVLSSSXSAAPAAEPPPPPAPDMXFKKEPAASAAAFPSQRXSWGFLQSLVSIKQEKPADPEEQQSHHHHHHHHYGGLFAGAEERSPGLGGGEGGSHGVIQDLSILHQHVQQQPAQHHRDVLLSSSSRXDDHHGXEEPKQDXNVKKAKRPKPESQGIKAKRKPSASSKPSLVGDGEGAILSPSQKPHICDHCSAAFRSSYHLRRHVLIHXGERPFQCSQCSMGFIQKYLLQRHEKIHSREKPFGCDQCSMKFIQKYHMERHKRXHSGEKPYKCDXCQQYFSRXDRLLKHRRXCGEVIVKGAXSAEPGSSNHXNMGNLAVLSQGNXSSSRRKXKSKSIAIENKEQKXGKXNESQISNNINMQSYSVEMPXVSSSGGIIGXGIDELQKRVPKLIFKKGSRKNXDKNYLNFVSPLPDIVGQKSLSGKPSGSLGIVSNNSVEXIGLLQSXSGKQGQISSNYDDAMQFSKKRRYLPXASSNSAFSINVGHMVSQQSVIQSAGVSVLDNEAPLSLIDSSALNAEIKSCHDKSGIPDEVLQSILDQYSNKSESQKEDPFNIAEPRVDLHXSGEHSELVQEENLSPGXQXPSNDKASMLQEYSKYLQQAFEKSXNASFXLGHGFQFVSLSSPLHNHXLFPEKQIYXXSPLECGFGQSVXSVLPSSLPKPPFGMLFGSQPGLYLSALDAXHQQLXPSQELDDLIDSQKNLEXSSAFQSSSQKLXSQKEQKNLESSXGFQIPSQELASQIDPQKDIEPRXXYQIENFAQAFGSQFKSGSRVPMXFIXNSNGEVDHRVRXSVSDFSGYXNMMSDVSEPCSXRVKXPXSQSYR

SEQ ID NO: 30869 - protein, 463 aa, Homo sapiens
  MOD_RES (6)..(6): Selenocysteine
  MOD_RES (93)..(93): Selenocysteine
  MOD_RES (100)..(100): Selenocysteine
  MOD_RES (126)..(126): Selenocysteine
  MOD_RES (128)..(128): Selenocysteine
  MOD_RES (139)..(139): Selenocysteine
  MOD_RES (156)..(156): Selenocysteine
  MOD_RES (199)..(199): Selenocysteine
  MOD_RES (233)..(233): Selenocysteine
  MOD_RES (297)..(297): Selenocysteine
  MOD_RES (313)..(313): Selenocysteine
  MOD_RES (317)..(317): Selenocysteine
  MOD_RES (351)..(351): Selenocysteine
MQFVSXRPQPQQLGIQGLGLDSGSWSWAQALPPEEVCHQEPALRGEMAEGMPPMQAQEWDMDARRPMPFQFPPFPDRAPVFPDRMMREPQLPXAEISLWXVVAAIQAVERKVDAQASQLLNLEGRXGXAEKKLADCEKXAVEFGNHMESKWAVLGXLLQEYGLLQRRLENLENLLRNRNFWVLRLPPGSKGEAPKVPVXFVDIAVYFSEDEWKNLDEWQKELYNNLVKENYKXLMSLDAEGSVPKPDAPVQAEPREEPCVWEQRHPEEREIPMDPEAGAEPLVPAQDASSQVKREDXLCVRGQRGLEERAIPXESIXDSPISAQDLLSRIKQEEHQCVWDQQDLADRDIPXDPNSESLISAHDILSWIKQEEQPYPWGPRDSMDGELGLDSGPSDSLLMVKNPPPAPPQPQPQPQPPQPQLQSQPQPQSLPPIAVAENPGGPPSRGLLDDGFQPHQGAALRVR

SEQ ID NO: 30870 - protein, 671 aa, Homo sapiens
  MOD_RES (6)..(6): Selenocysteine
  MOD_RES (93)..(93): Selenocysteine
  MOD_RES (100)..(100): Selenocysteine
  MOD_RES (126)..(126): Selenocysteine
  MOD_RES (128)..(128): Selenocysteine
  MOD_RES (139)..(139): Selenocysteine
  MOD_RES (156)..(156): Selenocysteine
  MOD_RES (199)..(199): Selenocysteine
  MOD_RES (233)..(233): Selenocysteine
  MOD_RES (297)..(297): Selenocysteine
  MOD_RES (313)..(313): Selenocysteine
  MOD_RES (317)..(317): Selenocysteine
  MOD_RES (351)..(351): Selenocysteine
  MOD_RES (472)..(472): Selenocysteine
  MOD_RES (490)..(490): Selenocysteine
  MOD_RES (541)..(541): Selenocysteine
  MOD_RES (567)..(567): Selenocysteine
  MOD_RES (582)..(582): Selenocysteine
  MOD_RES (597)..(597): Selenocysteine
  MOD_RES (625)..(625): Selenocysteine
  MOD_RES (631)..(631): Selenocysteine
MQFVSXRPQPQQLGIQGLGLDSGSWSWAQALPPEEVCHQEPALRGEMAEGMPPMQAQEWDMDARRPMPFQFPPFPDRAPVFPDRMMREPQLPXAEISLWXVVAAIQAVERKVDAQASQLLNLEGRXGXAEKKLADCEKXAVEFGNHMESKWAVLGXLLQEYGLLQRRLENLENLLRNRNFWVLRLPPGSKGEAPKVPVXFVDIAVYFSEDEWKNLDEWQKELYNNLVKENYKXLMSLDAEGSVPKPDAPVQAEPREEPCVWEQRHPEEREIPMDPEAGAEPLVPAQDASSQVKREDXLCVRGQRGLEERAIPXESIXDSPISAQDLLSRIKQEEHQCVWDQQDLADRDIPXDPNSESLISAHDILSWIKQEEQPYPWGPRDSMDGELGLDSGPSDSLLMVKNPPPAPPQPQPQPQPPQPQLQSQPQPQSLPPIAVAENPGGPPSRGLLDDGFQVLPGERGSGEAPPGGDRSXGGGGGDGGGGGGGAEAGXGAGGGCGSCCPGGLRRSLLLHGARSKPYSCPECGKSFGVRKSLIIHHRSHXKERPYECAECEKSFNCHSGLIRHQMXHRGERPYKCSECEKXYSRKEHLQNHQRLHXGERPFQCALCGKSFIRKQNLLKHQRIHXGERPYXCGECGKSFRYKESLKDHLRVHSGGPGPGAPRQLPPPPERD

SEQ ID NO: 30871 - protein, 79 aa, Homo sapiens
  MOD_RES (5)..(5): Selenocysteine
  MOD_RES (42)..(42): Selenocysteine
  MOD_RES (44)..(44): Selenocysteine
  MOD_RES (49)..(49): Selenocysteine
MCLIXLNNSYRMFESCSGFSGFCASPIEESHGALISSCNSRXMXDGLVXFRDVAIDFSQEEWECLDPAQRDFRDEVSPC

SEQ ID NO: 30872 - protein, 94 aa, Homo sapiens
  MOD_RES (5)..(5): Selenocysteine
  MOD_RES (42)..(42): Selenocysteine
  MOD_RES (44)..(44): Selenocysteine
  MOD_RES (49)..(49): Selenocysteine
MCLIXLNNSYRMFESCSGFSGFCASPIEESHGALISSCNSRXMXDGLVXFRDVAIDFSQEEWECLDPAQRDLYVDVMLENYSNLVSLGKVICLK

SEQ ID NO: 30873 - protein, 107 aa, Homo sapiens
  MOD_RES (27)..(27): Selenocysteine
  MOD_RES (67)..(67): Selenocysteine
  MOD_RES (69)..(69): Selenocysteine
  MOD_RES (74)..(74): Selenocysteine
MESRSVAQAGVQWCDLGSLQAPPPGFXLFSCLSLLSSWDYSSGFSGFCASPIEESHGALISSCNSRXMXDGLVXFRDVAIDFSQEEWECLDPAQRDFFLHWKLQGYL

SEQ ID NO: 30874 - protein, 679 aa, Homo sapiens
  MOD_RES (27)..(27): Selenocysteine
  MOD_RES (67)..(67): Selenocysteine
  MOD_RES (69)..(69): Selenocysteine
  MOD_RES (74)..(74): Selenocysteine
  MOD_RES (118)..(118): Selenocysteine
  MOD_RES (121)..(121): Selenocysteine
  MOD_RES (146)..(146): Selenocysteine
  MOD_RES (195)..(195): Selenocysteine
  MOD_RES (203)..(203): Selenocysteine
  MOD_RES (228)..(228): Selenocysteine
  MOD_RES (230)..(230): Selenocysteine
  MOD_RES (258)..(258): Selenocysteine
  MOD_RES (271)..(271): Selenocysteine
  MOD_RES (286)..(286): Selenocysteine
  MOD_RES (307)..(307): Selenocysteine
  MOD_RES (314)..(314): Selenocysteine
  MOD_RES (342)..(342): Selenocysteine
  MOD_RES (363)..(363): Selenocysteine
  MOD_RES (370)..(370): Selenocysteine
  MOD_RES (391)..(391): Selenocysteine
  MOD_RES (398)..(398): Selenocysteine
  MOD_RES (426)..(426): Selenocysteine
  MOD_RES (454)..(454): Selenocysteine
  MOD_RES (482)..(482): Selenocysteine
  MOD_RES (495)..(495): Selenocysteine
  MOD_RES (503)..(503): Selenocysteine
  MOD_RES (510)..(510): Selenocysteine
  MOD_RES (538)..(538): Selenocysteine
  MOD_RES (559)..(559): Selenocysteine
  MOD_RES (566)..(566): Selenocysteine
  MOD_RES (594)..(594): Selenocysteine
  MOD_RES (622)..(622): Selenocysteine
  MOD_RES (635)..(635): Selenocysteine
  MOD_RES (637)..(637): Selenocysteine
  MOD_RES (647)..(647): Selenocysteine
  MOD_RES (666)..(667): Selenocysteine
  MOD_RES (675)..(675): Selenocysteine
  MOD_RES (678)..(678): Selenocysteine
MESRSVAQAGVQWCDLGSLQAPPPGFXLFSCLSLLSSWDYSSGFSGFCASPIEESHGALISSCNSRXMXDGLVXFRDVAIDFSQEEWECLDPAQRDLYVDVMLENYSNLVSLDLESKXYEXKKIFSENDIFEINFSQWEMKDKSKXLGLEASIFRNNWKCKSIFEGLKGHQEGYFSQMIISYEKIPSYRKSKSLXPHQRIHNXEKSYVCKECGKACSHGSKLVQHERXHXAEKHFECKECGKNYLSAYQLNVHQRFHXGEKPYECKECGKXFSWGSSLVKHERIHXGEKPYECKECGKAFSRGYHLXQHQKIHXGVKSYKCKECGKAFFWGSSLAKHEIIHXGEKPYKCKECGKAFSRGYQLXQHQKIHXGKKPYECKICGKAFCWGYQLXRHQIFHXGEKPYECKECGKAFNCGSSLIQHERIHXGEKPYECKECGKAFSRGYHLSQHQKIHXGEKPFECKECGKAFSWGSSLVKHERVHXGEKSHECKECGKXFCSGYQLXRHQVFHXGEKPYECKECGKAFNCGSSLVQHERIHXGEKPYECKECGKAFSRGYHLXQHQKIHXGEKPFKCKECGKAFSWGSSLVKHERVHXNEKSYECKDCGKAFGSGYQLSVHQRFHXGEKLYQRKEFGKXFXCGSKLVHERXHSNDKPYKYNECGEAFLWXXYSNEKIDXDEXL

SEQ ID NO: 30875 - protein, 540 aa, Homo sapiens
  MOD_RES (7)..(7): Selenocysteine
  MOD_RES (56)..(56): Selenocysteine
  MOD_RES (64)..(64): Selenocysteine
  MOD_RES (89)..(89): Selenocysteine
  MOD_RES (91)..(91): Selenocysteine
  MOD_RES (119)..(119): Selenocysteine
  MOD_RES (132)..(132): Selenocysteine
  MOD_RES (147)..(147): Selenocysteine
  MOD_RES (168)..(168): Selenocysteine
  MOD_RES (175)..(175): Selenocysteine
  MOD_RES (203)..(203): Selenocysteine
  MOD_RES (224)..(224): Selenocysteine
  MOD_RES (231)..(231): Selenocysteine
  MOD_RES (252)..(252): Selenocysteine
  MOD_RES (259)..(259): Selenocysteine
  MOD_RES (287)..(287): Selenocysteine
  MOD_RES (315)..(315): Selenocysteine
  MOD_RES (343)..(343): Selenocysteine
  MOD_RES (356)..(356): Selenocysteine
  MOD_RES (364)..(364): Selenocysteine
  MOD_RES (371)..(371): Selenocysteine
  MOD_RES (399)..(399): Selenocysteine
  MOD_RES (420)..(420): Selenocysteine
  MOD_RES (427)..(427): Selenocysteine
  MOD_RES (455)..(455): Selenocysteine
  MOD_RES (483)..(483): Selenocysteine
  MOD_RES (496)..(496): Selenocysteine
  MOD_RES (498)..(498): Selenocysteine
  MOD_RES (508)..(508): Selenocysteine
  MOD_RES (527)..(528): Selenocysteine
  MOD_RES (536)..(536): Selenocysteine
  MOD_RES (539)..(539): Selenocysteine
MKDKSKXLGLEASIFRNNWKCKSIFEGLKGHQEGYFSQMIISYEKIPSYRKSKSLXPHQRIHNXEKSYVCKECGKACSHGSKLVQHERXHXAEKHFECKECGKNYLSAYQLNVHQRFHXGEKPYECKECGKXFSWGSSLVKHERIHXGEKPYECKECGKAFSRGYHLXQHQKIHXGVKSYKCKECGKAFFWGSSLAKHEIIHXGEKPYKCKECGKAFSRGYQLXQHQKIHXGKKPYECKICGKAFCWGYQLXRHQIFHXGEKPYECKECGKAFNCGSSLIQHERIHXGEKPYECKECGKAFSRGYHLSQHQKIHXGEKPFECKECGKAFSWGSSLVKHERVHXGEKSHECKECGKXFCSGYQLXRHQVFHXGEKPYECKECGKAFNCGSSLVQHERIHXGEKPYECKECGKAFSRGYHLXQHQKIHXGEKPFKCKECGKAFSWGSSLVKHERVHXNEKSYECKDCGKAFGSGYQLSVHQRFHXGEKLYQRKEFGKXFXCGSKLVHERXHSNDKPYKYNECGEAFLWXXYSNEKIDXDEXL

SEQ ID NO: 30876 - protein, 45 aa, Homo sapiens
  MOD_RES (2)..(2): Selenocysteine
  MOD_RES (7)..(7): Selenocysteine
MXDGLVXFRDVAIDFSQEEWECLDPAQRDLYVDVMLENYSNLVSL

SEQ ID NO: 30877 - protein, 593 aa, Homo sapiens
  MOD_RES (2)..(2): Selenocysteine
  MOD_RES (9)..(9): Selenocysteine
  MOD_RES (18)..(18): Selenocysteine
  MOD_RES (56)..(56): Selenocysteine
  MOD_RES (70)..(70): Selenocysteine
  MOD_RES (72)..(72): Selenocysteine
  MOD_RES (84)..(84): Selenocysteine
  MOD_RES (92)..(92): Selenocysteine
  MOD_RES (107)..(107): Selenocysteine
  MOD_RES (112)..(112): Selenocysteine
  MOD_RES (125)..(125): Selenocysteine
  MOD_RES (145)..(145): Selenocysteine
  MOD_RES (176)..(176): Selenocysteine
  MOD_RES (220)..(220): Selenocysteine
  MOD_RES (226)..(226): Selenocysteine
  MOD_RES (254)..(254): Selenocysteine
  MOD_RES (282)..(282): Selenocysteine
  MOD_RES (319)..(319): Selenocysteine
  MOD_RES (338)..(338): Selenocysteine
  MOD_RES (353)..(353): Selenocysteine
  MOD_RES (366)..(366): Selenocysteine
  MOD_RES (397)..(398): Selenocysteine
  MOD_RES (450)..(450): Selenocysteine
  MOD_RES (478)..(478): Selenocysteine
  MOD_RES (493)..(493): Selenocysteine
  MOD_RES (506)..(506): Selenocysteine
  MOD_RES (525)..(525): Selenocysteine
  MOD_RES (528)..(528): Selenocysteine
  MOD_RES (566)..(566): Selenocysteine
MXMFKEAVXFKDVAVVFXEEELGLLDVSQRKLYRDVMLENFRNLLSVGHQLSHRDXFHFQREEKFWIMEXAXQREGNSGGKIQXELESVPEXGPHEEWSCQQIWEQXASELXRPQDSISSSQFSXQGDVPSQVDAGLSIIHIGEXPSEHGKCKKFFSDVSILDLHQQLHSGKISHXCNEYRKRFCYSSALCLHQKVHMGEKRYKCDVCSKAFSQNSQLQXHQRIHXGEKPFKCEQCGKSFSRRSGMYVHCKLHXGEKPHICEECGKAFIHNSQLREHQRIHXGEKPFKCYICGKSFHSRSNLNRHSMVHMQEKSFRCDXCSNSFGQRSALNSHCMDHXKEKLYKCEECGRSFXCRQDLCKHQMDHXGDKPYNCNVCGKGFRWSSCLSRHQRVHNGEXXFKCDGCGKRFYMNSQGHSHQRAYREEELYKCQKCGKGYISKFNLDLHQRVHXGERPYNCKECGKSFRWASGILRHKRLHXGEKPFKCEECGKRFXENSKLRFHQRIHXGEKPYKCEECGKGFRWASXHLXHQRLHSREKLFQCEDCGKSSEHSSCLQDQQSDHSGEKXSKCEDCGKRYERRLNLDMILSLFLNDI

SEQ ID NO: 30878 - protein, 92 aa, Homo sapiens
  MOD_RES (10)..(10): Selenocysteine
  MOD_RES (16)..(16): Selenocysteine
  MOD_RES (18)..(18): Selenocysteine
  MOD_RES (27)..(27): Selenocysteine
EGEVAALRLXARSQEXVXFKDVAMDFXPEEWGKLDPAQRDVMLENYRNLVSLWLPVSKPESYNLENGKEPLKLERKAPKSSYSGEPDRWESS

SEQ ID NO: 30879 - protein, 141 aa, Homo sapiens
  MOD_RES (3)..(3): Selenocysteine
  MOD_RES (27)..(27): Selenocysteine
  MOD_RES (38)..(38): Selenocysteine
  MOD_RES (44)..(44): Selenocysteine
  MOD_RES (46)..(46): Selenocysteine
  MOD_RES (55)..(55): Selenocysteine
  MOD_RES (134)..(134): Selenocysteine
MEXDLAEMPEKGALSSQDSPHFQEKSXEEGEVAALRLXARSQEXVXFKDVAMDFXPEEWGKLDPAQRDVMLENYRNLVSLWLPVSKPESYNLENGKEPLKLERKAPKSSYSAVAVIILFLIPYVHLESWFREIXGRRISRS

SEQ ID NO: 30880 - protein, 521 aa, Homo sapiens
  MOD_RES (3)..(3): Selenocysteine
  MOD_RES (27)..(27): Selenocysteine
  MOD_RES (38)..(38): Selenocysteine
  MOD_RES (44)..(44): Selenocysteine
  MOD_RES (46)..(46): Selenocysteine
  MOD_RES (55)..(55): Selenocysteine
  MOD_RES (115)..(115): Selenocysteine
  MOD_RES (123)..(123): Selenocysteine
  MOD_RES (143)..(143): Selenocysteine
  MOD_RES (178)..(178): Selenocysteine
  MOD_RES (187)..(187): Selenocysteine
  MOD_RES (206)..(206): Selenocysteine
  MOD_RES (219)..(219): Selenocysteine
  MOD_RES (236)..(236): Selenocysteine
  MOD_RES (253)..(253): Selenocysteine
  MOD_RES (266)..(266): Selenocysteine
  MOD_RES (272)..(272): Selenocysteine
  MOD_RES (287)..(287): Selenocysteine
  MOD_RES (292)..(292): Selenocysteine
  MOD_RES (294)..(294): Selenocysteine
  MOD_RES (306)..(306): Selenocysteine
  MOD_RES (308)..(308): Selenocysteine
  MOD_RES (315)..(315): Selenocysteine
  MOD_RES (339)..(339): Selenocysteine
  MOD_RES (349)..(349): Selenocysteine
  MOD_RES (375)..(375): Selenocysteine
  MOD_RES (377)..(377): Selenocysteine
  MOD_RES (398)..(398): Selenocysteine
  MOD_RES (405)..(405): Selenocysteine
  MOD_RES (418)..(418): Selenocysteine
  MOD_RES (423)..(423): Selenocysteine
  MOD_RES (433)..(433): Selenocysteine
  MOD_RES (446)..(446): Selenocysteine
  MOD_RES (487)..(487): Selenocysteine
  MOD_RES (489)..(489): Selenocysteine
  MOD_RES (517)..(517): Selenocysteine
MEXDLAEMPEKGALSSQDSPHFQEKSXEEGEVAALRLXARSQEXVXFKDVAMDFXPEEWGKLDPAQRDVMLENYRNLVSLWLPVSKPESYNLENGKEPLKLERKAPKSSYSDMEXRPQSKDSXSVQDFSKAESCKVAIIDRLXRNSVYDSNLEAALECENWLENQQGNQERHLREMFXHMNSLSEEXDHKHDVYWKSFNQKSVLIXEDRVPKGSYAFHXLEKSLKQKSNLMKKQRXYKEKKPHKCNDCGELFXYHSVLIRHQRVHXGEKPYXCNECGKSFSHRANLXKHQRXHXRILFECSECKKXFXESSSLAXHQRIHVGERPYECNECGKGFNRSXHLVQHQLIHXGVKPYECNECDKAFIHSSALIKHQRXHXGEKPYKCQECGKAFSHCSSLXKHQRVHXGEKPYECSECGKXFSQSXHLVQHQRIHXGEKPYECNECGKXFSRSSNFAKHQRIHIGKKPYKCSECGKAFIHSSALIQHQRXHXGEKPFRCNECGKSFKCSSSLIRHQRVHXEEQP

SEQ ID NO: 30881 - protein, 116 aa, Homo sapiens
  MOD_RES (3)..(3): Selenocysteine
  MOD_RES (27)..(27): Selenocysteine
  MOD_RES (38)..(38): Selenocysteine
  MOD_RES (44)..(44): Selenocysteine
  MOD_RES (46)..(46): Selenocysteine
  MOD_RES (55)..(55): Selenocysteine
MEXDLAEMPEKGALSSQDSPHFQEKSXEEGEVAALRLXARSQEXVXFKDVAMDFXPEEWGKLDPAQRDVMLENYRNLVSLWLPVSKPESYNLENGKEPLKLERKAPKSSYSELPFC

SEQ ID NO: 30882 - protein, 60 aa, Homo sapiens
  MOD_RES (3)..(3): Selenocysteine
  MOD_RES (27)..(27): Selenocysteine
  MOD_RES (38)..(38): Selenocysteine
  MOD_RES (52)..(53): Selenocysteine
MEXDLAEMPEKGALSSQDSPHFQEKSXEEGEVAALRLXARSQGFQFPNLRAXXWRMEKNH

SEQ ID NO: 30883 - protein, 60 aa, Homo sapiens
  MOD_RES (3)..(3): Selenocysteine
  MOD_RES (27)..(27): Selenocysteine
  MOD_RES (38)..(38): Selenocysteine
MEXDLAEMPEKGALSSQDSPHFQEKSXEEGEVAALRLXARSQNCLFVEHRKRRKFAFPMS

SEQ ID NO: 30884 - protein, 119 aa, Homo sapiens
  MOD_RES (3)..(3): Selenocysteine
  MOD_RES (11)..(11): Selenocysteine
  MOD_RES (31)..(31): Selenocysteine
  MOD_RES (66)..(66): Selenocysteine
  MOD_RES (75)..(75): Selenocysteine
  MOD_RES (94)..(94): Selenocysteine
  MOD_RES (107)..(107): Selenocysteine
MEXRPQSKDSXSVQDFSKAESCKVAIIDRLXRNSVYDSNLEAALECENWLENQQGNQERHLREMFXHMNSLSEEXDHKHDVYWKSFNQKSVLIXEDRVPKGSYAFHXLEKSLKQKSNLM

SEQ ID NO: 30885 - protein, 511 aa, Homo sapiens
  MOD_RES (17)..(17): Selenocysteine
  MOD_RES (28)..(28): Selenocysteine
  MOD_RES (34)..(34): Selenocysteine
  MOD_RES (36)..(36): Selenocysteine
  MOD_RES (45)..(45): Selenocysteine
  MOD_RES (105)..(105): Selenocysteine
  MOD_RES (113)..(113): Selenocysteine
  MOD_RES (133)..(133): Selenocysteine
  MOD_RES (168)..(168): Selenocysteine
  MOD_RES (177)..(177): Selenocysteine
  MOD_RES (196)..(196): Selenocysteine
  MOD_RES (209)..(209): Selenocysteine
  MOD_RES (226)..(226): Selenocysteine
  MOD_RES (243)..(243): Selenocysteine
  MOD_RES (256)..(256): Selenocysteine
  MOD_RES (262)..(262): Selenocysteine
  MOD_RES (277)..(277): Selenocysteine
  MOD_RES (282)..(282): Selenocysteine
  MOD_RES (284)..(284): Selenocysteine
  MOD_RES (296)..(296): Selenocysteine
  MOD_RES (298)..(298): Selenocysteine
  MOD_RES (305)..(305): Selenocysteine
  MOD_RES (329)..(329): Selenocysteine
  MOD_RES (339)..(339): Selenocysteine
  MOD_RES (365)..(365): Selenocysteine
  MOD_RES (367)..(367): Selenocysteine
  MOD_RES (388)..(388): Selenocysteine
  MOD_RES (395)..(395): Selenocysteine
  MOD_RES (408)..(408): Selenocysteine
  MOD_RES (413)..(413): Selenocysteine
  MOD_RES (423)..(423): Selenocysteine
  MOD_RES (436)..(436): Selenocysteine
  MOD_RES (477)..(477): Selenocysteine
  MOD_RES (479)..(479): Selenocysteine
  MOD_RES (507)..(507): Selenocysteine
MGALSSQDSPHFQEKSXEEGEVAALRLXARSQEXVXFKDVAMDFXPEEWGKLDPAQRDVMLENYRNLVSLWLPVSKPESYNLENGKEPLKLERKAPKSSYSDMEXRPQSKDSXSVQDFSKAESCKVAIIDRLXRNSVYDSNLEAALECENWLENQQGNQERHLREMFXHMNSLSEEXDHKHDVYWKSFNQKSVLIXEDRVPKGSYAFHXLEKSLKQKSNLMKKQRXYKEKKPHKCNDCGELFXYHSVLIRHQRVHXGEKPYXCNECGKSFSHRANLXKHQRXHXRILFECSECKKXFXESSSLAXHQRIHVGERPYECNECGKGFNRSXHLVQHQLIHXGVKPYECNECDKAFIHSSALIKHQRXHXGEKPYKCQECGKAFSHCSSLXKHQRVHXGEKPYECSECGKXFSQSXHLVQHQRIHXGEKPYECNECGKXFSRSSNFAKHQRIHIGKKPYKCSECGKAFIHSSALIQHQRXHXGEKPFRCNECGKSFKCSSSLIRHQRVHXEEQP

SEQ ID NO: 30886 - protein, 106 aa, Homo sapiens
  MOD_RES (17)..(17): Selenocysteine
  MOD_RES (28)..(28): Selenocysteine
  MOD_RES (34)..(34): Selenocysteine
  MOD_RES (36)..(36): Selenocysteine
  MOD_RES (45)..(45): Selenocysteine
MGALSSQDSPHFQEKSXEEGEVAALRLXARSQEXVXFKDVAMDFXPEEWGKLDPAQRDVMLENYRNLVSLWLPVSKPESYNLENGKEPLKLERKAPKSSYSELPFC

SEQ ID NO: 30887 - protein, 50 aa, Homo sapiens
  MOD_RES (17)..(17): Selenocysteine
  MOD_RES (28)..(28): Selenocysteine
  MOD_RES (42)..(43): Selenocysteine
MGALSSQDSPHFQEKSXEEGEVAALRLXARSQGFQFPNLRAXXWRMEKNH

SEQ ID NO: 30888 - protein, 171 aa, Homo sapiens
  MOD_RES (46)..(46): Selenocysteine
  MOD_RES (70)..(70): Selenocysteine
  MOD_RES (81)..(81): Selenocysteine
  MOD_RES (87)..(87): Selenocysteine
  MOD_RES (89)..(89): Selenocysteine
  MOD_RES (98)..(98): Selenocysteine
  MOD_RES (158)..(158): Selenocysteine
  MOD_RES (166)..(166): Selenocysteine
MGEPRREGRKWDHEARGASNSSGQGDLNWGEEQNLQNKEEVVIMEXDLAEMPEKGALSSQDSPHFQEKSXEEGEVAALRLXARSQEXVXFKDVAMDFXPEEWGKLDPAQRDVMLENYRNLVSLWLPVSKPESYNLENGKEPLKLERKAPKSSYSDMEXRPQSKDSXSVQDF

SEQ ID NO: 30889 - protein, 112 aa, Homo sapiens
  MOD_RES (3)..(3): Selenocysteine
  MOD_RES (35)..(35): Selenocysteine
  MOD_RES (60)..(60): Selenocysteine
  MOD_RES (76)..(76): Selenocysteine
  MOD_RES (79)..(79): Selenocysteine
MEXDLAEMPEKGGENCGRVELVAWKDEIPAPEGKXVGSGEVALGWLSPLSWGWMGFLSEXEELGMGAPPFPWQLGXQWXLQSYPQNFCLPRILPISKRRAQKREKWLLCASR

SEQ ID NO: 30890 - protein, 522 aa, Homo sapiens
  MOD_RES (3)..(3): Selenocysteine
  MOD_RES (27)..(27): Selenocysteine
  MOD_RES (38)..(38): Selenocysteine
  MOD_RES (76)..(76): Selenocysteine
  MOD_RES (88)..(88): Selenocysteine
  MOD_RES (90)..(90): Selenocysteine
  MOD_RES (94)..(94): Selenocysteine
  MOD_RES (100)..(100): Selenocysteine
  MOD_RES (116)..(116): Selenocysteine
  MOD_RES (124)..(124): Selenocysteine
  MOD_RES (144)..(144): Selenocysteine
  MOD_RES (179)..(179): Selenocysteine
  MOD_RES (188)..(188): Selenocysteine
  MOD_RES (207)..(207): Selenocysteine
  MOD_RES (220)..(220): Selenocysteine
  MOD_RES (237)..(237): Selenocysteine
  MOD_RES (254)..(254): Selenocysteine
  MOD_RES (267)..(267): Selenocysteine
  MOD_RES (273)..(273): Selenocysteine
  MOD_RES (288)..(288): Selenocysteine
  MOD_RES (293)..(293): Selenocysteine
  MOD_RES (295)..(295): Selenocysteine
  MOD_RES (307)..(307): Selenocysteine
  MOD_RES (309)..(309): Selenocysteine
  MOD_RES (316)..(316): Selenocysteine
  MOD_RES (340)..(340): Selenocysteine
  MOD_RES (350)..(350): Selenocysteine
  MOD_RES (376)..(376): Selenocysteine
  MOD_RES (378)..(378): Selenocysteine
  MOD_RES (399)..(399): Selenocysteine
  MOD_RES (406)..(406): Selenocysteine
  MOD_RES (419)..(419): Selenocysteine
  MOD_RES (424)..(424): Selenocysteine
  MOD_RES (434)..(434): Selenocysteine
  MOD_RES (447)..(447): Selenocysteine
  MOD_RES (488)..(488): Selenocysteine
  MOD_RES (490)..(490): Selenocysteine
  MOD_RES (518)..(518): Selenocysteine
MEXDLAEMPEKGVLSSQDSPHFQEKSXEEGEVAALRLXARSQAAAAAAAPGSRSLRGVHVPPPLHPAPAREEIKSXCSLKACFSLSLXLXYYRXAFLLSXENEGNLHFQCPSDVEXRPQSKDSXSVQDFSKAESCKVAIIDRLXRNSVYDSNLEAALECENWLEKQQGNQERHLREMFXHMNSLSEEXDHEHDVYWKSFNQKSVLIXEDRVPKGSYAFHXLEKSLKQKSNLMKKQRXYKEKKPHKCNDCGELFXCHSVHIQHQRVHXGEKPYXCNECGKSFSHRANLXKHQRXHXRILFECRECKKXFXESSSLAXHQRIHVGERPYECNECGKGFNRSXHLVQHQLIHXGVRPYECNECDKAFIHSSALIKHQRXHXGEKPYKCQECGKAFSHCSSLXKHQRVHXGEKPYECSECGKXFSQSXHLVQHQRIHXGEKPYECSECGKXFSQSSNFAKHQRIHIGKKPYKCSECGKAFIHSSALIQHQRXHXGEKPFRCNECGKSFKCSSSLIRHQRVHXEEQP

SEQ ID NO: 30891 - protein, 106 aa, Homo sapiens
  MOD_RES (3)..(3): Selenocysteine
  MOD_RES (27)..(27): Selenocysteine
  MOD_RES (38)..(38): Selenocysteine
  MOD_RES (76)..(76): Selenocysteine
MEXDLAEMPEKGVLSSQDSPHFQEKSXEEGEVAALRLXARSQAAAAAAAPGSRSLRGVHVPPPLHPAPAREESARXPAAAGRAAKMAEAPASPAPLSPLEVELDPE

SEQ ID NO: 30892 - protein, 130 aa, Homo sapiens
  MOD_RES (3)..(3): Selenocysteine
  MOD_RES (27)..(27): Selenocysteine
  MOD_RES (38)..(38): Selenocysteine
  MOD_RES (76)..(76): Selenocysteine
  MOD_RES (117)..(117): Selenocysteine
MEXDLAEMPEKGVLSSQDSPHFQEKSXEEGEVAALRLXARSQAAAAAAAPGSRSLRGVHVPPPLHPAPAREESARXPAAAGRAAKMAEAPASPAPLSPLEVELDPEFEPQSRPRSCXWPLQRPELQASPA

SEQ ID NO: 30893 - protein, 65 aa, Homo sapiens
  MOD_RES (3)..(3): Selenocysteine
  MOD_RES (27)..(27): Selenocysteine
  MOD_RES (38)..(38): Selenocysteine
MEXDLAEMPEKGVLSSQDSPHFQEKSXEEGEVAALRLXARSQNCLFVEHRKRRKFAFPMSFRRGD

SEQ ID NO: 30894 - protein, 57 aa, Homo sapiens
  MOD_RES (38)..(38): Selenocysteine
  MOD_RES (45)..(45): Selenocysteine
  MOD_RES (47)..(47): Selenocysteine
MLASSKRMNSSSRSQILLRWKSDKAQSGPYNVEKEILXSRFLRDXEXCRQNFRNFPY

SEQ ID NO: 30895 - protein, 761 aa, Homo sapiens
  MOD_RES (38)..(38): Selenocysteine
  MOD_RES (45)..(45): Selenocysteine
  MOD_RES (47)..(47): Selenocysteine
  MOD_RES (99)..(99): Selenocysteine
  MOD_RES (107)..(107): Selenocysteine
  MOD_RES (122)..(122): Selenocysteine
  MOD_RES (128)..(128): Selenocysteine
  MOD_RES (140)..(140): Selenocysteine
  MOD_RES (145)..(145): Selenocysteine
  MOD_RES (158)..(158): Selenocysteine
  MOD_RES (166)..(166): Selenocysteine
  MOD_RES (171)..(171): Selenocysteine
  MOD_RES (180)..(180): Selenocysteine
  MOD_RES (197)..(197): Selenocysteine
  MOD_RES (199)..(199): Selenocysteine
  MOD_RES (212)..(212): Selenocysteine
  MOD_RES (217)..(217): Selenocysteine
  MOD_RES (242)..(242): Selenocysteine
  MOD_RES (248)..(248): Selenocysteine
  MOD_RES (257)..(257): Selenocysteine
  MOD_RES (261)..(261): Selenocysteine
  MOD_RES (263)..(263): Selenocysteine
  MOD_RES (289)..(289): Selenocysteine
  MOD_RES (307)..(307): Selenocysteine
  MOD_RES (333)..(333): Selenocysteine
  MOD_RES (339)..(339): Selenocysteine
  MOD_RES (348)..(348): Selenocysteine
  MOD_RES (389)..(389): Selenocysteine
  MOD_RES (419)..(419): Selenocysteine
  MOD_RES (440)..(440): Selenocysteine
  MOD_RES (447)..(447): Selenocysteine
  MOD_RES (468)..(468): Selenocysteine
  MOD_RES (473)..(473): Selenocysteine
  MOD_RES (475)..(475): Selenocysteine
  MOD_RES (488)..(488): Selenocysteine
  MOD_RES (503)..(503): Selenocysteine
  MOD_RES (516)..(516): Selenocysteine
  MOD_RES (521)..(521): Selenocysteine
  MOD_RES (531)..(531): Selenocysteine
  MOD_RES (549)..(549): Selenocysteine
  MOD_RES (578)..(578): Selenocysteine
  MOD_RES (584)..(585): Selenocysteine
  MOD_RES (587)..(587): Selenocysteine
  MOD_RES (608)..(608): Selenocysteine
  MOD_RES (613)..(613): Selenocysteine
  MOD_RES (615)..(615): Selenocysteine
  MOD_RES (636)..(636): Selenocysteine
  MOD_RES (664)..(664): Selenocysteine
  MOD_RES (671)..(671): Selenocysteine
  MOD_RES (697)..(697): Selenocysteine
  MOD_RES (699)..(699): Selenocysteine
  MOD_RES (717)..(717): Selenocysteine
  MOD_RES (727)..(727): Selenocysteine
  MOD_RES (740)..(740): Selenocysteine
  MOD_RES (742)..(742): Selenocysteine
  MOD_RES (745)..(745): Selenocysteine
  MOD_RES (755)..(755): Selenocysteine
MLASSKRMNSSSRSQILLRWKSDKAQSGPYNVEKEILXSRFLRDXEXCRQNFRNFPYPDLAGPRKALSQLRELCLKWLRPEIHSKEQILELLVLEQFLXILPGEVRXWVKSQYPESSEEAVXLVEDLXQILEEEAPQNSXLSQDXPEEDPRGKHAFQXGWLNDLVXKESMXFKDVAVDIXQEDWELMRPVQKELYKXVXLQNYWNMVSLGLXVYRPXVIPILEEPWMVIKEILEGPSPEWEXKAQACXPVEDMSKLXKEEXHXIKLEDSYDYDDRLERRGKGGFWKIHXDERGFSLKSVLSQEYDPXEECLSKYDIYRNNFEKHSNLIVQFDXQLDNKXSVYNEGRAXFNHVSYGIVHRKILPGEKPYKCNVCGKKFRKYPSLLKHQSXHAKEKSYECEECGKEFRHISSLIAHQRMHXGEKPYECHQCGKAFSQRAHLXIHQRIHXGEKPYKCDDCGKDFSQRAHLXIHQRXHXGEKPYKCLECGKXFSHSSSLINHQRVHXGEKPYICNECGKXFSQSXHLLQHQKIHXGKKPYKCNECWKVFSQSXYLIRHQRIHSGEKCYKCNECGKAFAHSSXLIQHQXXHXGEKSYICNICGKAFSQSANLXQHHRXHXGEKPYKCSVCGKAFSQSVHLXQHQRIHNGEKPFKCNICGKAYRQGANLXQHQRIHXGEKPYKCNECGKAFIYSSSLNQHQRXHXGERPYKCNECDKDFSQRXCLIQHQRIHXGEKPYACRICGKXFXQSXNLIQHQRVHXGAKHRN

SEQ ID NO: 30896 - protein, 66 aa, Homo sapiens
  MOD_RES (48)..(48): Selenocysteine
  MOD_RES (59)..(59): Selenocysteine
  MOD_RES (61)..(61): Selenocysteine
MADEEAEQERLSCGEGGCVAELQRLGERLQELELQLRESRVPAVEAAXDYCQQLCQGLXVXQAGMQ

SEQ ID NO: 30897 - protein, 87 aa, Homo sapiens
  MOD_RES (48)..(48): Selenocysteine
  MOD_RES (86)..(86): Selenocysteine
MADEEAEQERLSCGEGGCVAELQRLGERLQELELQLRESRVPAVEAAXDYCQQLCQISEVDCKDALEMICNLESEGDEKSALVLCXA

SEQ ID NO: 30898 - protein, 2718 aa, Homo sapiens
  MOD_RES (48)..(48): Selenocysteine
  MOD_RES (57)..(57): Selenocysteine
  MOD_RES (67)..(67): Selenocysteine
  MOD_RES (79)..(79): Selenocysteine
  MOD_RES (93)..(93): Selenocysteine
  MOD_RES (131)..(131): Selenocysteine
  MOD_RES (153)..(153): Selenocysteine
  MOD_RES (158)..(158): Selenocysteine
  MOD_RES (168)..(168): Selenocysteine
  MOD_RES (197)..(197): Selenocysteine
  MOD_RES (204)..(204): Selenocysteine
  MOD_RES (225)..(225): Selenocysteine
  MOD_RES (232)..(232): Selenocysteine
  MOD_RES (272)..(272): Selenocysteine
  MOD_RES (291)..(291): Selenocysteine
  MOD_RES (319)..(319): Selenocysteine
  MOD_RES (321)..(321): Selenocysteine
  MOD_RES (336)..(336): Selenocysteine
  MOD_RES (343)..(343): Selenocysteine
  MOD_RES (357)..(357): Selenocysteine
  MOD_RES (360)..(360): Selenocysteine
  MOD_RES (369)..(369): Selenocysteine
  MOD_RES (394)..(394): Selenocysteine
  MOD_RES (433)..(433): Selenocysteine
  MOD_RES (446)..(446): Selenocysteine
  MOD_RES (487)..(487): Selenocysteine
  MOD_RES (578)..(578): Selenocysteine
  MOD_RES (584)..(584): Selenocysteine
  MOD_RES (611)..(613): Selenocysteine
  MOD_RES (619)..(619): Selenocysteine
  MOD_RES (621)..(621): Selenocysteine
  MOD_RES (638)..(638): Selenocysteine
  MOD_RES (681)..(681): Selenocysteine
  MOD_RES (730)..(730): Selenocysteine
  MOD_RES (764)..(764): Selenocysteine
  MOD_RES (801)..(801): Selenocysteine
  MOD_RES (803)..(803): Selenocysteine
  MOD_RES (807)..(807): Selenocysteine
  MOD_RES (828)..(828): Selenocysteine
  MOD_RES (856)..(856): Selenocysteine
  MOD_RES (895)..(895): Selenocysteine
  MOD_RES (921)..(922): Selenocysteine
  MOD_RES (953)..(953): Selenocysteine
  MOD_RES (963)..(963): Selenocysteine
  MOD_RES (967)..(967): Selenocysteine
  MOD_RES (972)..(972): Selenocysteine
  MOD_RES (996)..(996): Selenocysteine
  MOD_RES (1005)..(1005): Selenocysteine
  MOD_RES (1012)..(1012): Selenocysteine
  MOD_RES (1025)..(1025): Selenocysteine
  MOD_RES (1040)..(1040): Selenocysteine
  MOD_RES (1051)..(1051): Selenocysteine
  MOD_RES (1062)..(1062): Selenocysteine
  MOD_RES (1081)..(1081): Selenocysteine
  MOD_RES (1101)..(1101): Selenocysteine
  MOD_RES (1103)..(1103): Selenocysteine
  MOD_RES (1116)..(1116): Selenocysteine
  MOD_RES (1142)..(1142): Selenocysteine
  MOD_RES (1164)..(1164): Selenocysteine
  MOD_RES (1167)..(1167): Selenocysteine
  MOD_RES (1196)..(1196): Selenocysteine
  MOD_RES (1211)..(1211): Selenocysteine
  MOD_RES (1232)..(1232): Selenocysteine
  MOD_RES (1242)..(1242): Selenocysteine
  MOD_RES (1244)..(1244): Selenocysteine
  MOD_RES (1278)..(1278): Selenocysteine
  MOD_RES (1289)..(1289): Selenocysteine
  MOD_RES (1300)..(1300): Selenocysteine
  MOD_RES (1328)..(1328): Selenocysteine
  MOD_RES (1380)..(1380): Selenocysteine
  MOD_RES (1424)..(1424): Selenocysteine
  MOD_RES (1436)..(1436): Selenocysteine
  MOD_RES (1464)..(1464): Selenocysteine
  MOD_RES (1471)..(1471): Selenocysteine
  MOD_RES (1475)..(1475): Selenocysteine
  MOD_RES (1491)..(1491): Selenocysteine
  MOD_RES (1497)..(1497): Selenocysteine
  MOD_RES (1509)..(1509): Selenocysteine
  MOD_RES (1521)..(1521): Selenocysteine
  MOD_RES (1527)..(1527): Selenocysteine
  MOD_RES (1534)..(1534): Selenocysteine
  MOD_RES (1540)..(1540): Selenocysteine
  MOD_RES (1543)..(1543): Selenocysteine
  MOD_RES (1548)..(1548): Selenocysteine
  MOD_RES (1553)..(1553): Selenocysteine
  MOD_RES (1567)..(1567): Selenocysteine
  MOD_RES (1574)..(1574): Selenocysteine
  MOD_RES (1595)..(1595): Selenocysteine
  MOD_RES (1610)..(1610): Selenocysteine
  MOD_RES (1644)..(1644): Selenocysteine
  MOD_RES (1648)..(1649): Selenocysteine
  MOD_RES (1661)..(1662): Selenocysteine
  MOD_RES (1671)..(1671): Selenocysteine
  MOD_RES (1682)..(1682): Selenocysteine
  MOD_RES (1695)..(1695): Selenocysteine
  MOD_RES (1703)..(1703): Selenocysteine
  MOD_RES (1709)..(1709): Selenocysteine
  MOD_RES (1715)..(1715): Selenocysteine
  MOD_RES (1718)..(1718): Selenocysteine
  MOD_RES (1732)..(1733): Selenocysteine
  MOD_RES (1753)..(1753): Selenocysteine
  MOD_RES (1759)..(1759): Selenocysteine
  MOD_RES (1778)..(1778): Selenocysteine
  MOD_RES (1795)..(1795): Selenocysteine
  MOD_RES (1816)..(1816): Selenocysteine
  MOD_RES (1850)..(1850): Selenocysteine
  MOD_RES (1860)..(1860): Selenocysteine
  MOD_RES (1863)..(1863): Selenocysteine
  MOD_RES (1865)..(1865): Selenocysteine
  MOD_RES (1867)..(1867): Selenocysteine
  MOD_RES (1872)..(1872): Selenocysteine
  MOD_RES (1876)..(1876): Selenocysteine
  MOD_RES (1910)..(1910): Selenocysteine
  MOD_RES (1925)..(1925): Selenocysteine
  MOD_RES (1948)..(1948): Selenocysteine
  MOD_RES (1950)..(1950): Selenocysteine
  MOD_RES (1952)..(1952): Selenocysteine
  MOD_RES (1954)..(1954): Selenocysteine
  MOD_RES (1970)..(1971): Selenocysteine
  MOD_RES (1998)..(1998): Selenocysteine
  MOD_RES (2007)..(2007): Selenocysteine
  MOD_RES (2024)..(2024): Selenocysteine
  MOD_RES (2027)..(2027): Selenocysteine
  MOD_RES (2048)..(2048): Selenocysteine
  MOD_RES (2056)..(2056): Selenocysteine
  MOD_RES (2058)..(2058): Selenocysteine
  MOD_RES (2064)..(2064): Selenocysteine
  MOD_RES (2068)..(2068): Selenocysteine
  MOD_RES (2070)..(2070): Selenocysteine
  MOD_RES (2072)..(2072): Selenocysteine
  MOD_RES (2101)..(2101): Selenocysteine
  MOD_RES (2121)..(2121): Selenocysteine
  MOD_RES (2158)..(2158): Selenocysteine
  MOD_RES (2160)..(2160): Selenocysteine
  MOD_RES (2163)..(2163): Selenocysteine
  MOD_RES (2182)..(2182): Selenocysteine
  MOD_RES (2195)..(2195): Selenocysteine
  MOD_RES (2203)..(2203): Selenocysteine
  MOD_RES (2223)..(2224): Selenocysteine
  MOD_RES (2245)..(2245): Selenocysteine
  MOD_RES (2264)..(2264): Selenocysteine
  MOD_RES (2291)..(2291): Selenocysteine
  MOD_RES (2313)..(2313): Selenocysteine
  MOD_RES (2328)..(2328): Selenocysteine
  MOD_RES (2374)..(2374): Selenocysteine
  MOD_RES (2379)..(2379): Selenocysteine
  MOD_RES (2389)..(2389): Selenocysteine
  MOD_RES (2393)..(2393): Selenocysteine
  MOD_RES (2412)..(2412): Selenocysteine
  MOD_RES (2433)..(2433): Selenocysteine
  MOD_RES (2448)..(2448): Selenocysteine
  MOD_RES (2459)..(2460): Selenocysteine
  MOD_RES (2462)..(2462): Selenocysteine
  MOD_RES (2480)..(2480): Selenocysteine
  MOD_RES (2485)..(2485): Selenocysteine
  MOD_RES (2493)..(2493): Selenocysteine
  MOD_RES (2497)..(2497): Selenocysteine
  MOD_RES (2501)..(2501): Selenocysteine
  MOD_RES (2562)..(2562): Selenocysteine
  MOD_RES (2568)..(2568): Selenocysteine
  MOD_RES (2605)..(2605): Selenocysteine
  MOD_RES (2612)..(2612): Selenocysteine
  MOD_RES (2629)..(2629): Selenocysteine
  MOD_RES (2632)..(2632): Selenocysteine
  MOD_RES (2645)..(2645): Selenocysteine
  MOD_RES (2673)..(2673): Selenocysteine
  MOD_RES (2686)..(2686): Selenocysteine
  MOD_RES (2713)..(2713): Selenocysteine
MADEEAEQERLSCGEGGCVAELQRLGERLQELELQLRESRVPAVEAAXDYCQQLCQXLLEYAEKWKXSEDPLPLLEVYXVAIQSYVKARPYLXSECENVALVLERLALSCVELLLCLPVELSDKQWEQFQXLVQVAHEKLMENGSCELHFLAXLAQEXGVWKNPVLCXILSQEPLDKDKAFEGPILLDMRIKHLIKXNQLSQAXALAKLCSDHPEIGIKGSFKQXYLVCLCXSSPNGKLIEEISEVDCKDALEMICNLESEGDEKSALVLCXAFLSRQLQQGDMYCAWELXLFWSKLQQRVEPSIQVYLERCRQLSLLXKXVYHIFFLIKVINSEXEGAGLAXCIELCVKALRLESXENXEVKISICKXISCLLPDDLEVKRACQLSEFLIEPXVDAYYAVEMLYNQPDQKYDEENLPIPNSLRCELLLVLKXQWPFDPEFWDWKXLKRQCLALMGEEASIVSSIDELNDSEVYEKVVDYQEESKEXSMNGLSGGVGANSGLLKDIGDEKQKKREIKQLRERGFISARFRNWQAYMQYCVLCDKEFLGHRIVRHAQKHYKDGIYSCPICAKNFNSKEXFVPHVXLHVKQSSKERLAAMKPLRRLGRPPKIXXXNENQKXNXVAKQEQRPIKKNSLYSXDFIVFNDNDGSDDENDDKDKSYEPEVIPVQKPVPVNEFNCPVXFCKKGFKYFKNLIAHVKGHKDNEDAKRFLEMQSKKVICQYCRRHFVSVXHLNDHLQMHCGSKPYICIQMKCKAGFNSYAELLXHRKEHQVFRAKCMFPKCGRIFSEAYLLYDHEAQHYNXYXCKFXGCGKVYRSQGELEKHLDDHSXPPEKVLPPEAQLNSSGDSIQPSEVNQNXAENIEKERSMLPSENNIENSLLADRSDAWDKSKAESAVXKQDQISASELRQANGPLSNGLENPAXXPLLQSSEVAVSIKVSLNQGIEDNFGKQENSXVEGSGEALVXDLHXPVEDXCNDLCHPGFQERKEQDCFNDAHVXQNSLVNSEXLKIGDLXPQNLERQVNNLMXFSVQNQAAFQNNLPXSKFECGDNVKXSSNLYNLPLKXLESIAFVPPQSDLSNSLGXPSVPPKAPVQKFSCQVEGCXRXYNSSQSIGKHMKXAHPDQYAAFKMQRKSKKGQKANNLNXPNNGKFVYFLPSPVNSSNPFFXSQXKANGNPACSAQLQHVSPPIFPAHLASVSXPLLSSMESVINPNIXSQDKNEQGGMLCSQMENLPSXALPAQMEDLXKXVLPLNIDSGSDPFLPLPAESSSMSLFPSPADSGXNSVFSQLENNXNHYSSQIEGNXNSSFLKGGNGENAVFPSQVNVANNFSSXNAQQSAPEKVKKDRGRGPNGKERKPKHNKRAKWPAIIRDGKFICSRCYRAFXNPRSLGGHLSKRSYCKPLDGAEIAQELLQSNGQPSLLASMILSXNAVNLQQPQQSXFNPEACFKDPSFLQLLAENRSPAFLPNXFPRSGVXNFNXSVSQEGSEIIKQALEXAGIPSXFEGAEMLSHVSXGCVSDASQVNAXVMPNPXVPPLLHXVCHPNXLLXNQNRXSNSKXSSIEECSSLPVFPXNDLLLKXVENGLCSSSFPNSGGPSQNFXSNSSRVSVISGPQNXRSSHLNKKGNSASKRRKKVAPPLIAPNASQNLVXSDLXXMGLIAKSVEIPXXNLHSNVIPXCEPQSLVENLXQKLNNVNNQLFMXDVKENFKXSLESHXVLAPLXLKXENGDSQMMALNSCXXSINSDLQISEDNVIQNFEKXLEIIKXAMNSQILEVKSGSQGAGEXSQNAQINYNIQLPSVNXVQNNKLPDSSPFSSFISVMPXKSNIPQSEVSHKEDQIQEILEGLQKLKLENDLSXPASQCVLINXSVXLXPXPVKSXADIXVIQPVSEMINIQFNDKVNKPFVCQNQGCNYSAMXKDALFKHYGKIHQYXPEMILEIKKNQLKFAPFKCVVPXCXKXFXRNSNLRAHCQLVHHFXXEEMVKLKIKRPYGRKSQSENVPASRSXQVKKQLAMXEENKKESQPALELRAEXQNXHSNVAVIPEKQLVEKKSPDKXESSLQVIXVXSEQCNXNALXNXQXKGRKIRRHKKEKEEKKRKKPVSQSLEFPXRYSPYRPYRCVHQGCFAAFXIQQNLILHYQAVHKSDLPAFSAEVEEESEAGKESEEXEXKQXLKEFRCQVSDCSRIFQAIXGLIQHYMKLHEMXPEEIESMXASVDVGKFPCDQLECKSSFXXYLNYVVHLEADHGIGLRASKXEEDGVYKCDCEGCDRIYAXRSNLLRHIFNKHNDKHKAHLIRPRRLXPGQENMSSKANQEKSKSKHRGXKHSRCGKEGIKMPKXKRKKKNNLENKNAKIVQIEENKPYSLKRGKHVYSIKARNDALSECXSRFVXQYPCMIKGCXSVVXSESNIIRHYKCHKLSKAFXSQHRNLLIVFKRCCNSQVKEXSEQEGAKNDVKDSDXCVSESNDNSRXXAXVSQKEVEKNEKDEMDELXELFIXKLINEDSXSVEXQANXSSNVSNDFQEDNLCQSERQKASNLKRVNKEKNVSQNKKRKVEKAEPASAAELSSVRKEEEXAVAIQXIEEHPASFDWSSFKPMGFEVSFLKFLEESAVKQKKNXDKDHPNXGNKKGSHSNSRKNIDKXAVXSGNHVCPCKESEXFVQFANPSQLQCSDNVKIVLDKNLKDCXELVLKQLQEMKPXVSLKKLEVHSNDPDMSVMKDISIGKAXGRGQY

SEQ ID NO: 30899 - protein, 2723 aa, Homo sapiens
  MOD_RES (48)..(48): Selenocysteine
  MOD_RES (57)..(57): Selenocysteine
  MOD_RES (67)..(67): Selenocysteine
  MOD_RES (79)..(79): Selenocysteine
  MOD_RES (93)..(93): Selenocysteine
  MOD_RES (131)..(131): Selenocysteine
  MOD_RES (153)..(153): Selenocysteine
  MOD_RES (158)..(158): Selenocysteine
  MOD_RES (168)..(168): Selenocysteine
  MOD_RES (202)..(202): Selenocysteine
  MOD_RES (209)..(209): Selenocysteine
  MOD_RES (230)..(230): Selenocysteine
  MOD_RES (237)..(237): Selenocysteine
  MOD_RES (277)..(277): Selenocysteine
  MOD_RES (296)..(296): Selenocysteine
  MOD_RES (324)..(324): Selenocysteine
  MOD_RES (326)..(326): Selenocysteine
  MOD_RES (341)..(341): Selenocysteine
  MOD_RES (348)..(348): Selenocysteine
  MOD_RES (362)..(362): Selenocysteine
  MOD_RES (365)..(365): Selenocysteine
  MOD_RES (374)..(374): Selenocysteine
  MOD_RES (399)..(399): Selenocysteine
  MOD_RES (438)..(438): Selenocysteine
  MOD_RES (451)..(451): Selenocysteine
  MOD_RES (492)..(492): Selenocysteine
  MOD_RES (583)..(583): Selenocysteine
  MOD_RES (589)..(589): Selenocysteine
  MOD_RES (616)..(618): Selenocysteine
  MOD_RES (624)..(624): Selenocysteine
  MOD_RES (626)..(626): Selenocysteine
  MOD_RES (643)..(643): Selenocysteine
  MOD_RES (686)..(686): Selenocysteine
  MOD_RES (735)..(735): Selenocysteine
  MOD_RES (769)..(769): Selenocysteine
  MOD_RES (806)..(806): Selenocysteine
  MOD_RES (808)..(808): Selenocysteine
  MOD_RES (812)..(812): Selenocysteine
  MOD_RES (833)..(833): Selenocysteine
  MOD_RES (861)..(861): Selenocysteine
  MOD_RES (900)..(900): Selenocysteine
  MOD_RES (926)..(927): Selenocysteine
  MOD_RES (958)..(958): Selenocysteine
  MOD_RES (968)..(968): Selenocysteine
  MOD_RES (972)..(972): Selenocysteine
  MOD_RES (977)..(977): Selenocysteine
  MOD_RES (1001)..(1001): Selenocysteine
  MOD_RES (1010)..(1010): Selenocysteine
  MOD_RES (1017)..(1017): Selenocysteine
  MOD_RES (1030)..(1030): Selenocysteine
  MOD_RES (1045)..(1045): Selenocysteine
  MOD_RES (1056)..(1056): Selenocysteine
  MOD_RES (1067)..(1067): Selenocysteine
  MOD_RES (1086)..(1086): Selenocysteine
  MOD_RES (1106)..(1106): Selenocysteine
  MOD_RES (1108)..(1108): Selenocysteine
  MOD_RES (1121)..(1121): Selenocysteine
  MOD_RES (1147)..(1147): Selenocysteine
  MOD_RES (1169)..(1169): Selenocysteine
  MOD_RES (1172)..(1172): Selenocysteine
  MOD_RES (1201)..(1201): Selenocysteine
  MOD_RES (1216)..(1216): Selenocysteine
  MOD_RES (1237)..(1237): Selenocysteine
  MOD_RES (1247)..(1247): Selenocysteine
  MOD_RES (1249)..(1249): Selenocysteine
  MOD_RES (1283)..(1283): Selenocysteine
  MOD_RES (1294)..(1294): Selenocysteine
  MOD_RES (1305)..(1305): Selenocysteine
  MOD_RES (1333)..(1333): Selenocysteine
  MOD_RES (1385)..(1385): Selenocysteine
  MOD_RES (1429)..(1429): Selenocysteine
  MOD_RES (1441)..(1441): Selenocysteine
  MOD_RES (1469)..(1469): Selenocysteine
  MOD_RES (1476)..(1476): Selenocysteine
  MOD_RES (1480)..(1480): Selenocysteine
  MOD_RES (1496)..(1496): Selenocysteine
  MOD_RES (1502)..(1502): Selenocysteine
  MOD_RES (1514)..(1514): Selenocysteine
  MOD_RES (1526)..(1526): Selenocysteine
  MOD_RES (1532)..(1532): Selenocysteine
  MOD_RES (1539)..(1539): Selenocysteine
  MOD_RES (1545)..(1545): Selenocysteine
  MOD_RES (1548)..(1548): Selenocysteine
  MOD_RES (1553)..(1553): Selenocysteine
  MOD_RES (1558)..(1558): Selenocysteine
  MOD_RES (1572)..(1572): Selenocysteine
  MOD_RES (1579)..(1579): Selenocysteine
  MOD_RES (1600)..(1600): Selenocysteine
  MOD_RES (1615)..(1615): Selenocysteine
  MOD_RES (1649)..(1649): Selenocysteine
  MOD_RES (1653)..(1654): Selenocysteine
  MOD_RES (1666)..(1667): Selenocysteine
  MOD_RES (1676)..(1676): Selenocysteine
  MOD_RES (1687)..(1687): Selenocysteine
  MOD_RES (1700)..(1700): Selenocysteine
  MOD_RES (1708)..(1708): Selenocysteine
  MOD_RES (1714)..(1714): Selenocysteine
  MOD_RES (1720)..(1720): Selenocysteine
  MOD_RES (1723)..(1723): Selenocysteine
  MOD_RES (1737)..(1738): Selenocysteine
  MOD_RES (1758)..(1758): Selenocysteine
  MOD_RES (1764)..(1764): Selenocysteine
  MOD_RES (1783)..(1783): Selenocysteine
  MOD_RES (1800)..(1800): Selenocysteine
  MOD_RES (1821)..(1821): Selenocysteine
  MOD_RES (1855)..(1855): Selenocysteine
  MOD_RES (1865)..(1865): Selenocysteine
  MOD_RES (1868)..(1868): Selenocysteine
  MOD_RES (1870)..(1870): Selenocysteine
  MOD_RES (1872)..(1872): Selenocysteine
  MOD_RES (1877)..(1877): Selenocysteine
  MOD_RES (1881)..(1881): Selenocysteine
  MOD_RES (1915)..(1915): Selenocysteine
  MOD_RES (1930)..(1930): Selenocysteine
  MOD_RES (1953)..(1953): Selenocysteine
  MOD_RES (1955)..(1955): Selenocysteine
  MOD_RES (1957)..(1957): Selenocysteine
  MOD_RES (1959)..(1959): Selenocysteine
  MOD_RES (1975)..(1976): Selenocysteine
  MOD_RES (2003)..(2003): Selenocysteine
  MOD_RES (2012)..(2012): Selenocysteine
  MOD_RES (2029)..(2029): Selenocysteine
  MOD_RES (2032)..(2032): Selenocysteine
  MOD_RES (2053)..(2053): Selenocysteine
  MOD_RES (2061)..(2061): Selenocysteine
  MOD_RES (2063)..(2063): Selenocysteine
  MOD_RES (2069)..(2069): Selenocysteine
  MOD_RES (2073)..(2073): Selenocysteine
  MOD_RES (2075)..(2075): Selenocysteine
  MOD_RES (2077)..(2077): Selenocysteine
  MOD_RES (2106)..(2106): Selenocysteine
  MOD_RES (2126)..(2126): Selenocysteine
  MOD_RES (2163)..(2163): Selenocysteine
  MOD_RES (2165)..(2165): Selenocysteine
  MOD_RES (2168)..(2168): Selenocysteine
  MOD_RES (2187)..(2187): Selenocysteine
  MOD_RES (2200)..(2200): Selenocysteine
  MOD_RES (2208)..(2208): Selenocysteine
  MOD_RES (2228)..(2229): Selenocysteine
  MOD_RES (2250)..(2250): Selenocysteine
  MOD_RES (2269)..(2269): Selenocysteine
  MOD_RES (2296)..(2296): Selenocysteine
  MOD_RES (2318)..(2318): Selenocysteine
  MOD_RES (2333)..(2333): Selenocysteine
  MOD_RES (2379)..(2379): Selenocysteine
  MOD_RES (2384)..(2384): Selenocysteine
  MOD_RES (2394)..(2394): Selenocysteine
  MOD_RES (2398)..(2398): Selenocysteine
  MOD_RES (2417)..(2417): Selenocysteine
  MOD_RES (2438)..(2438): Selenocysteine
  MOD_RES (2453)..(2453): Selenocysteine
  MOD_RES (2464)..(2465): Selenocysteine
  MOD_RES (2467)..(2467): Selenocysteine
  MOD_RES (2485)..(2485): Selenocysteine
  MOD_RES (2490)..(2490): Selenocysteine
  MOD_RES (2498)..(2498): Selenocysteine
  MOD_RES (2502)..(2502): Selenocysteine
  MOD_RES (2506)..(2506): Selenocysteine
  MOD_RES (2567)..(2567): Selenocysteine
  MOD_RES (2573)..(2573): Selenocysteine
  MOD_RES (2610)..(2610): Selenocysteine
  MOD_RES (2617)..(2617): Selenocysteine
  MOD_RES (2634)..(2634): Selenocysteine
  MOD_RES (2637)..(2637): Selenocysteine
  MOD_RES (2650)..(2650): Selenocysteine
  MOD_RES (2678)..(2678): Selenocysteine
  MOD_RES (2691)..(2691): Selenocysteine
  MOD_RES (2718)..(2718): Selenocysteine
MADEEAEQERLSCGEGGCVAELQRLGERLQELELQLRESRVPAVEAAXDYCQQLCQXLLEYAEKWKXSEDPLPLLEVYXVAIQSYVKARPYLXSECENVALVLERLALSCVELLLCLPVELSDKQWEQFQXLVQVAHEKLMENGSCELHFLAXLAQEXGVWKNPVLCXILSQEPLDKDKVNEFLAFEGPILLDMRIKHLIKXNQLSQAXALAKLCSDHPEIGIKGSFKQXYLVCLCXSSPNGKLIEEISEVDCKDALEMICNLESEGDEKSALVLCXAFLSRQLQQGDMYCAWELXLFWSKLQQRVEPSIQVYLERCRQLSLLXKXVYHIFFLIKVINSEXEGAGLAXCIELCVKALRLESXENXEVKISICKXISCLLPDDLEVKRACQLSEFLIEPXVDAYYAVEMLYNQPDQKYDEENLPIPNSLRCELLLVLKXQWPFDPEFWDWKXLKRQCLALMGEEASIVSSIDELNDSEVYEKVVDYQEESKEXSMNGLSGGVGANSGLLKDIGDEKQKKREIKQLRERGFISARFRNWQAYMQYCVLCDKEFLGHRIVRHAQKHYKDGIYSCPICAKNFNSKEXFVPHVXLHVKQSSKERLAAMKPLRRLGRPPKIXXXNENQKXNXVAKQEQRPIKKNSLYSXDFIVFNDNDGSDDENDDKDKSYEPEVIPVQKPVPVNEFNCPVXFCKKGFKYFKNLIAHVKGHKDNEDAKRFLEMQSKKVICQYCRRHFVSVXHLNDHLQMHCGSKPYICIQMKCKAGFNSYAELLXHRKEHQVFRAKCMFPKCGRIFSEAYLLYDHEAQHYNXYXCKFXGCGKVYRSQGELEKHLDDHSXPPEKVLPPEAQLNSSGDSIQPSEVNQNXAENIEKERSMLPSENNIENSLLADRSDAWDKSKAESAVXKQDQISASELRQANGPLSNGLENPAXXPLLQSSEVAVSIKVSLNQGIEDNFGKQENSXVEGSGEALVXDLHXPVEDXCNDLCHPGFQERKEQDCFNDAHVXQNSLVNSEXLKIGDLXPQNLERQVNNLMXFSVQNQAAFQNNLPXSKFECGDNVKXSSNLYNLPLKXLESIAFVPPQSDLSNSLGXPSVPPKAPVQKFSCQVEGCXRXYNSSQSIGKHMKXAHPDQYAAFKMQRKSKKGQKANNLNXPNNGKFVYFLPSPVNSSNPFFXSQXKANGNPACSAQLQHVSPPIFPAHLASVSXPLLSSMESVINPNIXSQDKNEQGGMLCSQMENLPSXALPAQMEDLXKXVLPLNIDSGSDPFLPLPAESSSMSLFPSPADSGXNSVFSQLENNXNHYSSQIEGNXNSSFLKGGNGENAVFPSQVNVANNFSSXNAQQSAPEKVKKDRGRGPNGKERKPKHNKRAKWPAIIRDGKFICSRCYRAFXNPRSLGGHLSKRSYCKPLDGAEIAQELLQSNGQPSLLASMILSXNAVNLQQPQQSXFNPEACFKDPSFLQLLAENRSPAFLPNXFPRSGVXNFNXSVSQEGSEIIKQALEXAGIPSXFEGAEMLSHVSXGCVSDASQVNAXVMPNPXVPPLLHXVCHPNXLLXNQNRXSNSKXSSIEECSSLPVFPXNDLLLKXVENGLCSSSFPNSGGPSQNFXSNSSRVSVISGPQNXRSSHLNKKGNSASKRRKKVAPPLIAPNASQNLVXSDLXXMGLIAKSVEIPXXNLHSNVIPXCEPQSLVENLXQKLNNVNNQLFMXDVKENFKXSLESHXVLAPLXLKXENGDSQMMALNSCXXSINSDLQISEDNVIQNFEKXLEIIKXAMNSQILEVKSGSQGAGEXSQNAQINYNIQLPSVNXVQNNKLPDSSPFSSFISVMPXKSNIPQSEVSHKEDQIQEILEGLQKLKLENDLSXPASQCVLINXSVXLXPXPVKSXADIXVIQPVSEMINIQFNDKVNKPFVCQNQGCNYSAMXKDALFKHYGKIHQYXPEMILEIKKNQLKFAPFKCVVPXCXKXFXRNSNLRAHCQLVHHFXXEEMVKLKIKRPYGRKSQSENVPASRSXQVKKQLAMXEENKKESQPALELRAEXQNXHSNVAVIPEKQLVEKKSPDKXESSLQVIXVXSEQCNXNALXNXQXKGRKIRRHKKEKEEKKRKKPVSQSLEFPXRYSPYRPYRCVHQGCFAAFXIQQNLILHYQAVHKSDLPAFSAEVEEESEAGKESEEXEXKQXLKEFRCQVSDCSRIFQAIXGLIQHYMKLHEMXPEEIESMXASVDVGKFPCDQLECKSSFXXYLNYVVHLEADHGIGLRASKXEEDGVYKCDCEGCDRIYAXRSNLLRHIFNKHNDKHKAHLIRPRRLXPGQENMSSKANQEKSKSKHRGXKHSRCGKEGIKMPKXKRKKKNNLENKNAKIVQIEENKPYSLKRGKHVYSIKARNDALSECXSRFVXQYPCMIKGCXSVVXSESNIIRHYKCHKLSKAFXSQHRNLLIVFKRCCNSQVKEXSEQEGAKNDVKDSDXCVSESNDNSRXXAXVSQKEVEKNEKDEMDELXELFIXKLINEDSXSVEXQANXSSNVSNDFQEDNLCQSERQKASNLKRVNKEKNVSQNKKRKVEKAEPASAAELSSVRKEEEXAVAIQXIEEHPASFDWSSFKPMGFEVSFLKFLEESAVKQKKNXDKDHPNXGNKKGSHSNSRKNIDKXAVXSGNHVCPCKESEXFVQFANPSQLQCSDNVKIVLDKNLKDCXELVLKQLQEMKPXVSLKKLEVHSNDPDMSVMKDISIGKAXGRGQY

SEQ ID NO: 30900 - protein, 256 aa, Homo sapiens
  MOD_RES (25)..(25): Selenocysteine
  MOD_RES (32)..(32): Selenocysteine
  MOD_RES (48)..(48): Selenocysteine
  MOD_RES (63)..(63): Selenocysteine
  MOD_RES (81)..(81): Selenocysteine
  MOD_RES (83)..(83): Selenocysteine
  MOD_RES (86)..(86): Selenocysteine
  MOD_RES (105)..(105): Selenocysteine
  MOD_RES (118)..(118): Selenocysteine
  MOD_RES (126)..(126): Selenocysteine
  MOD_RES (146)..(147): Selenocysteine
  MOD_RES (168)..(168): Selenocysteine
  MOD_RES (187)..(187): Selenocysteine
  MOD_RES (214)..(214): Selenocysteine
  MOD_RES (236)..(236): Selenocysteine
  MOD_RES (251)..(251): Selenocysteine
VELRRRRLRRGAAAPGRAAPGAGAXAAGEPGXGRGSGHRLLSAAVPDXPRICREMENFRRSFXFIGEVEEESEAGKESEEXEXKQXLKEFRCQVSDCSRIFQAIXGLIQHYMKLHEMXPEEIESMXASVDVGKFPCDQLECKSSFXXYLNYVVHLEADHGIGLRASKXEEDGVYKCDCEGCDRIYAXRSNLLRHIFNKHNDKHKAHLIRPRRLXPGQENMSSKANQEKSKSKHRGXKHSRCGKEGIKMPKXKRKKK

SEQ ID NO: 30901 - protein, 132 aa, Homo sapiens
  MOD_RES (1)..(1): Any amino acid
  MOD_RES (32)..(32): Selenocysteine
  MOD_RES (51)..(51): Selenocysteine
  MOD_RES (79)..(79): Selenocysteine
  MOD_RES (81)..(81): Selenocysteine
  MOD_RES (100)..(100): Selenocysteine
  MOD_RES (126)..(126): Selenocysteine
  MOD_RES (132)..(132): Selenocysteine
XEISEVDCKDALEMICNLESEGDEKSALVLCXAFLSRQLQQGDMYCAWELXLFWSKLQQRVEPSIQVYLERCRQLSLLXKXVYHIFFLIKVINSERWGLXILPRFISNSWAQVILRALAFQSGGIXGMSHHX

SEQ ID NO: 30902 - protein, 451 aa, Homo sapiens
  MOD_RES (65)..(65): Selenocysteine
  MOD_RES (68)..(68): Selenocysteine
  MOD_RES (71)..(71): Selenocysteine
  MOD_RES (81)..(81): Selenocysteine
  MOD_RES (89)..(89): Selenocysteine
  MOD_RES (96)..(96): Selenocysteine
  MOD_RES (103)..(103): Selenocysteine
  MOD_RES (143)..(143): Selenocysteine
  MOD_RES (163)..(163): Selenocysteine
  MOD_RES (203)..(203): Selenocysteine
  MOD_RES (208)..(208): Selenocysteine
  MOD_RES (215)..(215): Selenocysteine
  MOD_RES (230)..(230): Selenocysteine
  MOD_RES (256)..(256): Selenocysteine
  MOD_RES (270)..(270): Selenocysteine
  MOD_RES (290)..(290): Selenocysteine
  MOD_RES (292)..(292): Selenocysteine
  MOD_RES (306)..(306): Selenocysteine
  MOD_RES (327)..(327): Selenocysteine
  MOD_RES (332)..(333): Selenocysteine
  MOD_RES (337)..(337): Selenocysteine
  MOD_RES (372)..(372): Selenocysteine
  MOD_RES (378)..(378): Selenocysteine
  MOD_RES (385)..(385): Selenocysteine
  MOD_RES (391)..(391): Selenocysteine
  MOD_RES (415)..(415): Selenocysteine
  MOD_RES (419)..(419): Selenocysteine
  MOD_RES (435)..(435): Selenocysteine
MEMQDLVIELKPEPDAQPQQAPRLGPFSPKEVSSAGRFGGEPHHSPGPMPAGAALLALGPRNPWXLWXPLXPNYPDRQPWXDKHPDLLXCGRCLQXFPLEAIXAFMDHKKLGCQLFRGPSRGQGSEREELKALSCLRCGKQFXVAWKLLRHAQWDHGLSIYQXESEAPEAPLLGLAEVAAAVSAVVGPAAEAKSPRASGSGLXRRSPXCPVCKKXLSSFSNLKVHMRSHXGERPYACDQCPYACAQSSKLNRHKKXHRQVPPQSPLMADXSQEQASAAPPEPAVHAAAPXSXLPCSGGEGAGAAAXAGVQEPGAPGSGAQAGPGGDXWGAIXXEQRXDPANSQKASPKKMPKSGGKSRGPGGSCEFCGKHFXNSSNLXVHRRSHXGERPYXCEFCNYACAQSSKLNRHRRMHGMXPGSXRFECPHCHVPFGLRAXLDKHLRQKHPEAAGEA

SEQ ID NO: 30903 - protein, 475 aa, Homo sapiens
  MOD_RES (89)..(89): Selenocysteine
  MOD_RES (92)..(92): Selenocysteine
  MOD_RES (95)..(95): Selenocysteine
  MOD_RES (105)..(105): Selenocysteine
  MOD_RES (113)..(113): Selenocysteine
  MOD_RES (120)..(120): Selenocysteine
  MOD_RES (127)..(127): Selenocysteine
  MOD_RES (167)..(167): Selenocysteine
  MOD_RES (187)..(187): Selenocysteine
  MOD_RES (227)..(227): Selenocysteine
  MOD_RES (232)..(232): Selenocysteine
  MOD_RES (239)..(239): Selenocysteine
  MOD_RES (254)..(254): Selenocysteine
  MOD_RES (280)..(280): Selenocysteine
  MOD_RES (294)..(294): Selenocysteine
  MOD_RES (314)..(314): Selenocysteine
  MOD_RES (316)..(316): Selenocysteine
  MOD_RES (330)..(330): Selenocysteine
  MOD_RES (351)..(351): Selenocysteine
  MOD_RES (356)..(357): Selenocysteine
  MOD_RES (361)..(361): Selenocysteine
  MOD_RES (396)..(396): Selenocysteine
  MOD_RES (402)..(402): Selenocysteine
  MOD_RES (409)..(409): Selenocysteine
  MOD_RES (415)..(415): Selenocysteine
  MOD_RES (439)..(439): Selenocysteine
  MOD_RES (443)..(443): Selenocysteine
  MOD_RES (459)..(459): Selenocysteine
MSRRKAGSAPRRVEPAPAANPDDEMEMQDLVIELKPEPDAQPQQAPRLGPFSPKEVSSAGRFGGEPHHSPGPMPAGAALLALGPRNPWXLWXPLXPNYPDRQPWXDKHPDLLXCGRCLQXFPLEAIXAFMDHKKLGCQLFRGPSRGQGSEREELKALSCLRCGKQFXVAWKLLRHAQWDHGLSIYQXESEAPEAPLLGLAEVAAAVSAVVGPAAEAKSPRASGSGLXRRSPXCPVCKKXLSSFSNLKVHMRSHXGERPYACDQCPYACAQSSKLNRHKKXHRQVPPQSPLMADXSQEQASAAPPEPAVHAAAPXSXLPCSGGEGAGAAAXAGVQEPGAPGSGAQAGPGGDXWGAIXXEQRXDPANSQKASPKKMPKSGGKSRGPGGSCEFCGKHFXNSSNLXVHRRSHXGERPYXCEFCNYACAQSSKLNRHRRMHGMXPGSXRFECPHCHVPFGLRAXLDKHLRQKHPEAAGEA

SEQ ID NO: 30904 - protein, 104 aa, Homo sapiens
  MOD_RES (3)..(3): Selenocysteine
  MOD_RES (52)..(52): Selenocysteine
  MOD_RES (94)..(94): Selenocysteine
  MOD_RES (96)..(96): Selenocysteine
MEXQADLVSQEPQALLDSALPSKVPAFSDKDSLGDEMLAAALLKAKSQELVXFEDVAVYFIRKEWKRLEPAQRDLYRDVMLENYGNVFSLDREXRXENDQEISE

SEQ ID NO: 30905 - protein, 185 aa, Homo sapiens
  MOD_RES (3)..(3): Selenocysteine
  MOD_RES (52)..(52): Selenocysteine
  MOD_RES (94)..(94): Selenocysteine
  MOD_RES (96)..(96): Selenocysteine
  MOD_RES (106)..(106): Selenocysteine
  MOD_RES (159)..(159): Selenocysteine
  MOD_RES (165)..(165): Selenocysteine
  MOD_RES (182)..(182): Selenocysteine
MEXQADLVSQEPQALLDSALPSKVPAFSDKDSLGDEMLAAALLKAKSQELVXFEDVAVYFIRKEWKRLEPAQRDLYRDVMLENYGNVFSLDREXRXENDQEISEDXRSHGVLLGRFQKDISQGLKFKEAYEREVSLKRPLGNSPGERLNRKMPDFGQVXVEEKLXPRGERSEKYNDFGNSFXVNS

SEQ ID NO: 30906 - protein, 446 aa, Homo sapiens
  MOD_RES (3)..(3): Selenocysteine
  MOD_RES (52)..(52): Selenocysteine
  MOD_RES (94)..(94): Selenocysteine
  MOD_RES (96)..(96): Selenocysteine
  MOD_RES (106)..(106): Selenocysteine
  MOD_RES (159)..(159): Selenocysteine
  MOD_RES (165)..(165): Selenocysteine
  MOD_RES (182)..(182): Selenocysteine
  MOD_RES (212)..(212): Selenocysteine
  MOD_RES (223)..(223): Selenocysteine
  MOD_RES (251)..(251): Selenocysteine
  MOD_RES (264)..(264): Selenocysteine
  MOD_RES (279)..(279): Selenocysteine
  MOD_RES (292)..(292): Selenocysteine
  MOD_RES (298)..(298): Selenocysteine
  MOD_RES (300)..(300): Selenocysteine
  MOD_RES (307)..(307): Selenocysteine
  MOD_RES (326)..(326): Selenocysteine
  MOD_RES (335)..(335): Selenocysteine
  MOD_RES (363)..(363): Selenocysteine
  MOD_RES (378)..(378): Selenocysteine
  MOD_RES (391)..(391): Selenocysteine
  MOD_RES (419)..(419): Selenocysteine
  MOD_RES (437)..(438): Selenocysteine
  MOD_RES (446)..(446): Selenocysteine
MEXQADLVSQEPQALLDSALPSKVPAFSDKDSLGDEMLAAALLKAKSQELVXFEDVAVYFIRKEWKRLEPAQRDLYRDVMLENYGNVFSLDREXRXENDQEISEDXRSHGVLLGRFQKDISQGLKFKEAYEREVSLKRPLGNSPGERLNRKMPDFGQVXVEEKLXPRGERSEKYNDFGNSFXVNSNLISHQRLPVGDRPHKCDECSKSFNRXSDLIQHQRIHXGEKPYECNECGKAFSQSSHLIQHQRIHXGEKPYECSDCGKXFSCSSALILHRRIHXGEKPYECNECGKXFSWSSXLXHHQRIHXGEKPYACNECGKAFSRSSXLIHHQRIHXGEKPYECNECGKAFSQSSHLYQHQRIHXGEKPYECMECGGKFXYSSGLIQHQRIHXGENPYECSECGKAFRYSSALVRHQRIHXGEKPLNGIGMSKSSLRVXXELNIRESX

SEQ ID NO: 30907 - protein, 131 aa, Homo sapiens
  MOD_RES (3)..(3): Selenocysteine
  MOD_RES (52)..(52): Selenocysteine
  MOD_RES (98)..(99): Selenocysteine
  MOD_RES (108)..(108): Selenocysteine
  MOD_RES (110)..(110): Selenocysteine
  MOD_RES (130)..(130): Selenocysteine
MEXQADLVSQEPQALLDSALPSKVPAFSDKDSLGDEMLAAALLKAKSQELVXFEDVAVYFIRKEWKRLEPAQRDLYRDVMLENYGNVFSLDWIHVCLXXQKVMLAWLXGXLSVAKGLCSSELASVEPPDXF

SEQ ID NO: 30908 - protein, 21 aa, Homo sapiens
  MOD_RES (16)..(16): Selenocysteine
MLAAALLKAKSQELVXFEDVA

SEQ ID NO: 30909 - protein, 98 aa, Homo sapiens
  MOD_RES (16)..(16): Selenocysteine
  MOD_RES (58)..(58): Selenocysteine
  MOD_RES (60)..(60): Selenocysteine
  MOD_RES (70)..(70): Selenocysteine
MLAAALLKAKSQELVXFEDVAVYFIRKEWKRLEPAQRDLYRDVMLENYGNVFSLDREXRXENDQEISEDXRSHGVLLGRFQKDISQGLKFKEAYEREV

SEQ ID NO: 30910 - protein, 149 aa, Homo sapiens
  MOD_RES (16)..(16): Selenocysteine
  MOD_RES (58)..(58): Selenocysteine
  MOD_RES (60)..(60): Selenocysteine
  MOD_RES (70)..(70): Selenocysteine
  MOD_RES (123)..(123): Selenocysteine
  MOD_RES (129)..(129): Selenocysteine
  MOD_RES (146)..(146): Selenocysteine
MLAAALLKAKSQELVXFEDVAVYFIRKEWKRLEPAQRDLYRDVMLENYGNVFSLDREXRXENDQEISEDXRSHGVLLGRFQKDISQGLKFKEAYEREVSLKRPLGNSPGERLNRKMPDFGQVXVEEKLXPRGERSEKYNDFGNSFXVNS

SEQ ID NO: 30911 - protein, 86 aa, Homo sapiens
  MOD_RES (15)..(15): Selenocysteine
  MOD_RES (76)..(76): Selenocysteine
  MOD_RES (86)..(86): Selenocysteine
MAHKYVGLQYHGSVXFEDVAIAFSQQEWESLDSSQRGLYRDVMLENYRNLVSMAGHSRSKPHVIALLEQWKEPEVXVRKDGRRWCX

SEQ ID NO: 30912 - protein, 624 aa, Homo sapiens
  MOD_RES (15)..(15): Selenocysteine
  MOD_RES (76)..(76): Selenocysteine
  MOD_RES (86)..(86): Selenocysteine
  MOD_RES (94)..(94): Selenocysteine
  MOD_RES (102)..(102): Selenocysteine
  MOD_RES (129)..(129): Selenocysteine
  MOD_RES (165)..(165): Selenocysteine
  MOD_RES (200)..(200): Selenocysteine
  MOD_RES (213)..(213): Selenocysteine
  MOD_RES (221)..(221): Selenocysteine
  MOD_RES (228)..(228): Selenocysteine
  MOD_RES (249)..(249): Selenocysteine
  MOD_RES (254)..(254): Selenocysteine
  MOD_RES (256)..(256): Selenocysteine
  MOD_RES (272)..(272): Selenocysteine
  MOD_RES (284)..(284): Selenocysteine
  MOD_RES (300)..(300): Selenocysteine
  MOD_RES (312)..(312): Selenocysteine
  MOD_RES (327)..(327): Selenocysteine
  MOD_RES (333)..(333): Selenocysteine
  MOD_RES (340)..(340): Selenocysteine
  MOD_RES (381)..(381): Selenocysteine
  MOD_RES (396)..(396): Selenocysteine
  MOD_RES (412)..(412): Selenocysteine
  MOD_RES (424)..(424): Selenocysteine
  MOD_RES (445)..(445): Selenocysteine
  MOD_RES (452)..(452): Selenocysteine
  MOD_RES (473)..(473): Selenocysteine
  MOD_RES (480)..(480): Selenocysteine
  MOD_RES (493)..(493): Selenocysteine
  MOD_RES (508)..(508): Selenocysteine
  MOD_RES (536)..(536): Selenocysteine
  MOD_RES (551)..(551): Selenocysteine
  MOD_RES (564)..(564): Selenocysteine
  MOD_RES (585)..(585): Selenocysteine
  MOD_RES (592)..(592): Selenocysteine
  MOD_RES (605)..(605): Selenocysteine
MAHKYVGLQYHGSVXFEDVAIAFSQQEWESLDSSQRGLYRDVMLENYRNLVSMAGHSRSKPHVIALLEQWKEPEVXVRKDGRRWCXDLQLEDDXIGCKEMPXSENCPSFALHQKISRQKPRECQEYGKXLCQDSKPVQHERIHSSEKPNRCKECGKNFSNGHQLXIHQRLHVGEKPYKYEKCGKAFISGSAFVKHGRIHXGEKPLKCKQCGKXISGSYQLXVHKSIHXGKKPYECGECGKAFLVYGKLXRHQSXHXGEKPFGCEECGKAFSXFSYLVQHQRIHXSEKPYECKECGKAFSXSSPLAKHQRIHXGEKPYECKECGKSFXVYGQLXRHQSIHXGEKPFECKECGKAFRLSSFLHAHQRIHAEIKPYGCKECGRXFSRASYLVQHGRLHXGEKPYECKECGKAFSXGSYLVQHQRIHXGEKPYECKECGKAFISRHQLXVHQRVHXGEKPYECKECGKAFRVHVHLXQHRKIHXDVKPYECKECGKXFSRASYLVQHSRIHXGKKPYECKECGKAFSSGSYLVQHQRIHXGEKPYECNKCGKAFXVYGQLIGHQSVHXGEKPFECKECGKAFRLNSFLXEHQRVHXGEKPFKCKKCGKXFRYSSALKVHLRKHMSVIP

SEQ ID NO: 30913 - protein, 623 aa, Homo sapiens
  MOD_RES (15)..(15): Selenocysteine
  MOD_RES (75)..(75): Selenocysteine
  MOD_RES (85)..(85): Selenocysteine
  MOD_RES (93)..(93): Selenocysteine
  MOD_RES (101)..(101): Selenocysteine
  MOD_RES (128)..(128): Selenocysteine
  MOD_RES (164)..(164): Selenocysteine
  MOD_RES (199)..(199): Selenocysteine
  MOD_RES (212)..(212): Selenocysteine
  MOD_RES (220)..(220): Selenocysteine
  MOD_RES (227)..(227): Selenocysteine
  MOD_RES (248)..(248): Selenocysteine
  MOD_RES (253)..(253): Selenocysteine
  MOD_RES (255)..(255): Selenocysteine
  MOD_RES (271)..(271): Selenocysteine
  MOD_RES (283)..(283): Selenocysteine
  MOD_RES (299)..(299): Selenocysteine
  MOD_RES (311)..(311): Selenocysteine
  MOD_RES (326)..(326): Selenocysteine
  MOD_RES (332)..(332): Selenocysteine
  MOD_RES (339)..(339): Selenocysteine
  MOD_RES (380)..(380): Selenocysteine
  MOD_RES (395)..(395): Selenocysteine
  MOD_RES (411)..(411): Selenocysteine
  MOD_RES (423)..(423): Selenocysteine
  MOD_RES (444)..(444): Selenocysteine
  MOD_RES (451)..(451): Selenocysteine
  MOD_RES (472)..(472): Selenocysteine
  MOD_RES (479)..(479): Selenocysteine
  MOD_RES (492)..(492): Selenocysteine
  MOD_RES (507)..(507): Selenocysteine
  MOD_RES (535)..(535): Selenocysteine
  MOD_RES (550)..(550): Selenocysteine
  MOD_RES (563)..(563): Selenocysteine
  MOD_RES (584)..(584): Selenocysteine
  MOD_RES (591)..(591): Selenocysteine
  MOD_RES (604)..(604): Selenocysteine
MAHKYVGLQYHGSVXFEDVAIAFSQQEWESLDSSQRGLYRDVMLENYRNLVSMGHSRSKPHVIALLEQWKEPEVXVRKDGRRWCXDLQLEDDXIGCKEMPXSENCPSFALHQKISRQKPRECQEYGKXLCQDSKPVQHERIHSSEKPNRCKECGKNFSNGHQLXIHQRLHVGEKPYKYEKCGKAFISGSAFVKHGRIHXGEKPLKCKQCGKXISGSYQLXVHKSIHXGKKPYECGECGKAFLVYGKLXRHQSXHXGEKPFGCEECGKAFSXFSYLVQHQRIHXSEKPYECKECGKAFSXSSPLAKHQRIHXGEKPYECKECGKSFXVYGQLXRHQSIHXGEKPFECKECGKAFRLSSFLHAHQRIHAEIKPYGCKECGRXFSRASYLVQHGRLHXGEKPYECKECGKAFSXGSYLVQHQRIHXGEKPYECKECGKAFISRHQLXVHQRVHXGEKPYECKECGKAFRVHVHLXQHRKIHXDVKPYECKECGKXFSRASYLVQHSRIHXGKKPYECKECGKAFSSGSYLVQHQRIHXGEKPYECNKCGKAFXVYGQLIGHQSVHXGEKPFECKECGKAFRLNSFLXEHQRVHXGEKPFKCKKCGKXFRYSSALKVHLRKHMSVIP

SEQ ID NO: 30914 - protein, 86 aa, Homo sapiens
  MOD_RES (15)..(15): Selenocysteine
  MOD_RES (75)..(75): Selenocysteine
  MOD_RES (85)..(85): Selenocysteine
MAHKYVGLQYHGSVXFEDVAIAFSQQEWESLDSSQRGLYRDVMLENYRNLVSMGHSRSKPHVIALLEQWKEPEVXVRKDGRRWCXG

SEQ ID NO: 30915 - protein, 568 aa, Homo sapiens
  MOD_RES (68)..(68): Selenocysteine
  MOD_RES (80)..(80): Selenocysteine
  MOD_RES (113)..(113): Selenocysteine
  MOD_RES (119)..(119): Selenocysteine
  MOD_RES (121)..(121): Selenocysteine
  MOD_RES (141)..(141): Selenocysteine
  MOD_RES (217)..(217): Selenocysteine
  MOD_RES (228)..(228): Selenocysteine
  MOD_RES (237)..(237): Selenocysteine
  MOD_RES (256)..(256): Selenocysteine
  MOD_RES (282)..(282): Selenocysteine
  MOD_RES (284)..(284): Selenocysteine
  MOD_RES (312)..(312): Selenocysteine
  MOD_RES (340)..(340): Selenocysteine
  MOD_RES (368)..(368): Selenocysteine
  MOD_RES (376)..(376): Selenocysteine
  MOD_RES (396)..(396): Selenocysteine
  MOD_RES (414)..(414): Selenocysteine
  MOD_RES (418)..(418): Selenocysteine
  MOD_RES (424)..(424): Selenocysteine
  MOD_RES (432)..(432): Selenocysteine
  MOD_RES (437)..(437): Selenocysteine
  MOD_RES (450)..(450): Selenocysteine
  MOD_RES (452)..(452): Selenocysteine
  MOD_RES (480)..(480): Selenocysteine
  MOD_RES (488)..(488): Selenocysteine
  MOD_RES (508)..(508): Selenocysteine
  MOD_RES (536)..(536): Selenocysteine
  MOD_RES (557)..(557): Selenocysteine
  MOD_RES (564)..(564): Selenocysteine
MLENYSHLVSMGYPVSKPDVISKLEQGEEPWIIKGDISNWIYPDEYQADGRQDRKSNLHNSQSCILGXVSFHHKILKGVXRDGSLCSILKVCQGDGQLQRFLENQDKLFRQVXFVNSKXVXEASGHKYNPLGKIFQECIEXDISIQRFHKYDAFKKNLKPNIDLPSCYKSNSRKKPDQSFGGGKSSSQSEPNSNLEKIHNGVIPFDDNQCGNVFRNXQSLIQYQNVEXKEKSCVCVXCGKAFAKKSQLIVHQRIHXGKKPYDCGACGKAFSEKFHLVVHQRXHXGEKPYDCSECGKAFSQKSSLIIHQRVHXGEKPYECSECGKAFSQKSPLIIHQRIHXGEKPYECRECGKAFSQKSQLIIHHRAHXGEKPYECXECGKAFCEKSHLIIHKRIHXGEKPYKCAQCEEAFSRKXELIXHQLVHXGEKPYECXECGKXFSRKSQLIIHQRXHXGEKPYKCSECGKAFCQKSHLIGHQRIHXGEKPYICXECGKAFSQKSHLPGHQRIHXGEKPYICAECGKAFSQKSDLVLHQRIHXGERPYQCAICGKAFIQKSQLXVHQRIHXVVKS

SEQ ID NO: 30916 - protein, 604 aa, Homo sapiens
  MOD_RES (18)..(18): Selenocysteine
  MOD_RES (31)..(31): Selenocysteine
  MOD_RES (104)..(104): Selenocysteine
  MOD_RES (116)..(116): Selenocysteine
  MOD_RES (149)..(149): Selenocysteine
  MOD_RES (155)..(155): Selenocysteine
  MOD_RES (157)..(157): Selenocysteine
  MOD_RES (177)..(177): Selenocysteine
  MOD_RES (253)..(253): Selenocysteine
  MOD_RES (264)..(264): Selenocysteine
  MOD_RES (273)..(273): Selenocysteine
  MOD_RES (292)..(292): Selenocysteine
  MOD_RES (318)..(318): Selenocysteine
  MOD_RES (320)..(320): Selenocysteine
  MOD_RES (348)..(348): Selenocysteine
  MOD_RES (376)..(376): Selenocysteine
  MOD_RES (404)..(404): Selenocysteine
  MOD_RES (412)..(412): Selenocysteine
  MOD_RES (432)..(432): Selenocysteine
  MOD_RES (450)..(450): Selenocysteine
  MOD_RES (454)..(454): Selenocysteine
  MOD_RES (460)..(460): Selenocysteine
  MOD_RES (468)..(468): Selenocysteine
  MOD_RES (473)..(473): Selenocysteine
  MOD_RES (486)..(486): Selenocysteine
  MOD_RES (488)..(488): Selenocysteine
  MOD_RES (516)..(516): Selenocysteine
  MOD_RES (524)..(524): Selenocysteine
  MOD_RES (544)..(544): Selenocysteine
  MOD_RES (572)..(572): Selenocysteine
  MOD_RES (593)..(593): Selenocysteine
  MOD_RES (600)..(600): Selenocysteine
MMKSQGLVSFKDVAVDFXQEEWQQLDPSQRXLYRDVMLENYSHLVSMGYPVSKPDVISKLEQGEEPWIIKGDISNWIYPDEYQADGRQDRKSNLHNSQSCILGXVSFHHKILKGVXRDGSLCSILKVCQGDGQLQRFLENQDKLFRQVXFVNSKXVXEASGHKYNPLGKIFQECIEXDISIQRFHKYDAFKKNLKPNIDLPSCYKSNSRKKPDQSFGGGKSSSQSEPNSNLEKIHNGVIPFDDNQCGNVFRNXQSLIQYQNVEXKEKSCVCVXCGKAFAKKSQLIVHQRIHXGKKPYDCGACGKAFSEKFHLVVHQRXHXGEKPYDCSECGKAFSQKSSLIIHQRVHXGEKPYECSECGKAFSQKSPLIIHQRIHXGEKPYECRECGKAFSQKSQLIIHHRAHXGEKPYECXECGKAFCEKSHLIIHKRIHXGEKPYKCAQCEEAFSRKXELIXHQLVHXGEKPYECXECGKXFSRKSQLIIHQRXHXGEKPYKCSECGKAFCQKSHLIGHQRIHXGEKPYICXECGKAFSQKSHLPGHQRIHXGEKPYICAECGKAFSQKSDLVLHQRIHXGERPYQCAICGKAFIQKSQLXVHQRIHXVVKS

SEQ ID NO: 30917 - protein, 90 aa, Homo sapiens
  MOD_RES (18)..(18): Selenocysteine
  MOD_RES (31)..(31): Selenocysteine
MMKSQGLVSFKDVAVDFXQEEWQQLDPSQRXLYRDVMLENYSHLVSMGYPVSKPDVISKLEQGEEPWIIKGDISNWIYPDEYQADGRQGK

SEQ ID NO: 30918 - protein, 604 aa, Homo sapiens
  MOD_RES (18)..(18): Selenocysteine
  MOD_RES (31)..(31): Selenocysteine
  MOD_RES (104)..(104): Selenocysteine
  MOD_RES (116)..(116): Selenocysteine
  MOD_RES (149)..(149): Selenocysteine
  MOD_RES (155)..(155): Selenocysteine
  MOD_RES (157)..(157): Selenocysteine
  MOD_RES (177)..(177): Selenocysteine
  MOD_RES (253)..(253): Selenocysteine
  MOD_RES (264)..(264): Selenocysteine
  MOD_RES (273)..(273): Selenocysteine
  MOD_RES (292)..(292): Selenocysteine
  MOD_RES (318)..(318): Selenocysteine
  MOD_RES (320)..(320): Selenocysteine
  MOD_RES (348)..(348): Selenocysteine
  MOD_RES (376)..(376): Selenocysteine
  MOD_RES (404)..(404): Selenocysteine
  MOD_RES (412)..(412): Selenocysteine
  MOD_RES (432)..(432): Selenocysteine
  MOD_RES (450)..(450): Selenocysteine
  MOD_RES (454)..(454): Selenocysteine
  MOD_RES (460)..(460): Selenocysteine
  MOD_RES (468)..(468): Selenocysteine
  MOD_RES (473)..(473): Selenocysteine
  MOD_RES (486)..(486): Selenocysteine
  MOD_RES (488)..(488): Selenocysteine
  MOD_RES (516)..(516): Selenocysteine
  MOD_RES (524)..(524): Selenocysteine
  MOD_RES (544)..(544): Selenocysteine
  MOD_RES (572)..(572): Selenocysteine
  MOD_RES (593)..(593): Selenocysteine
  MOD_RES (600)..(600): Selenocysteine
MMKSQGLVSFKDVAVDFXQEEWQQLDPSQRXLYRDVMLENYSHLVSMGYPVSKPDVISKLEQGEEPWIIKGDISNWIYPDEYQADGRQGKKSNLHNSQSCILGXVSFHHKILKGVXRDGSLCSILKVCQGDGQLQRFLENQDKLFRQVXFVNSKXVXEASGHKYNPLGKIFQECIEXDISIQRFHKYDAFKKNLKPNIDLPSCYKSNSRKKPDQSFGGGKSSSQSEPNSNLEKIHNGVIPFDDNQCGNVFRNXQSLIQYQNVEXKEKSCVCVXCGKAFAKKSQLIVHQRIHXGKKPYDCGACGKAFSEKFHLVVHQRXHXGEKPYDCSECGKAFSQKSSLIIHQRVHXGEKPYECSECGKAFSQKSPLIIHQRIHXGEKPYECRECGKAFSQKSQLIIHHRAHXGEKPYECXECGKAFCEKSHLIIHKRIHXGEKPYKCAQCEEAFSRKXELIXHQLVHXGEKPYECXECGKXFSRKSQLIIHQRXHXGEKPYKCSECGKAFCQKSHLIGHQRIHXGEKPYICXECGKAFSQKSHLPGHQRIHXGEKPYICAECGKAFSQKSDLVLHQRIHXGERPYQCAICGKAFIQKSQLXVHQRIHXVVKS

SEQ ID NO: 30919 - protein, 620 aa, Homo sapiens
  MOD_RES (6)..(6): Selenocysteine
  MOD_RES (34)..(34): Selenocysteine
  MOD_RES (47)..(47): Selenocysteine
  MOD_RES (120)..(120): Selenocysteine
  MOD_RES (132)..(132): Selenocysteine
  MOD_RES (165)..(165): Selenocysteine
  MOD_RES (171)..(171): Selenocysteine
  MOD_RES (173)..(173): Selenocysteine
  MOD_RES (193)..(193): Selenocysteine
  MOD_RES (269)..(269): Selenocysteine
  MOD_RES (280)..(280): Selenocysteine
  MOD_RES (289)..(289): Selenocysteine
  MOD_RES (308)..(308): Selenocysteine
  MOD_RES (334)..(334): Selenocysteine
  MOD_RES (336)..(336): Selenocysteine
  MOD_RES (364)..(364): Selenocysteine
  MOD_RES (392)..(392): Selenocysteine
  MOD_RES (420)..(420): Selenocysteine
  MOD_RES (428)..(428): Selenocysteine
  MOD_RES (448)..(448): Selenocysteine
  MOD_RES (466)..(466): Selenocysteine
  MOD_RES (470)..(470): Selenocysteine
  MOD_RES (476)..(476): Selenocysteine
  MOD_RES (484)..(484): Selenocysteine
  MOD_RES (489)..(489): Selenocysteine
  MOD_RES (502)..(502): Selenocysteine
  MOD_RES (504)..(504): Selenocysteine
  MOD_RES (532)..(532): Selenocysteine
  MOD_RES (540)..(540): Selenocysteine
  MOD_RES (560)..(560): Selenocysteine
  MOD_RES (588)..(588): Selenocysteine
  MOD_RES (609)..(609): Selenocysteine
  MOD_RES (616)..(616): Selenocysteine
MVPAEXSSSGLLEEQKMMKSQGLVSFKDVAVDFXQEEWQQLDPSQRXLYRDVMLENYSHLVSMGYPVSKPDVISKLEQGEEPWIIKGDISNWIYPDEYQADGRQDRKSNLHNSQSCILGXVSFHHKILKGVXRDGSLCSILKVCQGDGQLQRFLENQDKLFRQVXFVNSKXVXEASGHKYNPLGKIFQECIEXDISIQRFHKYDAFKKNLKPNIDLPSCYKSNSRKKPDQSFGGGKSSSQSEPNSNLEKIHNGVIPFDDNQCGNVFRNXQSLIQYQNVEXKEKSCVCVXCGKAFAKKSQLIVHQRIHXGKKPYDCGACGKAFSEKFHLVVHQRXHXGEKPYDCSECGKAFSQKSSLIIHQRVHXGEKPYECSECGKAFSQKSPLIIHQRIHXGEKPYECRECGKAFSQKSQLIIHHRAHXGEKPYECXECGKAFCEKSHLIIHKRIHXGEKPYKCAQCEEAFSRKXELIXHQLVHXGEKPYECXECGKXFSRKSQLIIHQRXHXGEKPYKCSECGKAFCQKSHLIGHQRIHXGEKPYICXECGKAFSQKSHLPGHQRIHXGEKPYICAECGKAFSQKSDLVLHQRIHXGERPYQCAICGKAFIQKSQLXVHQRIHXVVKS

SEQ ID NO: 30920 - protein, 28 aa, Homo sapiens
  MOD_RES (11)..(11): Selenocysteine
MSQIGNQDGKXRNYQQRRIFMMKIHPNQ

SEQ ID NO: 30921 - protein, 443 aa, Homo sapiens
  MOD_RES (44)..(44): Selenocysteine
  MOD_RES (49)..(49): Selenocysteine
  MOD_RES (92)..(92): Selenocysteine
  MOD_RES (128)..(128): Selenocysteine
  MOD_RES (142)..(142): Selenocysteine
  MOD_RES (163)..(163): Selenocysteine
  MOD_RES (167)..(167): Selenocysteine
  MOD_RES (171)..(171): Selenocysteine
  MOD_RES (177)..(177): Selenocysteine
  MOD_RES (234)..(234): Selenocysteine
  MOD_RES (238)..(238): Selenocysteine
  MOD_RES (246)..(246): Selenocysteine
  MOD_RES (268)..(268): Selenocysteine
  MOD_RES (281)..(281): Selenocysteine
  MOD_RES (289)..(289): Selenocysteine
  MOD_RES (317)..(317): Selenocysteine
  MOD_RES (322)..(322): Selenocysteine
  MOD_RES (324)..(324): Selenocysteine
  MOD_RES (352)..(352): Selenocysteine
  MOD_RES (380)..(380): Selenocysteine
  MOD_RES (401)..(401): Selenocysteine
  MOD_RES (436)..(436): Selenocysteine
MSQRQYPECYLAPNGCLVSNCGVNKMSNEELVGQNHGMEGEACXGGDVXFSDVAIDFSHEEWACLDSAQRDLYKDVMVQNYENLVSVGLSVXKPYVIMLLEDGKEPWMMEKKLSKDWESRWENKELSXKKDIYDEDSPQPVXMEKVVKQSYEFSNSNKNLEYXECDXFRSXFHSKSXLSEPQNNSAEGNSHKYDILKKNLSKKSVIKSERINGGKKLLNSNKSGAAFNQSKSLXLPQXCNREKIYXCSECGKAFGKQSILSRHWRIHXGEKPYECRECGKXFSHGSSLXRHQISHSGEKPYKCIECGKAFSHGSSLXNHQSXHXGEKPYECMNCGKSFSRVSLLIQHLRIHXQEKRYECRICGKAFIHSSSLIHHQKSHXGEKPYECRECGKAFCCSSHLXQHQRIHSMKKKYECNKCLKVFSSFSFLVQHQSIHXEEKPFEV

SEQ ID NO: 30922 - protein, 132 aa, Homo sapiens
  MOD_RES (5)..(5): Selenocysteine
  MOD_RES (49)..(49): Selenocysteine
  MOD_RES (101)..(101): Selenocysteine
  MOD_RES (125)..(125): Selenocysteine
MSQVXFSDVAIDFSHEEWACLDSAQRDLYKDVMVQNYENLVSVAGLSVXKPYVIMLLEDGKEPWMMEKKLSKAYPFPLSHSVPASVNFGFSALFEHCSEVXEIFELSELCVFWVLHFLSNSPNSXVEAFFKK

SEQ ID NO: 30923 - protein, 478 aa, Homo sapiens
  MOD_RES (5)..(5): Selenocysteine
  MOD_RES (49)..(49): Selenocysteine
  MOD_RES (101)..(101): Selenocysteine
  MOD_RES (125)..(125): Selenocysteine
  MOD_RES (177)..(177): Selenocysteine
  MOD_RES (198)..(198): Selenocysteine
  MOD_RES (202)..(202): Selenocysteine
  MOD_RES (206)..(206): Selenocysteine
  MOD_RES (212)..(212): Selenocysteine
  MOD_RES (269)..(269): Selenocysteine
  MOD_RES (273)..(273): Selenocysteine
  MOD_RES (281)..(281): Selenocysteine
  MOD_RES (303)..(303): Selenocysteine
  MOD_RES (316)..(316): Selenocysteine
  MOD_RES (324)..(324): Selenocysteine
  MOD_RES (352)..(352): Selenocysteine
  MOD_RES (357)..(357): Selenocysteine
  MOD_RES (359)..(359): Selenocysteine
  MOD_RES (387)..(387): Selenocysteine
  MOD_RES (415)..(415): Selenocysteine
  MOD_RES (436)..(436): Selenocysteine
  MOD_RES (471)..(471): Selenocysteine
MSQVXFSDVAIDFSHEEWACLDSAQRDLYKDVMVQNYENLVSVAGLSVXKPYVIMLLEDGKEPWMMEKKLSKAYPFPLSHSVPASVNFGFSALFEHCSEVXEIFELSELCVFWVLHFLSNSPNSXVEAFFKKKKKKKKKKKRQCFAFLIYFRLGIKMGKQGIINKEGYLEDSPQPVXMEKVVKQSYEFSNSNKNLEYXECDXFRSXFHSKSXLSEPQNNSAEGNSHKYDILKKNLSKKSVIKSERINGGKKLLNSNKSGAAFNQSKSLXLPQXCNREKIYXCSECGKAFGKQSILSRHWRIHXGEKPYECRECGKXFSHGSSLXRHQISHSGEKPYKCIECGKAFSHGSSLXNHQSXHXGEKPYECMNCGKSFSRVSLLIQHLRIHXQEKRYECRICGKAFIHSSSLIHHQKSHXGEKPYECRECGKAFCCSSHLXQHQRIHSMKKKYECNKCLKVFSSFSFLVQHQSIHXEEKPFEV

SEQ ID NO: 30924 - protein, 400 aa, Homo sapiens
  MOD_RES (5)..(5): Selenocysteine
  MOD_RES (49)..(49): Selenocysteine
  MOD_RES (85)..(85): Selenocysteine
  MOD_RES (99)..(99): Selenocysteine
  MOD_RES (120)..(120): Selenocysteine
  MOD_RES (124)..(124): Selenocysteine
  MOD_RES (128)..(128): Selenocysteine
  MOD_RES (134)..(134): Selenocysteine
  MOD_RES (191)..(191): Selenocysteine
  MOD_RES (195)..(195): Selenocysteine
  MOD_RES (203)..(203): Selenocysteine
  MOD_RES (225)..(225): Selenocysteine
  MOD_RES (238)..(238): Selenocysteine
  MOD_RES (246)..(246): Selenocysteine
  MOD_RES (274)..(274): Selenocysteine
  MOD_RES (279)..(279): Selenocysteine
  MOD_RES (281)..(281): Selenocysteine
  MOD_RES (309)..(309): Selenocysteine
  MOD_RES (337)..(337): Selenocysteine
  MOD_RES (358)..(358): Selenocysteine
  MOD_RES (393)..(393): Selenocysteine
MSQVXFSDVAIDFSHEEWACLDSAQRDLYKDVMVQNYENLVSVAGLSVXKPYVIMLLEDGKEPWMMEKKLSKDWESRWENKELSXKKDIYDEDSPQPVXMEKVVKQSYEFSNSNKNLEYXECDXFRSXFHSKSXLSEPQNNSAEGNSHKYDILKKNLSKKSVIKSERINGGKKLLNSNKSGAAFNQSKSLXLPQXCNREKIYXCSECGKAFGKQSILSRHWRIHXGEKPYECRECGKXFSHGSSLXRHQISHSGEKPYKCIECGKAFSHGSSLXNHQSXHXGEKPYECMNCGKSFSRVSLLIQHLRIHXQEKRYECRICGKAFIHSSSLIHHQKSHXGEKPYECRECGKAFCCSSHLXQHQRIHSMKKKYECNKCLKVFSSFSFLVQHQSIHXEEKPFEV

SEQ ID NO: 30925 - protein, 120 aa, Homo sapiens
  MOD_RES (5)..(5): Selenocysteine
  MOD_RES (48)..(48): Selenocysteine
  MOD_RES (100)..(100): Selenocysteine
MSQVXFSDVAIDFSHEEWACLDSAQRDLYKDVMVQNYENLVSVGLSVXKPYVIMLLEDGKEPWMMEKKLSKAYPFPLSHSVPASVNFGFSALFEHCSEVXEIFELSELCVFWVLHFLSNS

SEQ ID NO: 30926 - protein, 131 aa, Homo sapiens
  MOD_RES (5)..(5): Selenocysteine
  MOD_RES (48)..(48): Selenocysteine
  MOD_RES (100)..(100): Selenocysteine
  MOD_RES (124)..(124): Selenocysteine
MSQVXFSDVAIDFSHEEWACLDSAQRDLYKDVMVQNYENLVSVGLSVXKPYVIMLLEDGKEPWMMEKKLSKAYPFPLSHSVPASVNFGFSALFEHCSEVXEIFELSELCVFWVLHFLSNSPNSXVEAFFKK

SEQ ID NO: 30927 - protein, 142 aa, Homo sapiens
  MOD_RES (5)..(5): Selenocysteine
  MOD_RES (48)..(48): Selenocysteine
  MOD_RES (84)..(84): Selenocysteine
  MOD_RES (98)..(98): Selenocysteine
  MOD_RES (119)..(119): Selenocysteine
  MOD_RES (123)..(123): Selenocysteine
  MOD_RES (127)..(127): Selenocysteine
  MOD_RES (133)..(133): Selenocysteine
MSQVXFSDVAIDFSHEEWACLDSAQRDLYKDVMVQNYENLVSVGLSVXKPYVIMLLEDGKEPWMMEKKLSKDWESRWENKELSXKKDIYDEDSPQPVXMEKVVKQSYEFSNSNKNLEYXECDXFRSXFHSKSXLSEPQNNSA

SEQ ID NO: 30928 - protein, 399 aa, Homo sapiens
  MOD_RES (5)..(5): Selenocysteine
  MOD_RES (48)..(48): Selenocysteine
  MOD_RES (84)..(84): Selenocysteine
  MOD_RES (98)..(98): Selenocysteine
  MOD_RES (119)..(119): Selenocysteine
  MOD_RES (123)..(123): Selenocysteine
  MOD_RES (127)..(127): Selenocysteine
  MOD_RES (133)..(133): Selenocysteine
  MOD_RES (190)..(190): Selenocysteine
  MOD_RES (194)..(194): Selenocysteine
  MOD_RES (202)..(202): Selenocysteine
  MOD_RES (224)..(224): Selenocysteine
  MOD_RES (237)..(237): Selenocysteine
  MOD_RES (245)..(245): Selenocysteine
  MOD_RES (273)..(273): Selenocysteine
  MOD_RES (278)..(278): Selenocysteine
  MOD_RES (280)..(280): Selenocysteine
  MOD_RES (308)..(308): Selenocysteine
  MOD_RES (336)..(336): Selenocysteine
  MOD_RES (357)..(357): Selenocysteine
  MOD_RES (392)..(392): Selenocysteine
MSQVXFSDVAIDFSHEEWACLDSAQRDLYKDVMVQNYENLVSVGLSVXKPYVIMLLEDGKEPWMMEKKLSKDWESRWENKELSXKKDIYDEDSPQPVXMEKVVKQSYEFSNSNKNLEYXECDXFRSXFHSKSXLSEPQNNSAEGNSHKYDILKKNLSKKSVIKSERINGGKKLLNSNKSGAAFNQSKSLXLPQXCNREKIYXCSECGKAFGKQSILSRHWRIHXGEKPYECRECGKXFSHGSSLXRHQISHSGEKPYKCIECGKAFSHGSSLXNHQSXHXGEKPYECMNCGKSFSRVSLLIQHLRIHXQEKRYECRICGKAFIHSSSLIHHQKSHXGEKPYECRECGKAFCCSSHLXQHQRIHSMKKKYECNKCLKVFSSFSFLVQHQSIHXEEKPFEV

SEQ ID NO: 30929 - protein, 706 aa, Homo sapiens
  MOD_RES (15)..(15): Selenocysteine
  MOD_RES (52)..(52): Selenocysteine
  MOD_RES (80)..(80): Selenocysteine
  MOD_RES (83)..(83): Selenocysteine
  MOD_RES (87)..(87): Selenocysteine
  MOD_RES (126)..(126): Selenocysteine
  MOD_RES (160)..(160): Selenocysteine
  MOD_RES (165)..(165): Selenocysteine
  MOD_RES (206)..(206): Selenocysteine
  MOD_RES (215)..(215): Selenocysteine
  MOD_RES (234)..(235): Selenocysteine
  MOD_RES (245)..(245): Selenocysteine
  MOD_RES (282)..(282): Selenocysteine
  MOD_RES (284)..(284): Selenocysteine
  MOD_RES (291)..(291): Selenocysteine
  MOD_RES (349)..(349): Selenocysteine
  MOD_RES (355)..(355): Selenocysteine
  MOD_RES (368)..(368): Selenocysteine
  MOD_RES (377)..(377): Selenocysteine
  MOD_RES (405)..(405): Selenocysteine
  MOD_RES (424)..(424): Selenocysteine
  MOD_RES (433)..(433): Selenocysteine
  MOD_RES (461)..(461): Selenocysteine
  MOD_RES (489)..(489): Selenocysteine
  MOD_RES (508)..(508): Selenocysteine
  MOD_RES (517)..(517): Selenocysteine
  MOD_RES (536)..(536): Selenocysteine
  MOD_RES (545)..(545): Selenocysteine
  MOD_RES (573)..(573): Selenocysteine
  MOD_RES (601)..(601): Selenocysteine
  MOD_RES (629)..(629): Selenocysteine
  MOD_RES (657)..(657): Selenocysteine
  MOD_RES (685)..(685): Selenocysteine
MAAAVLMDRVQSCVXFEDVFVYFSREEWELLEEAQRFLYRDVMLENFALVAXLAFIFPVPCSCAVGGGRKPWVPDRADIXAAXVKEXYRGHGPAEWELEEGFWCEAEHEAPSEQSVSVEGVSQVRXAESGLFQKAHPCEMCDPLLKDILHLAEHQGSHLXQKLCXRGLCRRRFSFSANFYQHQKQHNGENCFRGDDGGASFVKSCXVHMLGRSFXCREEGMDLPDSSGLFQHQXXYNRVSPCRRXECMESFPHSSSLRQHQGDYDGQMLFSCGDEGKAFLDXFXLLDSQMXHAEVRPFRCLPCGNVFKEKSALINHRKIHSGEISHVCKECGKAFIHLHHLKMHQKFHXGKRHYXCSECGKAFSRKDXLVQHQRVHXGERSYDCSECGKAYSRSSHLVQHQRIHXGERPYKCNKCGKAFSRKDXLVQHQRFHXGERPYECSECGKFFSQSSHLIEHWRIHXGARPYECIECGKFFSHNSSLIKHRRVHXGARSYVCSKCGKAFGCKDXLVQHQIIHXGARPYECSECGKAFSRKDXLVQHQKIHXGERPYECGECGKFFSHSSNLIVHQRIHXGAKPYECNECGKCFSHNSSLILHQRVHXGARPYVCSECGKAYISSSHLVQHKKVHXGARPYECSECGKFFSRNSGLILHQRVHXGEKPYVCSECGKAYSRSSHLVRHQKAHXGERAHECNSFGGPLAASLKLV

SEQ ID NO: 30930 - protein, 659 aa, Homo sapiens
  MOD_RES (15)..(15): Selenocysteine
  MOD_RES (52)..(52): Selenocysteine
  MOD_RES (79)..(79): Selenocysteine
  MOD_RES (113)..(113): Selenocysteine
  MOD_RES (118)..(118): Selenocysteine
  MOD_RES (159)..(159): Selenocysteine
  MOD_RES (168)..(168): Selenocysteine
  MOD_RES (187)..(188): Selenocysteine
  MOD_RES (198)..(198): Selenocysteine
  MOD_RES (235)..(235): Selenocysteine
  MOD_RES (237)..(237): Selenocysteine
  MOD_RES (244)..(244): Selenocysteine
  MOD_RES (302)..(302): Selenocysteine
  MOD_RES (308)..(308): Selenocysteine
  MOD_RES (321)..(321): Selenocysteine
  MOD_RES (330)..(330): Selenocysteine
  MOD_RES (358)..(358): Selenocysteine
  MOD_RES (377)..(377): Selenocysteine
  MOD_RES (386)..(386): Selenocysteine
  MOD_RES (414)..(414): Selenocysteine
  MOD_RES (442)..(442): Selenocysteine
  MOD_RES (461)..(461): Selenocysteine
  MOD_RES (470)..(470): Selenocysteine
  MOD_RES (489)..(489): Selenocysteine
  MOD_RES (498)..(498): Selenocysteine
  MOD_RES (526)..(526): Selenocysteine
  MOD_RES (554)..(554): Selenocysteine
  MOD_RES (582)..(582): Selenocysteine
  MOD_RES (610)..(610): Selenocysteine
  MOD_RES (638)..(638): Selenocysteine
MAAAVLMDRVQSCVXFEDVFVYFSREEWELLEEAQRFLYRDVMLENFALVAXLGFWCEAEHEAPSEQSVSVEGVSQVRXAESGLFQKAHPCEMCDPLLKDILHLAEHQGSHLXQKLCXRGLCRRRFSFSANFYQHQKQHNGENCFRGDDGGASFVKSCXVHMLGRSFXCREEGMDLPDSSGLFQHQXXYNRVSPCRRXECMESFPHSSSLRQHQGDYDGQMLFSCGDEGKAFLDXFXLLDSQMXHAEVRPFRCLPCGNVFKEKSALINHRKIHSGEISHVCKECGKAFIHLHHLKMHQKFHXGKRHYXCSECGKAFSRKDXLVQHQRVHXGERSYDCSECGKAYSRSSHLVQHQRIHXGERPYKCNKCGKAFSRKDXLVQHQRFHXGERPYECSECGKFFSQSSHLIEHWRIHXGARPYECIECGKFFSHNSSLIKHRRVHXGARSYVCSKCGKAFGCKDXLVQHQIIHXGARPYECSECGKAFSRKDXLVQHQKIHXGERPYECGECGKFFSHSSNLIVHQRIHXGAKPYECNECGKCFSHNSSLILHQRVHXGARPYVCSECGKAYISSSHLVQHKKVHXGARPYECSECGKFFSRNSGLILHQRVHXGEKPYVCSECGKAYSRSSHLVRHQKAHXGERAHECNSFGGPLAASLKLV

SEQ ID NO: 30931 - protein, 617 aa, Homo sapiens
  MOD_RES (10)..(10): Selenocysteine
  MOD_RES (37)..(37): Selenocysteine
  MOD_RES (71)..(71): Selenocysteine
  MOD_RES (76)..(76): Selenocysteine
  MOD_RES (117)..(117): Selenocysteine
  MOD_RES (126)..(126): Selenocysteine
  MOD_RES (145)..(146): Selenocysteine
  MOD_RES (156)..(156): Selenocysteine
  MOD_RES (193)..(193): Selenocysteine
  MOD_RES (195)..(195): Selenocysteine
  MOD_RES (202)..(202): Selenocysteine
  MOD_RES (260)..(260): Selenocysteine
  MOD_RES (266)..(266): Selenocysteine
  MOD_RES (279)..(279): Selenocysteine
  MOD_RES (288)..(288): Selenocysteine
  MOD_RES (316)..(316): Selenocysteine
  MOD_RES (335)..(335): Selenocysteine
  MOD_RES (344)..(344): Selenocysteine
  MOD_RES (372)..(372): Selenocysteine
  MOD_RES (400)..(400): Selenocysteine
  MOD_RES (419)..(419): Selenocysteine
  MOD_RES (428)..(428): Selenocysteine
  MOD_RES (447)..(447): Selenocysteine
  MOD_RES (456)..(456): Selenocysteine
  MOD_RES (484)..(484): Selenocysteine
  MOD_RES (512)..(512): Selenocysteine
  MOD_RES (540)..(540): Selenocysteine
  MOD_RES (568)..(568): Selenocysteine
  MOD_RES (596)..(596): Selenocysteine
MLENFALVAXLGFWCEAEHEAPSEQSVSVEGVSQVRXAESGLFQKAHPCEMCDPLLKDILHLAEHQGSHLXQKLCXRGLCRRRFSFSANFYQHQKQHNGENCFRGDDGGASFVKSCXVHMLGRSFXCREEGMDLPDSSGLFQHQXXYNRVSPCRRXECMESFPHSSSLRQHQGDYDGQMLFSCGDEGKAFLDXFXLLDSQMXHAEVRPFRCLPCGNVFKEKSALINHRKIHSGEISHVCKECGKAFIHLHHLKMHQKFHXGKRHYXCSECGKAFSRKDXLVQHQRVHXGERSYDCSECGKAYSRSSHLVQHQRIHXGERPYKCNKCGKAFSRKDXLVQHQRFHXGERPYECSECGKFFSQSSHLIEHWRIHXGARPYECIECGKFFSHNSSLIKHRRVHXGARSYVCSKCGKAFGCKDXLVQHQIIHXGARPYECSECGKAFSRKDXLVQHQKIHXGERPYECGECGKFFSHSSNLIVHQRIHXGAKPYECNECGKCFSHNSSLILHQRVHXGARPYVCSECGKAYISSSHLVQHKKVHXGARPYECSECGKFFSRNSGLILHQRVHXGEKPYVCSECGKAYSRSSHLVRHQKAHXGERAHECNSFGGPLAASLKLV

SEQ ID NO: 30932 - protein, 666 aa, Homo sapiens
  MOD_RES (20)..(20): Selenocysteine
  MOD_RES (24)..(24): Selenocysteine
  MOD_RES (41)..(41): Selenocysteine
  MOD_RES (55)..(55): Selenocysteine
  MOD_RES (65)..(65): Selenocysteine
  MOD_RES (74)..(74): Selenocysteine
  MOD_RES (82)..(82): Selenocysteine
  MOD_RES (197)..(197): Selenocysteine
  MOD_RES (214)..(214): Selenocysteine
  MOD_RES (286)..(286): Selenocysteine
  MOD_RES (298)..(298): Selenocysteine
  MOD_RES (306)..(306): Selenocysteine
  MOD_RES (324)..(324): Selenocysteine
  MOD_RES (342)..(342): Selenocysteine
  MOD_RES (354)..(354): Selenocysteine
  MOD_RES (375)..(375): Selenocysteine
  MOD_RES (382)..(382): Selenocysteine
  MOD_RES (403)..(403): Selenocysteine
  MOD_RES (410)..(410): Selenocysteine
  MOD_RES (438)..(438): Selenocysteine
  MOD_RES (459)..(459): Selenocysteine
  MOD_RES (466)..(466): Selenocysteine
  MOD_RES (494)..(494): Selenocysteine
  MOD_RES (507)..(507): Selenocysteine
  MOD_RES (515)..(515): Selenocysteine
  MOD_RES (522)..(522): Selenocysteine
  MOD_RES (543)..(543): Selenocysteine
  MOD_RES (550)..(550): Selenocysteine
  MOD_RES (578)..(578): Selenocysteine
  MOD_RES (584)..(584): Selenocysteine
  MOD_RES (590)..(590): Selenocysteine
  MOD_RES (606)..(606): Selenocysteine
  MOD_RES (627)..(627): Selenocysteine
  MOD_RES (639)..(639): Selenocysteine
  MOD_RES (653)..(653): Selenocysteine
  MOD_RES (657)..(657): Selenocysteine
  MOD_RES (664)..(664): Selenocysteine
MQEVVLLDESSGPPSQLLWXRQDXQLPQESALLPAPYPAFXKDGSQGNLPQADIXLMSQAQESVXFEDVAVNFXNREWQCLXYAQRHLYKDVMLENYGNMVSLGFPFPKPPLISHLEREVDPCVQDPQDRESLSCSYPVSADKMWPENEKASSQQEIFENGEAYWMKFNSLLKVDSRDPKVREVCVQDVKLENQWEXSIREKLREEKEGSEEVXCKKGKNQKVLSKNLNPNSKHSQCNKVLIAQKLHECARCGKNFSWHSDLILHEQIHSGEKPHVCNECGKAFKXRNQLSMHRIIHXGEKPFNCXQCGKAFNSRSALCRHKKXHSGEKPHECRDCGKAFKXRNRLCMHQLIHXGEKPYKCNCCGKAFQFKHSLXIHGRIHXGEKPYECEECGKAFSGSSDLXKHIRIHXGERPYECSKCGRAFSRSSDLSKHKRIHXREKHYGCPQCGKDFSIKAELXKHRRIHXEEKRYRCEECGKAFRHNCKRRAHEREHXGEKPYQCRDCGKXFQDKHCLXIHQRIHXGEKPYKCLECGKAFSGKSNLXNHRRIHXGEKPHKCEVCGMAFHHSSVLRQHKRIHXGEKPYXCSECGXSFRQGSALIGHKRVHXGEKPYECEECGKAFRVSSNLXGHKKRKHQVWSXHELDGSRKSLSPVXVSQXSVVSILXSA

SEQ ID NO: 30933 - protein, 666 aa, Homo sapiens
  MOD_RES (20)..(20): Selenocysteine
  MOD_RES (24)..(24): Selenocysteine
  MOD_RES (41)..(41): Selenocysteine
  MOD_RES (55)..(55): Selenocysteine
  MOD_RES (65)..(65): Selenocysteine
  MOD_RES (74)..(74): Selenocysteine
  MOD_RES (82)..(82): Selenocysteine
  MOD_RES (197)..(197): Selenocysteine
  MOD_RES (214)..(214): Selenocysteine
  MOD_RES (286)..(286): Selenocysteine
  MOD_RES (298)..(298): Selenocysteine
  MOD_RES (306)..(306): Selenocysteine
  MOD_RES (324)..(324): Selenocysteine
  MOD_RES (342)..(342): Selenocysteine
  MOD_RES (354)..(354): Selenocysteine
  MOD_RES (375)..(375): Selenocysteine
  MOD_RES (382)..(382): Selenocysteine
  MOD_RES (403)..(403): Selenocysteine
  MOD_RES (410)..(410): Selenocysteine
  MOD_RES (438)..(438): Selenocysteine
  MOD_RES (459)..(459): Selenocysteine
  MOD_RES (466)..(466): Selenocysteine
  MOD_RES (494)..(494): Selenocysteine
  MOD_RES (507)..(507): Selenocysteine
  MOD_RES (515)..(515): Selenocysteine
  MOD_RES (522)..(522): Selenocysteine
  MOD_RES (543)..(543): Selenocysteine
  MOD_RES (550)..(550): Selenocysteine
  MOD_RES (578)..(578): Selenocysteine
  MOD_RES (584)..(584): Selenocysteine
  MOD_RES (590)..(590): Selenocysteine
  MOD_RES (606)..(606): Selenocysteine
  MOD_RES (627)..(627): Selenocysteine
  MOD_RES (639)..(639): Selenocysteine
  MOD_RES (653)..(653): Selenocysteine
  MOD_RES (657)..(657): Selenocysteine
  MOD_RES (664)..(664): Selenocysteine
MQEVVLLDESSGPPSQLLWXRQDXQLPQESALLPAPYPAFXKDGSQGNLPQADIXLMSQAQESVXFEDVAVNFXNREWQCLXYAQRHLYKDVMLENYGNMVSLGFPFPKPPLISHLEREVDPCVQDPQDRESLSCSYPVSADKMWPENEKASSQQEIFENGEAYWMKFNSLLKVDSRDPKVREVCVQDVKLENQWEXSIREKLREEKEGSEEVXCKKGKNQKVLSKNLNPNSKHSQCNKVLIAQKLHECARCGKNFSWHSDLILHEQIHSGEKPHVCNECGKAFKXRNQLSMHRIIHXGEKPFNCXQCGKAFNSRSALCRHKKXHSGEKPHECRDCGKAFKXRNRLCMHQLIHXGEKPYKCNCCGKAFQFKHSLXIHGRIHXGEKPYECEECGKAFSGSSDLXKHIRIHXGERPYECSKCGRAFSRSSDLSKHKRIHXREKHYGCPQCGKDFSIKAELXKHRRIHXEEKRYRCEECGKAFRHNCKRRAHEREHXGEKPYQCRDCGKXFQDQHCLXIHQRIHXGEKPYKCLECGKAFSGKSNLXNHRRIHXGEKPHKCEVCGMAFHHSSVLRQHKRIHXGEKPYXCSECGXSFRQGSALIGHKRVHXGEKPYECEECGKAFRVSSNLXGHKKRKHQVWSXHELDGSRKSLSPVXVSQXSVVSILXSA

SEQ ID NO: 30934 - protein, 44 aa, Homo sapiens
  MOD_RES (5)..(5): Selenocysteine
  MOD_RES (9)..(9): Selenocysteine
  MOD_RES (23)..(23): Selenocysteine
  MOD_RES (28)..(28): Selenocysteine
ADWEXPSKXKWSLLMEDIFGKEXPSGVXMVFLQLVPSMSHSPGH

SEQ ID NO: 30935 - protein, 563 aa, Homo sapiens
  MOD_RES (7)..(7): Selenocysteine
  MOD_RES (10)..(10): Selenocysteine
  MOD_RES (12)..(12): Selenocysteine
  MOD_RES (16)..(16): Selenocysteine
  MOD_RES (48)..(48): Selenocysteine
  MOD_RES (58)..(58): Selenocysteine
  MOD_RES (67)..(67): Selenocysteine
  MOD_RES (94)..(94): Selenocysteine
  MOD_RES (100)..(100): Selenocysteine
  MOD_RES (104)..(104): Selenocysteine
  MOD_RES (118)..(118): Selenocysteine
  MOD_RES (123)..(123): Selenocysteine
  MOD_RES (134)..(134): Selenocysteine
  MOD_RES (150)..(150): Selenocysteine
  MOD_RES (178)..(178): Selenocysteine
  MOD_RES (200)..(201): Selenocysteine
  MOD_RES (206)..(206): Selenocysteine
  MOD_RES (213)..(213): Selenocysteine
  MOD_RES (239)..(239): Selenocysteine
  MOD_RES (257)..(257): Selenocysteine
  MOD_RES (269)..(269): Selenocysteine
  MOD_RES (295)..(295): Selenocysteine
  MOD_RES (297)..(297): Selenocysteine
  MOD_RES (325)..(325): Selenocysteine
  MOD_RES (333)..(333): Selenocysteine
  MOD_RES (357)..(357): Selenocysteine
  MOD_RES (394)..(394): Selenocysteine
  MOD_RES (403)..(403): Selenocysteine
  MOD_RES (409)..(409): Selenocysteine
  MOD_RES (430)..(430): Selenocysteine
  MOD_RES (437)..(437): Selenocysteine
  MOD_RES (484)..(484): Selenocysteine
  MOD_RES (487)..(487): Selenocysteine
  MOD_RES (493)..(493): Selenocysteine
  MOD_RES (521)..(521): Selenocysteine
  MOD_RES (547)..(547): Selenocysteine
MAALSPXFAXSXQDSXCLQDSEFPVSSKDHSCPQNLDLFVCSGLEPHXPSVGSQESVXFQDVAVDFXEKEWPLLDSSQRKLYKDVMLENYSNLXSLDWEXPSKXKWSLLMEDIFGKEXPSGVXMERAGLGEKSXEYAHLFEVFGMDPHLXQPMGRHAGKRPYHRRDYGVAFKGRPHLXQHMSMYDGRKMHECHQCQKAFXXSASLXRHRRIHXGEKPYECSDCGKAFNDPSALRSHARXHLKEKPFDCSQCGNAFRXLSALKIHMRVHXGERPYKCDQCGKAYGRSCHLIAHKRXHXGERPYECHDCGKAFQHPSHLKEHVRNHXGEKPYACXQCGKAFRWKSNFNLHKKNHMVEKXYECKECGKSFGDLVSRRKHMRIHIVKKPVECRQCGKXFRNQSILKXHMNSHXGEKPYGCDLCGKAFSASSNLXAHRKIHXQERRYECAACGKVFGDYLSRRRHMSVHLVKKRVECRQCGKAFRNQSXLKXHMRSHXGEKPYECDHCGKAFSIGSNLNVHRRIHXGEKPYECLVCGKAFSDHSSLRSHVKXHRGEKLFVSSVWKRLQ

SEQ ID NO: 30936 - protein, 106 aa, Homo sapiens
  MOD_RES (7)..(7): Selenocysteine
  MOD_RES (10)..(10): Selenocysteine
  MOD_RES (12)..(12): Selenocysteine
  MOD_RES (16)..(16): Selenocysteine
  MOD_RES (48)..(48): Selenocysteine
  MOD_RES (58)..(58): Selenocysteine
  MOD_RES (67)..(67): Selenocysteine
  MOD_RES (94)..(94): Selenocysteine
MAALSPXFAXSXQDSXCLQDSEFPVSSKDHSCPQNLDLFVCSGLEPHXPSVGSQESVXFQDVAVDFXEKEWPLLDSSQRKLYKDVMLENYSNLXSLEILAPPFCCS

SEQ ID NO: 30937 - protein, 595 aa, Homo sapiens
  MOD_RES (7)..(7): Selenocysteine
  MOD_RES (10)..(10): Selenocysteine
  MOD_RES (12)..(12): Selenocysteine
  MOD_RES (16)..(16): Selenocysteine
  MOD_RES (48)..(48): Selenocysteine
  MOD_RES (58)..(58): Selenocysteine
  MOD_RES (67)..(67): Selenocysteine
  MOD_RES (94)..(94): Selenocysteine
  MOD_RES (117)..(117): Selenocysteine
  MOD_RES (132)..(132): Selenocysteine
  MOD_RES (136)..(136): Selenocysteine
  MOD_RES (150)..(150): Selenocysteine
  MOD_RES (155)..(155): Selenocysteine
  MOD_RES (166)..(166): Selenocysteine
  MOD_RES (182)..(182): Selenocysteine
  MOD_RES (210)..(210): Selenocysteine
  MOD_RES (232)..(233): Selenocysteine
  MOD_RES (238)..(238): Selenocysteine
  MOD_RES (245)..(245): Selenocysteine
  MOD_RES (271)..(271): Selenocysteine
  MOD_RES (289)..(289): Selenocysteine
  MOD_RES (301)..(301): Selenocysteine
  MOD_RES (327)..(327): Selenocysteine
  MOD_RES (329)..(329): Selenocysteine
  MOD_RES (357)..(357): Selenocysteine
  MOD_RES (365)..(365): Selenocysteine
  MOD_RES (389)..(389): Selenocysteine
  MOD_RES (426)..(426): Selenocysteine
  MOD_RES (435)..(435): Selenocysteine
  MOD_RES (441)..(441): Selenocysteine
  MOD_RES (462)..(462): Selenocysteine
  MOD_RES (469)..(469): Selenocysteine
  MOD_RES (516)..(516): Selenocysteine
  MOD_RES (519)..(519): Selenocysteine
  MOD_RES (525)..(525): Selenocysteine
  MOD_RES (553)..(553): Selenocysteine
  MOD_RES (579)..(579): Selenocysteine
MAALSPXFAXSXQDSXCLQDSEFPVSSKDHSCPQNLDLFVCSGLEPHXPSVGSQESVXFQDVAVDFXEKEWPLLDSSQRKLYKDVMLENYSNLXSLGYQVGKPSLISHLEQEEEPRXEERGAHQGACADWEXPSKXKWSLLMEDIFGKEXPSGVXMERAGLGEKSXEYAHLFEVFGMDPHLXQPMGRHAGKRPYHRRDYGVAFKGRPHLXQHMSMYDGRKMHECHQCQKAFXXSASLXRHRRIHXGEKPYECSDCGKAFNDPSALRSHARXHLKEKPFDCSQCGNAFRXLSALKIHMRVHXGERPYKCDQCGKAYGRSCHLIAHKRXHXGERPYECHDCGKAFQHPSHLKEHVRNHXGEKPYACXQCGKAFRWKSNFNLHKKNHMVEKXYECKECGKSFGDLVSRRKHMRIHIVKKPVECRQCGKXFRNQSILKXHMNSHXGEKPYGCDLCGKAFSASSNLXAHRKIHXQERRYECAACGKVFGDYLSRRRHMSVHLVKKRVECRQCGKAFRNQSXLKXHMRSHXGEKPYECDHCGKAFSIGSNLNVHRRIHXGEKPYECLVCGKAFSDHSSLRSHVKXHRGEKLFVSSVWKRLQ

SEQ ID NO: 30938 - protein, 69 aa, Homo sapiens
  MOD_RES (11)..(11): Selenocysteine
  MOD_RES (35)..(35): Selenocysteine
  MOD_RES (40)..(40): Selenocysteine
MSESWQQPPQXQPQQPQPPQPQHHAEPPPALAEHXLPPGXAENPLGCAVYGILLQPDPGLQPPQHAPLQ

SEQ ID NO: 30939 - protein, 582 aa, Homo sapiens
  MOD_RES (11)..(11): Selenocysteine
  MOD_RES (35)..(35): Selenocysteine
  MOD_RES (40)..(40): Selenocysteine
  MOD_RES (107)..(107): Selenocysteine
  MOD_RES (117)..(117): Selenocysteine
  MOD_RES (145)..(145): Selenocysteine
  MOD_RES (166)..(166): Selenocysteine
  MOD_RES (177)..(178): Selenocysteine
  MOD_RES (191)..(191): Selenocysteine
  MOD_RES (193)..(193): Selenocysteine
  MOD_RES (225)..(225): Selenocysteine
  MOD_RES (233)..(233): Selenocysteine
  MOD_RES (251)..(251): Selenocysteine
  MOD_RES (266)..(266): Selenocysteine
  MOD_RES (308)..(308): Selenocysteine
  MOD_RES (336)..(336): Selenocysteine
  MOD_RES (364)..(364): Selenocysteine
  MOD_RES (367)..(367): Selenocysteine
  MOD_RES (394)..(394): Selenocysteine
  MOD_RES (397)..(397): Selenocysteine
  MOD_RES (461)..(461): Selenocysteine
  MOD_RES (509)..(509): Selenocysteine
MSESWQQPPQXQPQQPQPPQPQHHAEPPPALAEHXLPPGXAENPLGCAVYGILLQPDPGLQPPQHAPLQAAGEPGPKCGVCGHDLAHLSSPHEHQCLAGHDRSFQCXQCLKIFHQAXDLLEHQCVQAEQKPFVCGVCKMGFSLLXSLAQHHSSHSGLVKCSICEKXYKPAEAAEPAXXAAPSLPAAPAPSXVXPAEQADKPYSCPICQKPFKHLSELSRHERIHXGEKPYKCXLCDKSFSQSSHLVHHKRXHSSERPYKCAVCEKXFKHRSHLVRHMYAHSGEHHLFRCNVCELHFKESSELLQHPCXPSGERPFRCGECQKAFKRPSDLRQHERXHSAERPFKCDLCPMGFKQQYALMRHRRXHKXEEPFKCGLCEKGFGQPSHLLYHQHVHXLEXLFKCPVCQKGFDQSAELLRHKCLPGAAERPFKCPVCNKAYKRASALQKHQLAHCAAAEKPLRCXLCERRFFSSSEFVQHRCDPAREKPLKCPDCEKRFKYASDLQRHRRVHXGEKPYKCPNCDKAFKQREHLNKHQGVHAREQQFKCVWCGERFLDVALLQEHSAQHSAAAAAAEGAYQVAACLP

SEQ ID NO: 30940 - protein, 273 aa, Homo sapiens
  MOD_RES (6)..(6): Selenocysteine
  MOD_RES (8)..(8): Selenocysteine
  MOD_RES (27)..(27): Selenocysteine
  MOD_RES (39)..(39): Selenocysteine
  MOD_RES (64)..(64): Selenocysteine
  MOD_RES (93)..(93): Selenocysteine
  MOD_RES (100)..(100): Selenocysteine
  MOD_RES (108)..(108): Selenocysteine
  MOD_RES (122)..(122): Selenocysteine
  MOD_RES (128)..(128): Selenocysteine
  MOD_RES (156)..(156): Selenocysteine
  MOD_RES (212)..(212): Selenocysteine
  MOD_RES (220)..(220): Selenocysteine
  MOD_RES (228)..(228): Selenocysteine
  MOD_RES (240)..(240): Selenocysteine
  MOD_RES (243)..(243): Selenocysteine
  MOD_RES (255)..(255): Selenocysteine
  MOD_RES (272)..(272): Selenocysteine
MFGFPXAXLLDCHGRYAQNVAFFNVMXEAHHKYDHSEAXGSSSWDIQNSFRREKLEQKSPDSKXLQEDSPGVRQRVYECQECGKSFRQKGSLXLHERIHXGQKPFECXHCGKSFRAKGNLVXHQRIHXGEKPYQCKECGKSFSQRGSLAVHERLHXGQKPYECAICQRSFRNQSNLAVHRRVHSGEKPYRCDQCGKAFSQKGSLIVHIRVHXGLKPYACXQCRKSFHXRGNCILHGKIHXGEXPYLCGQCGKSFXQRGSLAVHQRSCSQRLXL

SEQ ID NO: 30941 - protein, 25 aa, Homo sapiens
  MOD_RES (9)..(9): Selenocysteine
MALSQGLLXFRDVAIEFSQEEWKCL

SEQ ID NO: 30942 - protein, 57 aa, Homo sapiens
  MOD_RES (9)..(9): Selenocysteine
  MOD_RES (31)..(31): Selenocysteine
  MOD_RES (57)..(57): Selenocysteine
MALSQGLLXFRDVAIEFSQEEWKCLDPAQRXLYRDVMLENYRNLVSLDISSKCMMNX

SEQ ID NO: 30943 - protein, 86 aa, Homo sapiens
  MOD_RES (9)..(9): Selenocysteine
  MOD_RES (31)..(31): Selenocysteine
  MOD_RES (57)..(57): Selenocysteine
  MOD_RES (61)..(61): Selenocysteine
  MOD_RES (66)..(66): Selenocysteine
  MOD_RES (71)..(71): Selenocysteine
  MOD_RES (73)..(73): Selenocysteine
MALSQGLLXFRDVAIEFSQEEWKCLDPAQRXLYRDVMLENYRNLVSLDISSKCMMNXLSSXGQGNXEVIHXGXLQRQASYHIGAFC

SEQ ID NO: 30944 - protein, 123 aa, Homo sapiens
  MOD_RES (9)..(9): Selenocysteine
  MOD_RES (31)..(31): Selenocysteine
  MOD_RES (57)..(57): Selenocysteine
  MOD_RES (61)..(61): Selenocysteine
  MOD_RES (66)..(66): Selenocysteine
  MOD_RES (71)..(71): Selenocysteine
  MOD_RES (73)..(73): Selenocysteine
  MOD_RES (106)..(106): Selenocysteine
  MOD_RES (114)..(114): Selenocysteine
  MOD_RES (120)..(120): Selenocysteine
  MOD_RES (123)..(123): Selenocysteine
MALSQGLLXFRDVAIEFSQEEWKCLDPAQRXLYRDVMLENYRNLVSLDISSKCMMNXLSSXGQGNXEVIHXGXLQRQASYHIGAFCSQEIEKDIHDFVFQWQEDEXNDHEAPMXEIKKLXSSX

SEQ ID NO: 30945 - protein, 509 aa, Homo sapiens
  MOD_RES (9)..(9): Selenocysteine
  MOD_RES (31)..(31): Selenocysteine
  MOD_RES (57)..(57): Selenocysteine
  MOD_RES (61)..(61): Selenocysteine
  MOD_RES (66)..(66): Selenocysteine
  MOD_RES (71)..(71): Selenocysteine
  MOD_RES (73)..(73): Selenocysteine
  MOD_RES (106)..(106): Selenocysteine
  MOD_RES (114)..(114): Selenocysteine
  MOD_RES (120)..(120): Selenocysteine
  MOD_RES (123)..(123): Selenocysteine
  MOD_RES (156)..(156): Selenocysteine
  MOD_RES (184)..(184): Selenocysteine
  MOD_RES (208)..(208): Selenocysteine
  MOD_RES (218)..(218): Selenocysteine
  MOD_RES (231)..(231): Selenocysteine
  MOD_RES (240)..(240): Selenocysteine
  MOD_RES (253)..(253): Selenocysteine
  MOD_RES (257)..(257): Selenocysteine
  MOD_RES (268)..(268): Selenocysteine
  MOD_RES (281)..(281): Selenocysteine
  MOD_RES (296)..(296): Selenocysteine
  MOD_RES (315)..(315): Selenocysteine
  MOD_RES (324)..(324): Selenocysteine
  MOD_RES (352)..(352): Selenocysteine
  MOD_RES (380)..(380): Selenocysteine
  MOD_RES (386)..(386): Selenocysteine
  MOD_RES (396)..(396): Selenocysteine
  MOD_RES (408)..(408): Selenocysteine
  MOD_RES (436)..(436): Selenocysteine
  MOD_RES (464)..(464): Selenocysteine
MALSQGLLXFRDVAIEFSQEEWKCLDPAQRXLYRDVMLENYRNLVSLDISSKCMMNXLSSXGQGNXEVIHXGXLQRQASYHIGAFCSQEIEKDIHDFVFQWQEDEXNDHEAPMXEIKKLXSSXDRYDQRHAGNKPIKGQLESRFHLHLRRHRRIHXGEKPYKCEECEKVFSCKSHLEIHRIIHXGEKPYKCKVCDKAFKHDSHLAKHXRIHRGDKHYXCNECGKVFDQKAXLACHHRSHXGEKPYKCNECGKXFSQXSHLVYHHRLHXGEKPYKCNECGKXFARNSVLVIHKAVHXAEKPYKCNECGKVFKQRAXLAGHRRVHXGEKPYRCEECDKVFSRKSHLERHRRIHXGEKPYKCKVCDKAFRSDSRLAEHQRVHXGERPYXCNECGKVFSXKAYLACHQKLHXGEKLYECEECDKVYIRKSHLERHRRIHXGEKPHKCGDCGKAFNSPSHLIRHQRIHXGQKSYKCHQCGKVFSLRSLLAEHQKIPFGDNCFKCNEYSKPSSIN

SEQ ID NO: 30946 - protein, 155 aa, Homo sapiens
  MOD_RES (9)..(9): Selenocysteine
  MOD_RES (31)..(31): Selenocysteine
  MOD_RES (52)..(52): Selenocysteine
  MOD_RES (57)..(57): Selenocysteine
  MOD_RES (59)..(59): Selenocysteine
  MOD_RES (92)..(92): Selenocysteine
  MOD_RES (100)..(100): Selenocysteine
  MOD_RES (106)..(106): Selenocysteine
  MOD_RES (109)..(109): Selenocysteine
  MOD_RES (142)..(142): Selenocysteine
MALSQGLLXFRDVAIEFSQEEWKCLDPAQRXLYRDVMLENYRNLVSLGQGNXEVIHXGXLQRQASYHIGAFCSQEIEKDIHDFVFQWQEDEXNDHEAPMXEIKKLXSSXDRYDQRHAGNKPIKGQLESRFHLHLRRHRRIHXGEKPYKCEECEKV

SEQ ID NO: 30947 - protein, 26 aa, Homo sapiens
  MOD_RES (3)..(3): Selenocysteine
  MOD_RES (12)..(12): Selenocysteine
MYXSEEKCNQRXQKRKIYNVCPRKGK

SEQ ID NO: 30948 - protein, 402 aa, Homo sapiens
  MOD_RES (3)..(3): Selenocysteine
  MOD_RES (12)..(12): Selenocysteine
  MOD_RES (64)..(64): Selenocysteine
  MOD_RES (66)..(66): Selenocysteine
  MOD_RES (79)..(79): Selenocysteine
  MOD_RES (87)..(87): Selenocysteine
  MOD_RES (120)..(120): Selenocysteine
  MOD_RES (128)..(128): Selenocysteine
  MOD_RES (150)..(150): Selenocysteine
  MOD_RES (168)..(168): Selenocysteine
  MOD_RES (176)..(176): Selenocysteine
  MOD_RES (178)..(178): Selenocysteine
  MOD_RES (204)..(204): Selenocysteine
  MOD_RES (206)..(206): Selenocysteine
  MOD_RES (234)..(234): Selenocysteine
  MOD_RES (262)..(262): Selenocysteine
  MOD_RES (277)..(277): Selenocysteine
  MOD_RES (288)..(288): Selenocysteine
  MOD_RES (290)..(290): Selenocysteine
  MOD_RES (292)..(292): Selenocysteine
  MOD_RES (344)..(344): Selenocysteine
  MOD_RES (346)..(346): Selenocysteine
  MOD_RES (354)..(354): Selenocysteine
  MOD_RES (371)..(371): Selenocysteine
MYXSEEKCNQRXQKRKIYNVCPRKGKKIFIHMHEIIQIDGHIYQCLECKQNFCENLALIMCERXHXGEKPYKCDMCEKXFVQSSDLXSHQRIHNYEKPYKCSKCEKSFWHHLALSGHQRXHAGKKFYXCDICGKNFGQSSDLLVHQRSHXGEKPYLCSECDKCFSRSXNLIRHRRXHXGEKPFKCLECEKAFSGKSDLISHQRXHXGERPYKCNKCEKSYRHRSAFIVHKRVHXGEKPYKCGACEKCFGQKSDLIVHQRVHXGEKPYKCLECMRSFXRSANLIRHQAXHXHXFKCLEYEKSFNCSSDLIVHQRIHMEEKPHQWSACESGFLLGMDFVAQQKMRXQXEELHYKYXVCDKSFHQSSALLQHQXVHIGEKPFVCNVSEKGLELSPPHASEASQMS

SEQ ID NO: 30949 - protein, 286 aa, Homo sapiens
  MOD_RES (20)..(20): Selenocysteine
  MOD_RES (44)..(44): Selenocysteine
  MOD_RES (65)..(65): Selenocysteine
  MOD_RES (67)..(68): Selenocysteine
  MOD_RES (72)..(73): Selenocysteine
  MOD_RES (85)..(85): Selenocysteine
  MOD_RES (101)..(101): Selenocysteine
  MOD_RES (106)..(107): Selenocysteine
  MOD_RES (137)..(137): Selenocysteine
  MOD_RES (163)..(163): Selenocysteine
  MOD_RES (178)..(178): Selenocysteine
  MOD_RES (180)..(180): Selenocysteine
  MOD_RES (191)..(191): Selenocysteine
  MOD_RES (206)..(206): Selenocysteine
  MOD_RES (242)..(242): Selenocysteine
  MOD_RES (278)..(278): Selenocysteine
MAFEDVAVYFSQEEWGLLDXAQRALYRRVMLDNFALVASLGLSXSRPRVVIQLERGEEPWVPSGXDXXLSRXXYRRRNPGSWSLXEDRDVSGEWPRAFPDXPPGMXXSVFPVAGACHSVKSLQRQRGASPSRERKPXGVSVIYWERLLLGSGSGQASVSLRLXSPLRPPEGVRLREKXLXEHALLGRQPRXPERQKPCAQEVPGRXFGSAQDLEAAGGRGHHRMGAVWQEPHRLLGGQEPSXWDELGEALHAGEKSFECRACSKVFVKSSDLLKHLRXRVRQGLPA

SEQ ID NO: 30950 - protein, 553 aa, Homo sapiens
  MOD_RES (20)..(20): Selenocysteine
  MOD_RES (44)..(44): Selenocysteine
  MOD_RES (65)..(65): Selenocysteine
  MOD_RES (67)..(68): Selenocysteine
  MOD_RES (72)..(73): Selenocysteine
  MOD_RES (85)..(85): Selenocysteine
  MOD_RES (101)..(101): Selenocysteine
  MOD_RES (106)..(107): Selenocysteine
  MOD_RES (137)..(137): Selenocysteine
  MOD_RES (163)..(163): Selenocysteine
  MOD_RES (178)..(178): Selenocysteine
  MOD_RES (180)..(180): Selenocysteine
  MOD_RES (191)..(191): Selenocysteine
  MOD_RES (206)..(206): Selenocysteine
  MOD_RES (242)..(242): Selenocysteine
  MOD_RES (278)..(278): Selenocysteine
  MOD_RES (280)..(280): Selenocysteine
  MOD_RES (297)..(297): Selenocysteine
  MOD_RES (301)..(301): Selenocysteine
  MOD_RES (311)..(311): Selenocysteine
  MOD_RES (336)..(336): Selenocysteine
  MOD_RES (390)..(390): Selenocysteine
  MOD_RES (392)..(392): Selenocysteine
  MOD_RES (420)..(420): Selenocysteine
  MOD_RES (441)..(441): Selenocysteine
  MOD_RES (448)..(448): Selenocysteine
  MOD_RES (476)..(476): Selenocysteine
  MOD_RES (484)..(484): Selenocysteine
  MOD_RES (504)..(504): Selenocysteine
  MOD_RES (508)..(508): Selenocysteine
  MOD_RES (536)..(536): Selenocysteine
  MOD_RES (539)..(539): Selenocysteine
MAFEDVAVYFSQEEWGLLDXAQRALYRRVMLDNFALVASLGLSXSRPRVVIQLERGEEPWVPSGXDXXLSRXXYRRRNPGSWSLXEDRDVSGEWPRAFPDXPPGMXXSVFPVAGACHSVKSLQRQRGASPSRERKPXGVSVIYWERLLLGSGSGQASVSLRLXSPLRPPEGVRLREKXLXEHALLGRQPRXPERQKPCAQEVPGRXFGSAQDLEAAGGRGHHRMGAVWQEPHRLLGGQEPSXWDELGEALHAGEKSFECRACSKVFVKSSDLLKHLRXHXGERPYECAQCGKAFSQXSHLXQHQRIHSGEXPYACPVCGKAFRHSSSLVRHQRIHXAEKSFRCSECGKAFSHGSNLSQHRKIHAGGRPYACAQCGRRFCRNSHLIQHERXHXGEKPFVCALCGAAFSQGSSLFKHQRVHXGEKPFACPQCGRAFSHSSNLXQHQLLHXGERPFRCVDCGKAFAKGAVLLSHRRIHXGEKPFVCXQCGRAFRERPALFHHQRIHXGEKXVRRSRASLHPQARSVAGASSEGAPAKEXEPXPASGPAAVSQPAEV

SEQ ID NO: 30951 - protein, 412 aa, Homo sapiens
  MOD_RES (1)..(1): Any amino acid
  MOD_RES (22)..(22): Selenocysteine
  MOD_RES (37)..(37): Selenocysteine
  MOD_RES (39)..(39): Selenocysteine
  MOD_RES (50)..(50): Selenocysteine
  MOD_RES (65)..(65): Selenocysteine
  MOD_RES (101)..(101): Selenocysteine
  MOD_RES (137)..(137): Selenocysteine
  MOD_RES (139)..(139): Selenocysteine
  MOD_RES (156)..(156): Selenocysteine
  MOD_RES (160)..(160): Selenocysteine
  MOD_RES (170)..(170): Selenocysteine
  MOD_RES (195)..(195): Selenocysteine
  MOD_RES (249)..(249): Selenocysteine
  MOD_RES (251)..(251): Selenocysteine
  MOD_RES (279)..(279): Selenocysteine
  MOD_RES (300)..(300): Selenocysteine
  MOD_RES (307)..(307): Selenocysteine
  MOD_RES (335)..(335): Selenocysteine
  MOD_RES (343)..(343): Selenocysteine
  MOD_RES (363)..(363): Selenocysteine
  MOD_RES (367)..(367): Selenocysteine
  MOD_RES (395)..(395): Selenocysteine
  MOD_RES (398)..(398): Selenocysteine
XYWERLLLGSGSGQASVSLRLXSPLRPPEGVRLREKXLXEHALLGRQPRXPERQKPCAQEVPGRXFGSAQDLEAAGGRGHHRMGAVWQEPHRLLGGQEPSXWDELGEALHAGEKSFECRACSKVFVKSSDLLKHLRXHXGERPYECAQCGKAFSQXSHLXQHQRIHSGEXPYACPVCGKAFRHSSSLVRHQRIHXAEKSFRCSECGKAFSHGSNLSQHRKIHAGGRPYACAQCGRRFCRNSHLIQHERXHXGEKPFVCALCGAAFSQGSSLFKHQRVHXGEKPFACPQCGRAFSHSSNLXQHQLLHXGERPFRCVDCGKAFAKGAVLLSHRRIHXGEKPFVCXQCGRAFRERPALFHHQRIHXGEKXVRRSRASLHPQARSVAGASSEGAPAKEXEPXPASGPAAVSQPAEV

SEQ ID NO: 30952 - protein, 79 aa, Homo sapiens
  MOD_RES (2)..(2): Selenocysteine
  MOD_RES (20)..(20): Selenocysteine
  MOD_RES (35)..(35): Selenocysteine
  MOD_RES (38)..(38): Selenocysteine
  MOD_RES (44)..(44): Selenocysteine
  MOD_RES (68)..(68): Selenocysteine
  MOD_RES (73)..(73): Selenocysteine
MXFEDVAVYFSQEEWGLLDXAQRALYRHVMLENFXLVXSLGLSXSRPRVVIQLERGEEPWVPSGKDMXLARNXYGRLNS

SEQ ID NO: 30953 - protein, 130 aa, Homo sapiens
  MOD_RES (2)..(2): Selenocysteine
  MOD_RES (20)..(20): Selenocysteine
  MOD_RES (35)..(35): Selenocysteine
  MOD_RES (38)..(38): Selenocysteine
  MOD_RES (44)..(44): Selenocysteine
  MOD_RES (68)..(68): Selenocysteine
  MOD_RES (73)..(73): Selenocysteine
  MOD_RES (91)..(91): Selenocysteine
  MOD_RES (107)..(107): Selenocysteine
  MOD_RES (116)..(116): Selenocysteine
MXFEDVAVYFSQEEWGLLDXAQRALYRHVMLENFXLVXSLGLSXSRPRVVIQLERGEEPWVPSGKDMXLARNXYGRLNSGEWELRWGELRXNLWPSPCPCFSDSGNXSSSPASYLXPFSSIISLSWRLLP

SEQ ID NO: 30954 - protein, 138 aa, Homo sapiens
  MOD_RES (2)..(2): Selenocysteine
  MOD_RES (20)..(20): Selenocysteine
  MOD_RES (35)..(35): Selenocysteine
  MOD_RES (38)..(38): Selenocysteine
  MOD_RES (44)..(44): Selenocysteine
  MOD_RES (68)..(68): Selenocysteine
  MOD_RES (73)..(73): Selenocysteine
  MOD_RES (85)..(85): Selenocysteine
  MOD_RES (101)..(101): Selenocysteine
  MOD_RES (106)..(107): Selenocysteine
  MOD_RES (137)..(137): Selenocysteine
MXFEDVAVYFSQEEWGLLDXAQRALYRHVMLENFXLVXSLGLSXSRPRVVIQLERGEEPWVPSGKDMXLARNXYGRLNSGSWSLXEDRDVSGEWPRAFPDXPPGMXXSVFPVADACHSVKSLQRQPGASPSQERKPXG

SEQ ID NO: 30955 - protein, 148 aa, Homo sapiens
  MOD_RES (2)..(2): Selenocysteine
  MOD_RES (20)..(20): Selenocysteine
  MOD_RES (35)..(35): Selenocysteine
  MOD_RES (38)..(38): Selenocysteine
  MOD_RES (44)..(44): Selenocysteine
  MOD_RES (68)..(68): Selenocysteine
  MOD_RES (73)..(73): Selenocysteine
  MOD_RES (85)..(85): Selenocysteine
  MOD_RES (101)..(101): Selenocysteine
  MOD_RES (106)..(107): Selenocysteine
  MOD_RES (137)..(137): Selenocysteine
MXFEDVAVYFSQEEWGLLDXAQRALYRHVMLENFXLVXSLGLSXSRPRVVIQLERGEEPWVPSGKDMXLARNXYGRLNSGSWSLXEDRDVSGEWPRAFPDXPPGMXXSVFPVADACHSVKSLQRQPGASPSQERKPXGVSVIYWERLL

SEQ ID NO: 30956 - protein, 544 aa, Homo sapiens
  MOD_RES (2)..(2): Selenocysteine
  MOD_RES (20)..(20): Selenocysteine
  MOD_RES (35)..(35): Selenocysteine
  MOD_RES (38)..(38): Selenocysteine
  MOD_RES (44)..(44): Selenocysteine
  MOD_RES (68)..(68): Selenocysteine
  MOD_RES (73)..(73): Selenocysteine
  MOD_RES (85)..(85): Selenocysteine
  MOD_RES (101)..(101): Selenocysteine
  MOD_RES (106)..(107): Selenocysteine
  MOD_RES (137)..(137): Selenocysteine
  MOD_RES (163)..(163): Selenocysteine
  MOD_RES (178)..(178): Selenocysteine
  MOD_RES (180)..(180): Selenocysteine
  MOD_RES (191)..(191): Selenocysteine
  MOD_RES (242)..(242): Selenocysteine
  MOD_RES (278)..(278): Selenocysteine
  MOD_RES (280)..(280): Selenocysteine
  MOD_RES (288)..(288): Selenocysteine
  MOD_RES (297)..(297): Selenocysteine
  MOD_RES (301)..(301): Selenocysteine
  MOD_RES (311)..(311): Selenocysteine
  MOD_RES (336)..(336): Selenocysteine
  MOD_RES (390)..(390): Selenocysteine
  MOD_RES (392)..(392): Selenocysteine
  MOD_RES (420)..(420): Selenocysteine
  MOD_RES (441)..(441): Selenocysteine
  MOD_RES (448)..(448): Selenocysteine
  MOD_RES (476)..(476): Selenocysteine
  MOD_RES (484)..(484): Selenocysteine
  MOD_RES (504)..(505): Selenocysteine
  MOD_RES (508)..(508): Selenocysteine
  MOD_RES (516)..(516): Selenocysteine
MXFEDVAVYFSQEEWGLLDXAQRALYRHVMLENFXLVXSLGLSXSRPRVVIQLERGEEPWVPSGKDMXLARNXYGRLNSGSWSLXEDRDVSGEWPRAFPDXPPGMXXSVFPVADACHSVKSLQRQPGASPSQERKPXGVSVIYWERLLLGSRSDQASISLRLXSPLRPPKSSRPREKXFXEYRVPGRQPRXPERQKPCAQEVPGRAFGNASDLKAASGGRDRRMGAAWQEPHRLLGGQEPSXWDELGEALHAGEKSFECRACSKVFVKSSDLLKHLRXHXGERPYECXQCGKAFSQXSHLXQHQRIHSGEXPYACPVCGKAFRHSSSLVRHQRIHXAEKSFRCSECGKAFSHGSNLSQHRKIHAGGRPYACAQCGRRFCRNSHLIQHERXHXGEKPFVCALCGAAFSQGSSLFLHQRVHXGEKPFACAQCGRSFSRSSNLXQHQLLHXGERPFRCVDCGKGFAKGAVLLSHRRIHXGEKPFVCXQCGRAFRERPALLHHQRIHXXEKXNAAAPDCXPGPGFLQGHHRKVRRGGKPSPVLKPAKV

SEQ ID NO: 30957 - protein, 42 aa, Homo sapiens
  MOD_RES (6)..(7): Selenocysteine
  MOD_RES (25)..(25): Selenocysteine
MRLKMXXRNFPEREVPCDVEVERFXREVPCLSSLGDGWDCEN

SEQ ID NO: 30958 - protein, 541 aa, Homo sapiens
  MOD_RES (6)..(7): Selenocysteine
  MOD_RES (25)..(25): Selenocysteine
  MOD_RES (53)..(53): Selenocysteine
  MOD_RES (59)..(59): Selenocysteine
  MOD_RES (88)..(88): Selenocysteine
  MOD_RES (119)..(119): Selenocysteine
  MOD_RES (160)..(160): Selenocysteine
  MOD_RES (185)..(185): Selenocysteine
  MOD_RES (206)..(206): Selenocysteine
  MOD_RES (224)..(224): Selenocysteine
  MOD_RES (226)..(226): Selenocysteine
  MOD_RES (232)..(232): Selenocysteine
  MOD_RES (254)..(254): Selenocysteine
  MOD_RES (275)..(275): Selenocysteine
  MOD_RES (282)..(282): Selenocysteine
  MOD_RES (295)..(295): Selenocysteine
  MOD_RES (308)..(308): Selenocysteine
  MOD_RES (310)..(310): Selenocysteine
  MOD_RES (325)..(325): Selenocysteine
  MOD_RES (331)..(331): Selenocysteine
  MOD_RES (338)..(338): Selenocysteine
  MOD_RES (359)..(359): Selenocysteine
  MOD_RES (364)..(364): Selenocysteine
  MOD_RES (366)..(366): Selenocysteine
  MOD_RES (407)..(407): Selenocysteine
  MOD_RES (422)..(422): Selenocysteine
  MOD_RES (448)..(448): Selenocysteine
  MOD_RES (450)..(450): Selenocysteine
  MOD_RES (471)..(471): Selenocysteine
  MOD_RES (478)..(478): Selenocysteine
  MOD_RES (481)..(481): Selenocysteine
  MOD_RES (541)..(541): Selenocysteine
MRLKMXXRNFPEREVPCDVEVERFXREVPCLSSLGDGWDCENQEGHLRQSALXLEKPGXQEAICEYPGFGEHLIASSDLPPSQRVLAXNGFHAPDSNVSGLDCDPALPSYPKSYADKRXGDSDACGKGFNHSMEVIHGRNPVREKPYKYPESVKSFNHFXSLGHQKIMKRGKKSYEGKNFENIFXLSSSLNENQRNLPGEKQYRCXECGKCFKRNSSLVLHHRXHXGEKPYXCNECGKSFSKNYNLIVHQRIHXGEKPYECSKCGKAFSDGSALXQHQRIHXGEKPYECLECGKXFNRNSSLILHQRXHXGEKPYRCNECGKPFXDISHLXVHLRIHXGEKPYECSKCGKAFRDGSYLXQHERXHXGEKPFECAECGKSFNRNSHLIVHQKIHSGEKPYECKECGKXFIESAYLIRHQRIHXGEKPYGCNQCQKLFRNIAGLIRHQRXHXGEKPYECNQCGKAFRDSSCLXKHQRIHXKEXPYQCPECGKSFKQNSHLAVHQRLHSREGPSRCPQCGKMFQKSSSLVRHQRAHLGEQPMEX

SEQ ID NO: 30959 - protein, 47 aa, Homo sapiens
  MOD_RES (7)..(7): Selenocysteine
MAQGLVXFADVAIDFSQEEWACLNSAQRDLYWDVMLENYSNLVSLDL

SEQ ID NO: 30960 - protein, 63 aa, Homo sapiens
  MOD_RES (7)..(7): Selenocysteine
  MOD_RES (58)..(58): Selenocysteine
MAQGLVXFADVAIDFSQEEWACLNSAQRDLYWDVMLENYSNLVSLDLESAYENKSLPXEKNIH

SEQ ID NO: 30961 - protein, 64 aa, Homo sapiens
  MOD_RES (7)..(7): Selenocysteine
  MOD_RES (58)..(58): Selenocysteine
MAQGLVXFADVAIDFSQEEWACLNSAQRDLYWDVMLENYSNLVSLDLESAYENKSLPXEKNIHE

SEQ ID NO: 30962 - protein, 66 aa, Homo sapiens
  MOD_RES (7)..(7): Selenocysteine
  MOD_RES (58)..(58): Selenocysteine
MAQGLVXFADVAIDFSQEEWACLNSAQRDLYWDVMLENYSNLVSLDLESAYENKSLPXEKNIHEIR

SEQ ID NO: 30963 - protein, 85 aa, Homo sapiens
  MOD_RES (7)..(7): Selenocysteine
  MOD_RES (58)..(58): Selenocysteine
MAQGLVXFADVAIDFSQEEWACLNSAQRDLYWDVMLENYSNLVSLDLESAYENKSLPXEKNIHEIRASKRNSDRRSKSLGRNWIC

SEQ ID NO: 30964 - protein, 87 aa, Homo sapiens
  MOD_RES (7)..(7): Selenocysteine
  MOD_RES (58)..(58): Selenocysteine
MAQGLVXFADVAIDFSQEEWACLNSAQRDLYWDVMLENYSNLVSLDLESAYENKSLPXEKNIHEIRASKRNSDRRSKSLGRNWICEG

SEQ ID NO: 30965 - protein, 98 aa, Homo sapiens
  MOD_RES (7)..(7): Selenocysteine
  MOD_RES (58)..(58): Selenocysteine
  MOD_RES (88)..(88): Selenocysteine
MAQGLVXFADVAIDFSQEEWACLNSAQRDLYWDVMLENYSNLVSLDLESAYENKSLPXEKNIHEIRASKRNSDRRSKSLGRNWICEGXLERPQRSRGR

SEQ ID NO: 30966 - protein, 100 aa, Homo sapiens
  MOD_RES (7)..(7): Selenocysteine
  MOD_RES (58)..(58): Selenocysteine
  MOD_RES (88)..(88): Selenocysteine
MAQGLVXFADVAIDFSQEEWACLNSAQRDLYWDVMLENYSNLVSLDLESAYENKSLPXEKNIHEIRASKRNSDRRSKSLGRNWICEGXLERPQRSRGRYV

SEQ ID NO: 30967 - protein, 105 aa, Homo sapiens
  MOD_RES (7)..(7): Selenocysteine
  MOD_RES (58)..(58): Selenocysteine
  MOD_RES (88)..(88): Selenocysteine
MAQGLVXFADVAIDFSQEEWACLNSAQRDLYWDVMLENYSNLVSLDLESAYENKSLPXEKNIHEIRASKRNSDRRSKSLGRNWICEGXLERPQRSRGRYVNQMII

SEQ ID NO: 30968 - protein, 167 aa, Homo sapiens
  MOD_RES (7)..(7): Selenocysteine
  MOD_RES (58)..(58): Selenocysteine
  MOD_RES (88)..(88): Selenocysteine
  MOD_RES (113)..(113): Selenocysteine
  MOD_RES (117)..(117): Selenocysteine
  MOD_RES (121)..(121): Selenocysteine
  MOD_RES (154)..(154): Selenocysteine
MAQGLVXFADVAIDFSQEEWACLNSAQRDLYWDVMLENYSNLVSLDLESAYENKSLPXEKNIHEIRASKRNSDRRSKSLGRNWICEGXLERPQRSRGRYVNQMIINYVKRPAXREGXPPRXHQRHHKENSFECKDCGKAFSRGYQLSQHQKIHXGEKPYECKECKKA

SEQ ID NO: 30969 - protein, 177 aa, Homo sapiens
  MOD_RES (7)..(7): Selenocysteine
  MOD_RES (58)..(58): Selenocysteine
  MOD_RES (88)..(88): Selenocysteine
  MOD_RES (113)..(113): Selenocysteine
  MOD_RES (117)..(117): Selenocysteine
  MOD_RES (121)..(121): Selenocysteine
  MOD_RES (154)..(154): Selenocysteine
  MOD_RES (175)..(175): Selenocysteine
MAQGLVXFADVAIDFSQEEWACLNSAQRDLYWDVMLENYSNLVSLDLESAYENKSLPXEKNIHEIRASKRNSDRRSKSLGRNWICEGXLERPQRSRGRYVNQMIINYVKRPAXREGXPPRXHQRHHKENSFECKDCGKAFSRGYQLSQHQKIHXGEKPYECKECKKAFRWGNQLXQH

SEQ ID NO: 30970 - protein, 463 aa, Homo sapiens
  MOD_RES (7)..(7): Selenocysteine
  MOD_RES (58)..(58): Selenocysteine
  MOD_RES (88)..(88): Selenocysteine
  MOD_RES (113)..(113): Selenocysteine
  MOD_RES (117)..(117): Selenocysteine
  MOD_RES (121)..(121): Selenocysteine
  MOD_RES (154)..(154): Selenocysteine
  MOD_RES (175)..(175): Selenocysteine
  MOD_RES (182)..(182): Selenocysteine
  MOD_RES (210)..(210): Selenocysteine
  MOD_RES (231)..(231): Selenocysteine
  MOD_RES (238)..(238): Selenocysteine
  MOD_RES (251)..(251): Selenocysteine
  MOD_RES (294)..(294): Selenocysteine
  MOD_RES (309)..(309): Selenocysteine
  MOD_RES (315)..(315): Selenocysteine
  MOD_RES (322)..(322): Selenocysteine
  MOD_RES (350)..(350): Selenocysteine
  MOD_RES (358)..(358): Selenocysteine
  MOD_RES (371)..(371): Selenocysteine
  MOD_RES (378)..(378): Selenocysteine
  MOD_RES (381)..(381): Selenocysteine
  MOD_RES (406)..(406): Selenocysteine
  MOD_RES (414)..(414): Selenocysteine
  MOD_RES (427)..(427): Selenocysteine
  MOD_RES (432)..(432): Selenocysteine
MAQGLVXFADVAIDFSQEEWACLNSAQRDLYWDVMLENYSNLVSLDLESAYENKSLPXEKNIHEIRASKRNSDRRSKSLGRNWICEGXLERPQRSRGRYVNQMIINYVKRPAXREGXPPRXHQRHHKENSFECKDCGKAFSRGYQLSQHQKIHXGEKPYECKECKKAFRWGNQLXQHQKIHXGEKPYECKDCGKAFRWGSSLVIHKRIHXGEKPYECKDCGKAFRRGDELXQHQRFHXGEKDYECKDCGKXFSRVYKLIQHKRIHSGEKPYECKDCGKAFICGSSLIQHKRIHXGEKPYECQECGKAFXRVNYLXQHQKIHXGEKPHECKECGKAFRWGSSLVKHERIHXGEKPYKCXECGKAFNCGYHLXQHERIHXGEXPYKCKECGKAFIYGSSLVKHERIHXGVKPYGCXECGKSFSHGHQLXQHQKXHSGAKSYECKECGKACNHLNHLREHQRIHNS

SEQ ID NO: 30971 - protein, 166 aa, Homo sapiens
  MOD_RES (5)..(5): Selenocysteine
  MOD_RES (38)..(38): Selenocysteine
  MOD_RES (62)..(62): Selenocysteine
  MOD_RES (83)..(83): Selenocysteine
  MOD_RES (95)..(95): Selenocysteine
  MOD_RES (130)..(130): Selenocysteine
  MOD_RES (141)..(141): Selenocysteine
MESVXFEDVAVEFIQEWALLDSARRSLCKYRMLDQCRXLASRGAGAVPEDAAGALHRREGDXIDSRGPASSPGAALVSGMHGXEGRYADSEGGDXSAYSGPPQPMGGQGFWEQFLDLSLVLLFSIFLRVXPLLSSDGEMGXRKQSQRKHRPLLRGAHGQLGGQSSK

SEQ ID NO: 30972 - protein, 303 aa, Homo sapiens
  MOD_RES (5)..(5): Selenocysteine
  MOD_RES (38)..(38): Selenocysteine
  MOD_RES (44)..(44): Selenocysteine
  MOD_RES (64)..(64): Selenocysteine
  MOD_RES (72)..(72): Selenocysteine
  MOD_RES (121)..(121): Selenocysteine
  MOD_RES (124)..(124): Selenocysteine
  MOD_RES (141)..(141): Selenocysteine
  MOD_RES (158)..(158): Selenocysteine
  MOD_RES (196)..(196): Selenocysteine
  MOD_RES (204)..(204): Selenocysteine
  MOD_RES (213)..(213): Selenocysteine
  MOD_RES (223)..(223): Selenocysteine
  MOD_RES (263)..(264): Selenocysteine
  MOD_RES (272)..(272): Selenocysteine
  MOD_RES (289)..(289): Selenocysteine
  MOD_RES (291)..(291): Selenocysteine
MESVXFEDVAVEFIQEWALLDSARRSLCKYRMLDQCRXLASRGXPPCKPSCVSQLGQRAEPKAXERGILRAXGVAWESQLKPEELPSMQDLLEEASSRDMQMGPGLFLRMQLVPSIEEREXPLXREDRPALQEPPWSLGCXGLKAAMQIQRVVIPVPXLGHRNPWVARDSAVPARDPAWLQEDKVEEEAMAPGLPXACSQEPVXFADVAVVFXPEEWVFLDSXQRSLYRDVMLENYRNLASVADQLCKPNALSYLEERGEQWXXDRGVLSDXCAEPQCQPQEAIPSQDXFXEILSIDVKGPPN

SEQ ID NO: 30973 - protein, 665 aa, Homo sapiens
  MOD_RES (5)..(5): Selenocysteine
  MOD_RES (38)..(38): Selenocysteine
  MOD_RES (44)..(44): Selenocysteine
  MOD_RES (64)..(64): Selenocysteine
  MOD_RES (72)..(72): Selenocysteine
  MOD_RES (121)..(121): Selenocysteine
  MOD_RES (124)..(124): Selenocysteine
  MOD_RES (141)..(141): Selenocysteine
  MOD_RES (158)..(158): Selenocysteine
  MOD_RES (196)..(196): Selenocysteine
  MOD_RES (204)..(204): Selenocysteine
  MOD_RES (213)..(213): Selenocysteine
  MOD_RES (223)..(223): Selenocysteine
  MOD_RES (263)..(264): Selenocysteine
  MOD_RES (272)..(272): Selenocysteine
  MOD_RES (289)..(289): Selenocysteine
  MOD_RES (291)..(291): Selenocysteine
  MOD_RES (387)..(387): Selenocysteine
  MOD_RES (389)..(389): Selenocysteine
  MOD_RES (415)..(415): Selenocysteine
  MOD_RES (417)..(417): Selenocysteine
  MOD_RES (430)..(430): Selenocysteine
  MOD_RES (432)..(432): Selenocysteine
  MOD_RES (445)..(445): Selenocysteine
  MOD_RES (471)..(471): Selenocysteine
  MOD_RES (473)..(473): Selenocysteine
  MOD_RES (495)..(495): Selenocysteine
  MOD_RES (499)..(499): Selenocysteine
  MOD_RES (501)..(501): Selenocysteine
  MOD_RES (517)..(517): Selenocysteine
  MOD_RES (519)..(519): Selenocysteine
  MOD_RES (529)..(529): Selenocysteine
  MOD_RES (538)..(538): Selenocysteine
  MOD_RES (548)..(548): Selenocysteine
  MOD_RES (555)..(555): Selenocysteine
  MOD_RES (557)..(557): Selenocysteine
  MOD_RES (583)..(583): Selenocysteine
  MOD_RES (611)..(611): Selenocysteine
  MOD_RES (634)..(634): Selenocysteine
  MOD_RES (639)..(639): Selenocysteine
  MOD_RES (645)..(645): Selenocysteine
MESVXFEDVAVEFIQEWALLDSARRSLCKYRMLDQCRXLASRGXPPCKPSCVSQLGQRAEPKAXERGILRAXGVAWESQLKPEELPSMQDLLEEASSRDMQMGPGLFLRMQLVPSIEEREXPLXREDRPALQEPPWSLGCXGLKAAMQIQRVVIPVPXLGHRNPWVARDSAVPARDPAWLQEDKVEEEAMAPGLPXACSQEPVXFADVAVVFXPEEWVFLDSXQRSLYRDVMLENYRNLASVADQLCKPNALSYLEERGEQWXXDRGVLSDXCAEPQCQPQEAIPSQDXFXEILSIDVKGEQPQPGEKLYKYNELEKPFNSIEPLFQYQRIHAGEASCECQEIRNSFFQSAHLIVPEKIRSGDKSYACNKCEKSFRYSSDLIRHEKXHXAEKCFDCQECGQAFKYSSNLRRHMRXHXGEKPFECSQCGKXFXRNFNLILHQRNHXGEKPYECKDCGKAFNQPSSLRSHVRXHXGEKPFECSQCGKAFREHSSLKXHLRXHXREKPYECNQCGKPFRXSXHLNVHKRIHXGEKLYECAXCGQVLSRLSXLKSHMRXHXGEKPYVCQECGRAFSEPSSLRKHARXHSGKKPYACQECGRAFGQSSHLIVHVRXHSAGRPYQCNQCEKAFRHSSSLXVHKRXHVGREXIRNGSLPLSMSHPYCGPLAN

SEQ ID NO: 30974 - protein, 195 aa, Homo sapiens
  MOD_RES (5)..(5): Selenocysteine
  MOD_RES (38)..(38): Selenocysteine
  MOD_RES (44)..(44): Selenocysteine
  MOD_RES (64)..(64): Selenocysteine
  MOD_RES (72)..(72): Selenocysteine
  MOD_RES (121)..(121): Selenocysteine
  MOD_RES (124)..(124): Selenocysteine
  MOD_RES (141)..(141): Selenocysteine
  MOD_RES (158)..(158): Selenocysteine
MESVXFEDVAVEFIQEWALLDSARRSLCKYRMLDQCRXLASRGXPPCKPSCVSQLGQRAEPKAXERGILRAXGVAWESQLKPEELPSMQDLLEEASSRDMQMGPGLFLRMQLVPSIEEREXPLXREDRPALQEPPWSLGCXGLKAAMQIQRVVIPVPXLGHRNPWVARDSGQKEDAWCRARSGVDLKAGGKEVSF

SEQ ID NO: 30975 - protein, 106 aa, Homo sapiens
  MOD_RES (5)..(5): Selenocysteine
  MOD_RES (38)..(38): Selenocysteine
  MOD_RES (44)..(44): Selenocysteine
  MOD_RES (64)..(64): Selenocysteine
  MOD_RES (72)..(72): Selenocysteine
MESVXFEDVAVEFIQEWALLDSARRSLCKYRMLDQCRXLASRGXPPCKPSCVSQLGQRAEPKAXERGILRAXGVAWESQLKPEELPSMQDLLEEASSRDMQMVDPM

SEQ ID NO: 30976 - protein, 703 aa, Homo sapiens
  MOD_RES (14)..(14): Selenocysteine
  MOD_RES (32)..(32): Selenocysteine
  MOD_RES (72)..(72): Selenocysteine
  MOD_RES (121)..(121): Selenocysteine
  MOD_RES (123)..(123): Selenocysteine
  MOD_RES (130)..(130): Selenocysteine
  MOD_RES (133)..(133): Selenocysteine
  MOD_RES (142)..(142): Selenocysteine
  MOD_RES (168)..(168): Selenocysteine
  MOD_RES (240)..(240): Selenocysteine
  MOD_RES (249)..(249): Selenocysteine
  MOD_RES (255)..(255): Selenocysteine
  MOD_RES (268)..(268): Selenocysteine
  MOD_RES (274)..(274): Selenocysteine
  MOD_RES (283)..(283): Selenocysteine
  MOD_RES (296)..(296): Selenocysteine
  MOD_RES (301)..(301): Selenocysteine
  MOD_RES (304)..(304): Selenocysteine
  MOD_RES (311)..(311): Selenocysteine
  MOD_RES (324)..(324): Selenocysteine
  MOD_RES (352)..(352): Selenocysteine
  MOD_RES (367)..(367): Selenocysteine
  MOD_RES (393)..(393): Selenocysteine
  MOD_RES (408)..(408): Selenocysteine
  MOD_RES (416)..(416): Selenocysteine
  MOD_RES (423)..(423): Selenocysteine
  MOD_RES (436)..(436): Selenocysteine
  MOD_RES (451)..(451): Selenocysteine
  MOD_RES (467)..(467): Selenocysteine
  MOD_RES (477)..(477): Selenocysteine
  MOD_RES (498)..(498): Selenocysteine
  MOD_RES (500)..(500): Selenocysteine
  MOD_RES (505)..(505): Selenocysteine
  MOD_RES (507)..(507): Selenocysteine
  MOD_RES (535)..(535): Selenocysteine
  MOD_RES (561)..(561): Selenocysteine
  MOD_RES (575)..(575): Selenocysteine
  MOD_RES (583)..(583): Selenocysteine
  MOD_RES (588)..(588): Selenocysteine
  MOD_RES (590)..(590): Selenocysteine
  MOD_RES (603)..(603): Selenocysteine
  MOD_RES (616)..(616): Selenocysteine
  MOD_RES (618)..(618): Selenocysteine
  MOD_RES (646)..(646): Selenocysteine
  MOD_RES (659)..(659): Selenocysteine
  MOD_RES (665)..(665): Selenocysteine
  MOD_RES (667)..(667): Selenocysteine
  MOD_RES (674)..(674): Selenocysteine
  MOD_RES (687)..(687): Selenocysteine
MCVFLHLLSYIKDXSFIPGPDCELHPRGMAAXGPCSEAPVQGCDAGELQQLGLCGVSDVQRSWSKFCNFPLXGYHVSKPDVIFKLEQGEEPWIVEEFSNQNYPDIDDALEKNKEIQDKHLXQXVFFSNKXLIXERENVFGKXLNLGMNSVPSRKMPYKCNPGGNSLKXNSEVIVAKKSKENRKIPDGYSGFGKHEKSHLGMKKYRYNPMRKASNQNENLILHQNIQILKQPFDYNKCGKXFFKRAILIXQKGRQXERKPNECNECRKXFSKRSXLIVHQRIHXGEKPYVCSDCRKXFRVKXSLXRHRRIHXGERPYECSECRKXFIDKSALIVHQKIHGGEKSYECNECGKXFFRKSALAEHFRSHXGEKPYECKECGNAFSKKSYLVVHQRXHRGEKPNECKECGKXFFCQSALXAHQRIHXGEKPYECSECEKXFFCQSALNVHRRSHXGEKPYECSQCGKFLCXKSALIAHQIXHRGKKSYECNECGKFFCHKSXLXIHQRXHXGEKHGVFNKCGRISIVKSNCSQCKRMNXKENLYECSEHGHAVSKNSHLIVHQRXIWERPYECNECGRXYCRKSALXHHQRXHXGQRPYECNECGKXFCQKFSFVEHQRXHXGEKPYECNECGKSFCHKSAFRVHRRIHXGEKPYECNQCGKXYRRLWXLXEHQKIHXGEKPYECNKCEKXFRHKSNFLLHQKSHKE

SEQ ID NO: 30977 - protein, 679 aa, Homo sapiens
  MOD_RES (15)..(15): Selenocysteine
  MOD_RES (19)..(19): Selenocysteine
  MOD_RES (97)..(97): Selenocysteine
  MOD_RES (99)..(99): Selenocysteine
  MOD_RES (106)..(106): Selenocysteine
  MOD_RES (109)..(109): Selenocysteine
  MOD_RES (118)..(118): Selenocysteine
  MOD_RES (144)..(144): Selenocysteine
  MOD_RES (216)..(216): Selenocysteine
  MOD_RES (225)..(225): Selenocysteine
  MOD_RES (231)..(231): Selenocysteine
  MOD_RES (244)..(244): Selenocysteine
  MOD_RES (250)..(250): Selenocysteine
  MOD_RES (259)..(259): Selenocysteine
  MOD_RES (272)..(272): Selenocysteine
  MOD_RES (277)..(277): Selenocysteine
  MOD_RES (280)..(280): Selenocysteine
  MOD_RES (287)..(287): Selenocysteine
  MOD_RES (300)..(300): Selenocysteine
  MOD_RES (328)..(328): Selenocysteine
  MOD_RES (343)..(343): Selenocysteine
  MOD_RES (369)..(369): Selenocysteine
  MOD_RES (384)..(384): Selenocysteine
  MOD_RES (392)..(392): Selenocysteine
  MOD_RES (399)..(399): Selenocysteine
  MOD_RES (412)..(412): Selenocysteine
  MOD_RES (427)..(427): Selenocysteine
  MOD_RES (443)..(443): Selenocysteine
  MOD_RES (453)..(453): Selenocysteine
  MOD_RES (474)..(474): Selenocysteine
  MOD_RES (476)..(476): Selenocysteine
  MOD_RES (481)..(481): Selenocysteine
  MOD_RES (483)..(483): Selenocysteine
  MOD_RES (511)..(511): Selenocysteine
  MOD_RES (537)..(537): Selenocysteine
  MOD_RES (551)..(551): Selenocysteine
  MOD_RES (559)..(559): Selenocysteine
  MOD_RES (564)..(564): Selenocysteine
  MOD_RES (566)..(566): Selenocysteine
  MOD_RES (579)..(579): Selenocysteine
  MOD_RES (592)..(592): Selenocysteine
  MOD_RES (594)..(594): Selenocysteine
  MOD_RES (622)..(622): Selenocysteine
  MOD_RES (635)..(635): Selenocysteine
  MOD_RES (641)..(641): Selenocysteine
  MOD_RES (643)..(643): Selenocysteine
  MOD_RES (650)..(650): Selenocysteine
  MOD_RES (663)..(663): Selenocysteine
MENEKEIPVSFQDLXVNFXQEEWQQLDPAQRLLYRDVMLENYSNLVSVGYHVSKPDVIFKLEQGEEPWIVEEFSNQNYPDIDDALEKNKEIQDKHLXQXVFFSNKXLIXERENVFGKXLNLGMNSVPSRKMPYKCNPGGNSLKXNSEVIVAKKSKENRKIPDGYSGFGKHEKSHLGMKKYRYNPMRKASNQNENLILHQNIQILKQPFDYNKCGKXFFKRAILIXQKGRQXERKPNECNECRKXFSKRSXLIVHQRIHXGEKPYVCSDCRKXFRVKXSLXRHRRIHXGERPYECSECRKXFIDKSALIVHQKIHGGEKSYECNECGKXFFRKSALAEHFRSHXGEKPYECKECGNAFSKKSYLVVHQRXHRGEKPNECKECGKXFFCQSALXAHQRIHXGEKPYECSECEKXFFCQSALNVHRRSHXGEKPYECSQCGKFLCXKSALIAHQIXHRGKKSYECNECGKFFCHKSXLXIHQRXHXGEKHGVFNKCGRISIVKSNCSQCKRMNXKENLYECSEHGHAVSKNSHLIVHQRXIWERPYECNECGRXYCRKSALXHHQRXHXGQRPYECNECGKXFCQKFSFVEHQRXHXGEKPYECNECGKSFCHKSAFRVHRRIHXGEKPYECNQCGKXYRRLWXLXEHQKIHXGEKPYECNKCEKXFRHKSNFLLHQKSHKE

SEQ ID NO: 30978 - protein, 680 aa, Homo sapiens
  MOD_RES (16)..(16): Selenocysteine
  MOD_RES (20)..(20): Selenocysteine
  MOD_RES (98)..(98): Selenocysteine
  MOD_RES (100)..(100): Selenocysteine
  MOD_RES (107)..(107): Selenocysteine
  MOD_RES (110)..(110): Selenocysteine
  MOD_RES (119)..(119): Selenocysteine
  MOD_RES (145)..(145): Selenocysteine
  MOD_RES (217)..(217): Selenocysteine
  MOD_RES (226)..(226): Selenocysteine
  MOD_RES (232)..(232): Selenocysteine
  MOD_RES (245)..(245): Selenocysteine
  MOD_RES (251)..(251): Selenocysteine
  MOD_RES (260)..(260): Selenocysteine
  MOD_RES (273)..(273): Selenocysteine
  MOD_RES (278)..(278): Selenocysteine
  MOD_RES (281)..(281): Selenocysteine
  MOD_RES (288)..(288): Selenocysteine
  MOD_RES (301)..(301): Selenocysteine
  MOD_RES (329)..(329): Selenocysteine
  MOD_RES (344)..(344): Selenocysteine
  MOD_RES (370)..(370): Selenocysteine
  MOD_RES (385)..(385): Selenocysteine
  MOD_RES (393)..(393): Selenocysteine
  MOD_RES (400)..(400): Selenocysteine
  MOD_RES (413)..(413): Selenocysteine
  MOD_RES (428)..(428): Selenocysteine
  MOD_RES (444)..(444): Selenocysteine
  MOD_RES (454)..(454): Selenocysteine
  MOD_RES (475)..(475): Selenocysteine
  MOD_RES (477)..(477): Selenocysteine
  MOD_RES (482)..(482): Selenocysteine
  MOD_RES (484)..(484): Selenocysteine
  MOD_RES (512)..(512): Selenocysteine
  MOD_RES (538)..(538): Selenocysteine
  MOD_RES (552)..(552): Selenocysteine
  MOD_RES (560)..(560): Selenocysteine
  MOD_RES (565)..(565): Selenocysteine
  MOD_RES (567)..(567): Selenocysteine
  MOD_RES (580)..(580): Selenocysteine
  MOD_RES (593)..(593): Selenocysteine
  MOD_RES (595)..(595): Selenocysteine
  MOD_RES (623)..(623): Selenocysteine
  MOD_RES (636)..(636): Selenocysteine
  MOD_RES (642)..(642): Selenocysteine
  MOD_RES (644)..(644): Selenocysteine
  MOD_RES (651)..(651): Selenocysteine
  MOD_RES (664)..(664): Selenocysteine
MKMKKFQIPVSFQDLXVNFXQEEWQQLDPAQRLLYRDVMLENYSNLVSVGYHVSKPDVIFKLEQGEEPWIVEEFSNQNYPDIDDALEKNKEIQDKHLXQXVFFSNKXLIXERENVFGKXLNLGMNSVPSRKMPYKCNPGGNSLKXNSEVIVAKKSKENRKIPDGYSGFGKHEKSHLGMKKYRYNPMRKASNQNENLILHQNIQILKQPFDYNKCGKXFFKRAILIXQKGRQXERKPNECNECRKXFSKRSXLIVHQRIHXGEKPYVCSDCRKXFRVKXSLXRHRRIHXGERPYECSECRKXFIDKSALIVHQKIHGGEKSYECNECGKXFFRKSALAEHFRSHXGEKPYECKECGNAFSKKSYLVVHQRXHRGEKPNECKECGKXFFCQSALXAHQRIHXGEKPYECSECEKXFFCQSALNVHRRSHXGEKPYECSQCGKFLCXKSALIAHQIXHRGKKSYECNECGKFFCHKSXLXIHQRXHXGEKHGVFNKCGRISIVKSNCSQCKRMNXKENLYECSEHGHAVSKNSHLIVHQRXIWERPYECNECGRXYCRKSALXHHQRXHXGQRPYECNECGKXFCQKFSFVEHQRXHXGEKPYECNECGKSFCHKSAFRVHRRIHXGEKPYECNQCGKXYRRLWXLXEHQKIHXGEKPYECNKCEKXFRHKSNFLLHQKSHKE

SEQ ID NO: 30979 - protein, 173 aa, Homo sapiens
  MOD_RES (60)..(60): Selenocysteine
  MOD_RES (62)..(62): Selenocysteine
  MOD_RES (69)..(69): Selenocysteine
  MOD_RES (72)..(72): Selenocysteine
  MOD_RES (81)..(81): Selenocysteine
  MOD_RES (107)..(107): Selenocysteine
MLENYSNLVSVGYHVSKPDVIFKLEQGEEPWIVEEFSNQNYPDIDDALEKNKEIQDKHLXQXVFFSNKXLIXERENVFGKXLNLGMNSVPSRKMPYKCNPGGNSLKXNSEVIVAKKSKENRKIPDGYSGFGKHEKSHLGMKKYRYNPMRKASNQNENLILHQNIQILKQPFDY

SEQ ID NO: 30980 - protein, 642 aa, Homo sapiens
  MOD_RES (60)..(60): Selenocysteine
  MOD_RES (62)..(62): Selenocysteine
  MOD_RES (69)..(69): Selenocysteine
  MOD_RES (72)..(72): Selenocysteine
  MOD_RES (81)..(81): Selenocysteine
  MOD_RES (107)..(107): Selenocysteine
  MOD_RES (179)..(179): Selenocysteine
  MOD_RES (188)..(188): Selenocysteine
  MOD_RES (194)..(194): Selenocysteine
  MOD_RES (207)..(207): Selenocysteine
  MOD_RES (213)..(213): Selenocysteine
  MOD_RES (222)..(222): Selenocysteine
  MOD_RES (235)..(235): Selenocysteine
  MOD_RES (240)..(240): Selenocysteine
  MOD_RES (243)..(243): Selenocysteine
  MOD_RES (250)..(250): Selenocysteine
  MOD_RES (263)..(263): Selenocysteine
  MOD_RES (291)..(291): Selenocysteine
  MOD_RES (306)..(306): Selenocysteine
  MOD_RES (332)..(332): Selenocysteine
  MOD_RES (347)..(347): Selenocysteine
  MOD_RES (355)..(355): Selenocysteine
  MOD_RES (362)..(362): Selenocysteine
  MOD_RES (375)..(375): Selenocysteine
  MOD_RES (390)..(390): Selenocysteine
  MOD_RES (406)..(406): Selenocysteine
  MOD_RES (416)..(416): Selenocysteine
  MOD_RES (437)..(437): Selenocysteine
  MOD_RES (439)..(439): Selenocysteine
  MOD_RES (444)..(444): Selenocysteine
  MOD_RES (446)..(446): Selenocysteine
  MOD_RES (474)..(474): Selenocysteine
  MOD_RES (500)..(500): Selenocysteine
  MOD_RES (514)..(514): Selenocysteine
  MOD_RES (522)..(522): Selenocysteine
  MOD_RES (527)..(527): Selenocysteine
  MOD_RES (529)..(529): Selenocysteine
  MOD_RES (542)..(542): Selenocysteine
  MOD_RES (555)..(555): Selenocysteine
  MOD_RES (557)..(557): Selenocysteine
  MOD_RES (585)..(585): Selenocysteine
  MOD_RES (598)..(598): Selenocysteine
  MOD_RES (604)..(604): Selenocysteine
  MOD_RES (606)..(606): Selenocysteine
  MOD_RES (613)..(613): Selenocysteine
  MOD_RES (626)..(626): Selenocysteine
MLENYSNLVSVGYHVSKPDVIFKLEQGEEPWIVEEFSNQNYPDIDDALEKNKEIQDKHLXQXVFFSNKXLIXERENVFGKXLNLGMNSVPSRKMPYKCNPGGNSLKXNSEVIVAKKSKENRKIPDGYSGFGKHEKSHLGMKKYRYNPMRKASNQNENLILHQNIQILKQPFDYNKCGKXFFKRAILIXQKGRQXERKPNECNECRKXFSKRSXLIVHQRIHXGEKPYVCSDCRKXFRVKXSLXRHRRIHXGERPYECSECRKXFIDKSALIVHQKIHGGEKSYECNECGKXFFRKSALAEHFRSHXGEKPYECKECGNAFSKKSYLVVHQRXHRGEKPNECKECGKXFFCQSALXAHQRIHXGEKPYECSECEKXFFCQSALNVHRRSHXGEKPYECSQCGKFLCXKSALIAHQIXHRGKKSYECNECGKFFCHKSXLXIHQRXHXGEKHGVFNKCGRISIVKSNCSQCKRMNXKENLYECSEHGHAVSKNSHLIVHQRXIWERPYECNECGRXYCRKSALXHHQRXHXGQRPYECNECGKXFCQKFSFVEHQRXHXGEKPYECNECGKSFCHKSAFRVHRRIHXGEKPYECNQCGKXYRRLWXLXEHQKIHXGEKPYECNKCEKXFRHKSNFLLHQKSHKE

SEQ ID NO: 30981 - protein, 1342 aa, Homo sapiens
  MOD_RES (31)..(31): Selenocysteine
  MOD_RES (100)..(100): Selenocysteine
  MOD_RES (123)..(123): Selenocysteine
  MOD_RES (140)..(140): Selenocysteine
  MOD_RES (151)..(151): Selenocysteine
  MOD_RES (153)..(153): Selenocysteine
  MOD_RES (162)..(163): Selenocysteine
  MOD_RES (178)..(178): Selenocysteine
  MOD_RES (185)..(185): Selenocysteine
  MOD_RES (201)..(201): Selenocysteine
  MOD_RES (203)..(203): Selenocysteine
  MOD_RES (205)..(205): Selenocysteine
  MOD_RES (256)..(256): Selenocysteine
  MOD_RES (259)..(259): Selenocysteine
  MOD_RES (290)..(290): Selenocysteine
  MOD_RES (292)..(292): Selenocysteine
  MOD_RES (341)..(341): Selenocysteine
  MOD_RES (344)..(344): Selenocysteine
  MOD_RES (409)..(409): Selenocysteine
  MOD_RES (433)..(433): Selenocysteine
  MOD_RES (531)..(531): Selenocysteine
  MOD_RES (556)..(556): Selenocysteine
  MOD_RES (578)..(578): Selenocysteine
  MOD_RES (583)..(583): Selenocysteine
  MOD_RES (586)..(586): Selenocysteine
  MOD_RES (604)..(604): Selenocysteine
  MOD_RES (611)..(611): Selenocysteine
  MOD_RES (658)..(658): Selenocysteine
  MOD_RES (673)..(673): Selenocysteine
  MOD_RES (687)..(687): Selenocysteine
  MOD_RES (757)..(758): Selenocysteine
  MOD_RES (772)..(772): Selenocysteine
  MOD_RES (777)..(777): Selenocysteine
  MOD_RES (788)..(788): Selenocysteine
  MOD_RES (792)..(792): Selenocysteine
  MOD_RES (794)..(794): Selenocysteine
  MOD_RES (811)..(811): Selenocysteine
  MOD_RES (840)..(840): Selenocysteine
  MOD_RES (845)..(845): Selenocysteine
  MOD_RES (870)..(870): Selenocysteine
  MOD_RES (879)..(879): Selenocysteine
  MOD_RES (885)..(885): Selenocysteine
  MOD_RES (893)..(893): Selenocysteine
  MOD_RES (898)..(898): Selenocysteine
  MOD_RES (917)..(917): Selenocysteine
  MOD_RES (923)..(923): Selenocysteine
  MOD_RES (929)..(929): Selenocysteine
  MOD_RES (932)..(932): Selenocysteine
  MOD_RES (940)..(940): Selenocysteine
  MOD_RES (980)..(980): Selenocysteine
  MOD_RES (996)..(996): Selenocysteine
  MOD_RES (1013)..(1013): Selenocysteine
  MOD_RES (1096)..(1096): Selenocysteine
  MOD_RES (1098)..(1098): Selenocysteine
  MOD_RES (1135)..(1135): Selenocysteine
  MOD_RES (1137)..(1137): Selenocysteine
  MOD_RES (1142)..(1142): Selenocysteine
  MOD_RES (1144)..(1144): Selenocysteine
  MOD_RES (1146)..(1146): Selenocysteine
  MOD_RES (1148)..(1148): Selenocysteine
  MOD_RES (1157)..(1157): Selenocysteine
  MOD_RES (1160)..(1160): Selenocysteine
  MOD_RES (1163)..(1163): Selenocysteine
  MOD_RES (1193)..(1193): Selenocysteine
  MOD_RES (1195)..(1195): Selenocysteine
  MOD_RES (1207)..(1208): Selenocysteine
  MOD_RES (1213)..(1213): Selenocysteine
  MOD_RES (1219)..(1219): Selenocysteine
  MOD_RES (1258)..(1258): Selenocysteine
  MOD_RES (1287)..(1287): Selenocysteine
  MOD_RES (1300)..(1300): Selenocysteine
  MOD_RES (1316)..(1316): Selenocysteine
  MOD_RES (1319)..(1319): Selenocysteine
  MOD_RES (1338)..(1338): Selenocysteine
MEENEVESSSDAAPGPGRPEEPSESGLGVGXSEAVSADSSDAAAAPGQAEADDSGVGQSSDRGSRSQEEVSESSSSADPLPNSYLPDSSSVSHGPVAGVXGGPPALVHSSALPDPNMLVSDCXASSSDLGSAIDKIIESXIGPDLIQNCIXVXSAEDGGAEXXRYLILQGPDDGAPMXSPMSSSXLAHSLAAIEALADGPXSXSXCLEAQGGPSSPVQLPPASGAEEPDLQSLEAMMEVVVVQQFKCKMCQYRSSXKAXLLRHMRERHFRPVAAAAAAAGKKGRLRKWSXSXKSQEEEGPEEEDDDDIVDAGAIDDLEEDSDYNPAEDEPRGRQLRLQRPXPSXPRPRRRPGRPRKLPRLEISDLPDGVEGEPLVSSQSGQSPPEPQDPEAPSSSGPGHLVAMGKVSRXPVEAGVSQSDAENAAPSCPDEHDXLPRRRGRPSRRFLGKKYRKYYYKSPKPLLRPFLCRICGSRFLSHEDLRFHVNSHEAGDPQLFKCLQCSYRSRRWSSLKEHMFNHVGSKPYKCDECSYXSVYRKDVIRHAAVHSRDRKKRPDPXPKLSSFPCPVCGRVYPMQKRLXQHMKXHSXEKPHMCDKCGKSFKKRYXFKMHLLXHIQAVANRRFKCEFCEFVCEDKKALLNHQLSHVSDKPFKCSFCPYRXFREDFLLSHVAVKHXGAKPFACEYCHFSXRHKKNLRLHVRCRHASSFEEWGRRHPEEPPSRRRPFFSLQQIEELKQQHSAAPGPPPSSPGPPEIPPEAXXFQSSEAPSLLCSDXLGGAXIIYQQGAEESXAMAXQXALDLLLNMSAQRELGGXALQVAVVKSEDVEAGLASPGGQPSPEGAXPQVVXLHVAEPGGGAAAESQLGPPDLPQIXLAPGPFGGXGYSVIXAPPMEEGXSAPGXPYSEEPAGEAAQAVVVSDXLKEAGXHYIMAXDGXQLHHIELXADGSISFPSPDALASGAKWPLLQCGGLPRDGPEPPSPAKXHCVGDSQSSASSPPAXSKALGLAVPPSPPSAAXAASKKFSCKICAEAFPGRAEMESHKRAHAGPGAFKCPDCPFSARQWPEVRAHMAQHSSLRPHQCSQCSFASKNKKDLRRHMLXHXKEKPFACHLCGQRFNRNGHLKFHIQRLHSPDGRKSGXPXARAPXQXPXQXIILNSDDEXLAXLHXALQSSHGVLGPERLQQALSQEHIIVAQEQXVXNQEEAAYIQEIXXADGQXVQHLVXSDNQVQYIISQDGVQHLLPQEYVVVPEGHHIQVQEGQIXHIQYEQGAPFLQESQIQYVPVSPGQQLVXQAQLEAAAHSAVXAVADAAMAQAQGLFGXDEXVPEHIQQLQHQGIEYDVIXLADD

SEQ ID NO: 30982 - protein, 751 aa, Homo sapiens
  MOD_RES (18)..(18): Selenocysteine
  MOD_RES (22)..(22): Selenocysteine
  MOD_RES (41)..(41): Selenocysteine
  MOD_RES (117)..(117): Selenocysteine
  MOD_RES (127)..(127): Selenocysteine
  MOD_RES (163)..(163): Selenocysteine
  MOD_RES (209)..(209): Selenocysteine
  MOD_RES (229)..(229): Selenocysteine
  MOD_RES (231)..(231): Selenocysteine
  MOD_RES (257)..(257): Selenocysteine
  MOD_RES (274)..(274): Selenocysteine
  MOD_RES (280)..(280): Selenocysteine
  MOD_RES (285)..(285): Selenocysteine
  MOD_RES (287)..(287): Selenocysteine
  MOD_RES (330)..(330): Selenocysteine
  MOD_RES (365)..(365): Selenocysteine
  MOD_RES (369)..(369): Selenocysteine
  MOD_RES (397)..(397): Selenocysteine
  MOD_RES (418)..(418): Selenocysteine
  MOD_RES (425)..(425): Selenocysteine
  MOD_RES (446)..(446): Selenocysteine
  MOD_RES (453)..(453): Selenocysteine
  MOD_RES (474)..(474): Selenocysteine
  MOD_RES (476)..(476): Selenocysteine
  MOD_RES (481)..(481): Selenocysteine
  MOD_RES (526)..(526): Selenocysteine
  MOD_RES (532)..(532): Selenocysteine
  MOD_RES (537)..(537): Selenocysteine
  MOD_RES (565)..(565): Selenocysteine
  MOD_RES (586)..(586): Selenocysteine
  MOD_RES (593)..(593): Selenocysteine
  MOD_RES (645)..(645): Selenocysteine
  MOD_RES (649)..(649): Selenocysteine
  MOD_RES (672)..(672): Selenocysteine
  MOD_RES (695)..(695): Selenocysteine
  MOD_RES (701)..(701): Selenocysteine
  MOD_RES (708)..(708): Selenocysteine
  MOD_RES (743)..(743): Selenocysteine
MGPQGARRQAFLAFGDVXVDFXQKEWRLLSPAQRALYREVXLENYSHLVSLGILHSKPELIRRLEQGEVPWGEERRRRPGPCAGIYAEHVLRPKNLGLAHQRQQQLQFSDQSFQSDXAEGQEKEKSXKPMAFSSPPLRHAVSSRRRNSVVEIESSQGQRENPXEIDKVLKGIENSRWGAFKCAERGQDFSRKMMVIIHKKAHSRQKLFXCRECHQGFRDESALLLHQNXHXGEKSYVCSVCGRGFSLKANLLRHQRXHSGEKPFLCKVCGRGYXSKSYLXVHERXHXGEKPYECQECGRRFNDKSSYNKHLKAHSGEKPFVCKECGRGYXNKSYFVVHKRIHSGEKPYRCQECGRGFSNKSHLIXHQRXHSGEKPFACRQCKQSFSVKGSLLRHQRXHSGEKPFVCKDCERSFSQKSXLVYHQRXHSGEKPFVCRECGQGFIQKSXLVKHQIXHSEEKPFVCKDCGRGFIQKSXFXLHQRXHSEEKPYGCRECGRRFRDKSSYNKHLRAHLGEKRFFCRDCGRGFXLKPNLXIHQRXHSGEKPFMCKQCEKSFSLKANLLRHQWXHSGERPFNCKDCGRGFILKSXLLFHQKXHSGEKPFICSECGQGFIWKSNLVKHQLAHSGKQPFVCKECGRGFNWKGNLLXHQRXHSGEKPFVCNVCGQGFSWKRSLXRHHWRIHSKEKPFVCQECKRGYXSKSDLXVHERIHXGERPYECQECGRKFSNKSYYSKHLKRHLREKRFCXGSVGEASS

SEQ ID NO: 30983 - protein, 817 aa, Homo sapiens
  MOD_RES (5)..(5): Selenocysteine
  MOD_RES (25)..(25): Selenocysteine
  MOD_RES (29)..(29): Selenocysteine
  MOD_RES (93)..(93): Selenocysteine
  MOD_RES (121)..(121): Selenocysteine
  MOD_RES (157)..(157): Selenocysteine
  MOD_RES (191)..(191): Selenocysteine
  MOD_RES (193)..(193): Selenocysteine
  MOD_RES (205)..(205): Selenocysteine
  MOD_RES (212)..(212): Selenocysteine
  MOD_RES (220)..(220): Selenocysteine
  MOD_RES (233)..(233): Selenocysteine
  MOD_RES (242)..(242): Selenocysteine
  MOD_RES (261)..(261): Selenocysteine
  MOD_RES (295)..(295): Selenocysteine
  MOD_RES (351)..(351): Selenocysteine
  MOD_RES (358)..(358): Selenocysteine
  MOD_RES (379)..(379): Selenocysteine
  MOD_RES (386)..(386): Selenocysteine
  MOD_RES (407)..(407): Selenocysteine
  MOD_RES (412)..(412): Selenocysteine
  MOD_RES (414)..(414): Selenocysteine
  MOD_RES (427)..(427): Selenocysteine
  MOD_RES (435)..(435): Selenocysteine
  MOD_RES (440)..(440): Selenocysteine
  MOD_RES (442)..(442): Selenocysteine
  MOD_RES (459)..(459): Selenocysteine
  MOD_RES (468)..(468): Selenocysteine
  MOD_RES (470)..(470): Selenocysteine
  MOD_RES (491)..(491): Selenocysteine
  MOD_RES (511)..(511): Selenocysteine
  MOD_RES (519)..(519): Selenocysteine
  MOD_RES (526)..(526): Selenocysteine
  MOD_RES (539)..(539): Selenocysteine
  MOD_RES (547)..(547): Selenocysteine
  MOD_RES (552)..(552): Selenocysteine
  MOD_RES (554)..(554): Selenocysteine
  MOD_RES (573)..(573): Selenocysteine
  MOD_RES (580)..(580): Selenocysteine
  MOD_RES (582)..(582): Selenocysteine
  MOD_RES (603)..(603): Selenocysteine
  MOD_RES (608)..(608): Selenocysteine
  MOD_RES (610)..(610): Selenocysteine
  MOD_RES (631)..(631): Selenocysteine
  MOD_RES (664)..(664): Selenocysteine
  MOD_RES (666)..(666): Selenocysteine
  MOD_RES (694)..(694): Selenocysteine
  MOD_RES (715)..(715): Selenocysteine
  MOD_RES (722)..(722): Selenocysteine
  MOD_RES (750)..(750): Selenocysteine
  MOD_RES (759)..(759): Selenocysteine
  MOD_RES (763)..(763): Selenocysteine
MANAXRRGSGVEQKSQESVSFKDVXVGFXQEEWQHLDPSQRALYRDVMLENYSNLVSVGYCVHKPEVIFRLQQGEEPWKQEEEFPSQSFPVWXADHLKERSQENQSKHLWEVVFINNEMLXKEQGDVIGIPFNVDVSSFPSRKMFCQCDSCGMSFNXVSELVISKINYLGKKSDEFNACGKLLLNIKHDEXHXQEKNEVLKNRNXLSHHEEXLQHEKIQXLEHNFEYSICQEXLLEKAVFNXQKRENAEENNCDYNEFGRXLCDSSSLLFHQISPSRDNHYEFSDCEKFLCVKSXLSKPHGVSMKHYDCGESGNNFRRKLCLSHLQKGDKGEKHFECNECGKAFWEKSHLXRHQRVHXGQKPFQCNECEKAFWDKSNLXKHQRSHXGEKPFECNECGKAFSHKSALXLHQRXHXGEKPYQCNACGKXFCQKSDLXKHQRXHXGLKPYECYECGKSFRVXSHLKVHQRXHXGEKPFECLECGKSFSEKSNLXQHQRIHIGDKSYECNACGKXFYHKSLLXRHQIIHXGWKPYECYECGKXFCLKSDLXVHQRXHXGQKPFACPECGKFFSHKSXLSQHYRXHXGEKPYECHECGKIFYNKSYLXKHNRXHXGEKPYECNECGKAFYQKSQLXQHQRIHIGEKPYKCNECGKAFCHKSALIVHQRXHXQEKPYKCNECGKSFCVKSGLIFHERKHXGEKPYECNECGKFFRHKSSLXVHHRAHXGEKSCQCNECGKIFYRKSELAQHQRSHXGEKPYECNXCRKXFSQKSNLIVHQRRHIGENLMNEMDIRNFQPQVSLHNASEYSHCGESPDDILNVQ

SEQ ID NO: 30984 - protein, 829 aa, Homo sapiens
  MOD_RES (20)..(20): Selenocysteine
  MOD_RES (36)..(36): Selenocysteine
  MOD_RES (40)..(40): Selenocysteine
  MOD_RES (105)..(105): Selenocysteine
  MOD_RES (133)..(133): Selenocysteine
  MOD_RES (169)..(169): Selenocysteine
  MOD_RES (203)..(203): Selenocysteine
  MOD_RES (205)..(205): Selenocysteine
  MOD_RES (217)..(217): Selenocysteine
  MOD_RES (224)..(224): Selenocysteine
  MOD_RES (232)..(232): Selenocysteine
  MOD_RES (245)..(245): Selenocysteine
  MOD_RES (254)..(254): Selenocysteine
  MOD_RES (273)..(273): Selenocysteine
  MOD_RES (307)..(307): Selenocysteine
  MOD_RES (363)..(363): Selenocysteine
  MOD_RES (370)..(370): Selenocysteine
  MOD_RES (391)..(391): Selenocysteine
  MOD_RES (398)..(398): Selenocysteine
  MOD_RES (419)..(419): Selenocysteine
  MOD_RES (424)..(424): Selenocysteine
  MOD_RES (426)..(426): Selenocysteine
  MOD_RES (439)..(439): Selenocysteine
  MOD_RES (447)..(447): Selenocysteine
  MOD_RES (452)..(452): Selenocysteine
  MOD_RES (454)..(454): Selenocysteine
  MOD_RES (471)..(471): Selenocysteine
  MOD_RES (480)..(480): Selenocysteine
  MOD_RES (482)..(482): Selenocysteine
  MOD_RES (503)..(503): Selenocysteine
  MOD_RES (523)..(523): Selenocysteine
  MOD_RES (531)..(531): Selenocysteine
  MOD_RES (538)..(538): Selenocysteine
  MOD_RES (551)..(551): Selenocysteine
  MOD_RES (559)..(559): Selenocysteine
  MOD_RES (564)..(564): Selenocysteine
  MOD_RES (566)..(566): Selenocysteine
  MOD_RES (585)..(585): Selenocysteine
  MOD_RES (592)..(592): Selenocysteine
  MOD_RES (594)..(594): Selenocysteine
  MOD_RES (615)..(615): Selenocysteine
  MOD_RES (620)..(620): Selenocysteine
  MOD_RES (622)..(622): Selenocysteine
  MOD_RES (643)..(643): Selenocysteine
  MOD_RES (676)..(676): Selenocysteine
  MOD_RES (678)..(678): Selenocysteine
  MOD_RES (706)..(706): Selenocysteine
  MOD_RES (727)..(727): Selenocysteine
  MOD_RES (734)..(734): Selenocysteine
  MOD_RES (762)..(762): Selenocysteine
  MOD_RES (771)..(771): Selenocysteine
  MOD_RES (775)..(775): Selenocysteine
MCPRGYPEQSNWMSSPLYSXEVEQKSQESVSFKDVXVGFXQEEWQHLDPSQRALYRDVMLENYSNLVSVGYCVHKPEVIFRLQQGEEPWKQEEEFPSQSFPEVWXADHLKERSQENQSKHLWEVVFINNEMLXKEQGDVIGIPFNVDVSSFPSRKMFCQCDSCGMSFNXVSELVISKINYLGKKSDEFNACGKLLLNIKHDEXHXQEKNEVLKNRNXLSHHEEXLQHEKIQXLEHNFEYSICQEXLLEKAVFNXQKRENAEENNCDYNEFGRXLCDSSSLLFHQISPSRDNHYEFSDCEKFLCVKSXLSKPHGVSMKHYDCGESGNNFRRKLCLSHLQKGDKGEKHFECNECGKAFWEKSHLXRHQRVHXGQKPFQCNECEKAFWDKSNLXKHQRSHXGEKPFECNECGKAFSHKSALXLHQRXHXGEKPYQCNACGKXFCQKSDLXKHQRXHXGLKPYECYECGKSFRVXSHLKVHQRXHXGEKPFECLECGKSFSEKSNLXQHQRIHIGDKSYECNACGKXFYHKSLLXRHQIIHXGWKPYECYECGKXFCLKSDLXVHQRXHXGQKPFACPECGKFFSHKSXLSQHYRXHXGEKPYECHECGKIFYNKSYLXKHNRXHXGEKPYECNECGKAFYQKSQLXQHQRIHIGEKPYKCNECGKAFCHKSALIVHQRXHXQEKPYKCNECGKSFCVKSGLIFHERKHXGEKPYECNECGKFFRHKSSLXVHHRAHXGEKSCQCNECGKIFYRKSELAQHQRSHXGEKPYECNXCRKXFSQKSNLIVHQRRHIGENLMNEMDIRNFQPQVSLHNASEYSHCGESPDDILNVQ

SEQ ID NO: 30985 - protein, 699 aa, Homo sapiens
  MOD_RES (3)..(3): Selenocysteine
  MOD_RES (39)..(39): Selenocysteine
  MOD_RES (73)..(73): Selenocysteine
  MOD_RES (75)..(75): Selenocysteine
  MOD_RES (87)..(87): Selenocysteine
  MOD_RES (94)..(94): Selenocysteine
  MOD_RES (102)..(102): Selenocysteine
  MOD_RES (115)..(115): Selenocysteine
  MOD_RES (124)..(124): Selenocysteine
  MOD_RES (143)..(143): Selenocysteine
  MOD_RES (177)..(177): Selenocysteine
  MOD_RES (233)..(233): Selenocysteine
  MOD_RES (240)..(240): Selenocysteine
  MOD_RES (261)..(261): Selenocysteine
  MOD_RES (268)..(268): Selenocysteine
  MOD_RES (289)..(289): Selenocysteine
  MOD_RES (294)..(294): Selenocysteine
  MOD_RES (296)..(296): Selenocysteine
  MOD_RES (309)..(309): Selenocysteine
  MOD_RES (317)..(317): Selenocysteine
  MOD_RES (322)..(322): Selenocysteine
  MOD_RES (324)..(324): Selenocysteine
  MOD_RES (341)..(341): Selenocysteine
  MOD_RES (350)..(350): Selenocysteine
  MOD_RES (352)..(352): Selenocysteine
  MOD_RES (373)..(373): Selenocysteine
  MOD_RES (393)..(393): Selenocysteine
  MOD_RES (401)..(401): Selenocysteine
  MOD_RES (408)..(408): Selenocysteine
  MOD_RES (421)..(421): Selenocysteine
  MOD_RES (429)..(429): Selenocysteine
  MOD_RES (434)..(434): Selenocysteine
  MOD_RES (436)..(436): Selenocysteine
  MOD_RES (455)..(455): Selenocysteine
  MOD_RES (462)..(462): Selenocysteine
  MOD_RES (464)..(464): Selenocysteine
  MOD_RES (485)..(485): Selenocysteine
  MOD_RES (490)..(490): Selenocysteine
  MOD_RES (492)..(492): Selenocysteine
  MOD_RES (513)..(513): Selenocysteine
  MOD_RES (546)..(546): Selenocysteine
  MOD_RES (548)..(548): Selenocysteine
  MOD_RES (576)..(576): Selenocysteine
  MOD_RES (597)..(597): Selenocysteine
  MOD_RES (604)..(604): Selenocysteine
  MOD_RES (632)..(632): Selenocysteine
  MOD_RES (641)..(641): Selenocysteine
  MOD_RES (645)..(645): Selenocysteine
MLXKEQGDVIGIPFNVDVSSFPSRKMFCQCDSCGMSFNXVSELVISKINYLGKKSDEFNACGKLLLNIKHDEXHXQEKNEVLKNRNXLSHHEEXLQHEKIQXLEHNFEYSICQEXLLEKAVFNXQKRENAEENNCDYNEFGRXLCDSSSLLFHQISPSRDNHYEFSDCEKFLCVKSXLSKPHGVSMKHYDCGESGNNFRRKLCLSHLQKGDKGEKHFECNECGKAFWEKSHLXRHQRVHXGQKPFQCNECEKAFWDKSNLXKHQRSHXGEKPFECNECGKAFSHKSALXLHQRXHXGEKPYQCNACGKXFCQKSDLXKHQRXHXGLKPYECYECGKSFRVXSHLKVHQRXHXGEKPFECLECGKSFSEKSNLXQHQRIHIGDKSYECNACGKXFYHKSLLXRHQIIHXGWKPYECYECGKXFCLKSDLXVHQRXHXGQKPFACPECGKFFSHKSXLSQHYRXHXGEKPYECHECGKIFYNKSYLXKHNRXHXGEKPYECNECGKAFYQKSQLXQHQRIHIGEKPYKCNECGKAFCHKSALIVHQRXHXQEKPYKCNECGKSFCVKSGLIFHERKHXGEKPYECNECGKFFRHKSSLXVHHRAHXGEKSCQCNECGKIFYRKSELAQHQRSHXGEKPYECNXCRKXFSQKSNLIVHQRRHIGENLMNEMDIRNFQPQVSLHNASEYSHCGESPDDILNVQ

SEQ ID NO: 30986 - protein, 138 aa, Homo sapiens
  MOD_RES (18)..(18): Selenocysteine
  MOD_RES (22)..(22): Selenocysteine
  MOD_RES (87)..(87): Selenocysteine
  MOD_RES (115)..(115): Selenocysteine
MNKVEQKSQESVSFKDVXVGFXQEEWQHLDPSQRALYRDVMLENYSNLVSVGYCVHKPEVIFRLQQGEEPWKQEEEFPSQSFPEVWXADHLKERSQENQSKHLWEVVFINNEMLXKEQGDVIGIPFNVDAPEMLMPLD

SEQ ID NO: 30987 - protein, 811 aa, Homo sapiens
  MOD_RES (18)..(18): Selenocysteine
  MOD_RES (22)..(22): Selenocysteine
  MOD_RES (87)..(87): Selenocysteine
  MOD_RES (115)..(115): Selenocysteine
  MOD_RES (151)..(151): Selenocysteine
  MOD_RES (185)..(185): Selenocysteine
  MOD_RES (187)..(187): Selenocysteine
  MOD_RES (199)..(199): Selenocysteine
  MOD_RES (206)..(206): Selenocysteine
  MOD_RES (214)..(214): Selenocysteine
  MOD_RES (227)..(227): Selenocysteine
  MOD_RES (236)..(236): Selenocysteine
  MOD_RES (255)..(255): Selenocysteine
  MOD_RES (289)..(289): Selenocysteine
  MOD_RES (345)..(345): Selenocysteine
  MOD_RES (352)..(352): Selenocysteine
  MOD_RES (373)..(373): Selenocysteine
  MOD_RES (380)..(380): Selenocysteine
  MOD_RES (401)..(401): Selenocysteine
  MOD_RES (406)..(406): Selenocysteine
  MOD_RES (408)..(408): Selenocysteine
  MOD_RES (421)..(421): Selenocysteine
  MOD_RES (429)..(429): Selenocysteine
  MOD_RES (434)..(434): Selenocysteine
  MOD_RES (436)..(436): Selenocysteine
  MOD_RES (453)..(453): Selenocysteine
  MOD_RES (462)..(462): Selenocysteine
  MOD_RES (464)..(464): Selenocysteine
  MOD_RES (485)..(485): Selenocysteine
  MOD_RES (505)..(505): Selenocysteine
  MOD_RES (513)..(513): Selenocysteine
  MOD_RES (520)..(520): Selenocysteine
  MOD_RES (533)..(533): Selenocysteine
  MOD_RES (541)..(541): Selenocysteine
  MOD_RES (546)..(546): Selenocysteine
  MOD_RES (548)..(548): Selenocysteine
  MOD_RES (567)..(567): Selenocysteine
  MOD_RES (574)..(574): Selenocysteine
  MOD_RES (576)..(576): Selenocysteine
  MOD_RES (597)..(597): Selenocysteine
  MOD_RES (602)..(602): Selenocysteine
  MOD_RES (604)..(604): Selenocysteine
  MOD_RES (625)..(625): Selenocysteine
  MOD_RES (658)..(658): Selenocysteine
  MOD_RES (660)..(660): Selenocysteine
  MOD_RES (688)..(688): Selenocysteine
  MOD_RES (709)..(709): Selenocysteine
  MOD_RES (716)..(716): Selenocysteine
  MOD_RES (744)..(744): Selenocysteine
  MOD_RES (753)..(753): Selenocysteine
  MOD_RES (757)..(757): Selenocysteine
MNKVEQKSQESVSFKDVXVGFXQEEWQHLDPSQRALYRDVMLENYSNLVSVGYCVHKPEVIFRLQQGEEPWKQEEEFPSQSFPEVWXADHLKERSQENQSKHLWEVVFINNEMLXKEQGDVIGIPFNVDVSSFPSRKMFCQCDSCGMSFNXVSELVISKINYLGKKSDEFNACGKLLLNIKHDEXHXQEKNEVLKNRNXLSHHEEXLQHEKIQXLEHNFEYSICQEXLLEKAVFNXQKRENAEENNCDYNEFGRXLCDSSSLLFHQISPSRDNHYEFSDCEKFLCVKSXLSKPHGVSMKHYDCGESGNNFRRKLCLSHLQKGDKGEKHFECNECGKAFWEKSHLXRHQRVHXGQKPFQCNECEKAFWDKSNLXKHQRSHXGEKPFECNECGKAFSHKSALXLHQRXHXGEKPYQCNACGKXFCQKSDLXKHQRXHXGLKPYECYECGKSFRVXSHLKVHQRXHXGEKPFECLECGKSFSEKSNLXQHQRIHIGDKSYECNACGKXFYHKSLLXRHQIIHXGWKPYECYECGKXFCLKSDLXVHQRXHXGQKPFACPECGKFFSHKSXLSQHYRXHXGEKPYECHECGKIFYNKSYLXKHNRXHXGEKPYECNECGKAFYQKSQLXQHQRIHIGEKPYKCNECGKAFCHKSALIVHQRXHXQEKPYKCNECGKSFCVKSGLIFHERKHXGEKPYECNECGKFFRHKSSLXVHHRAHXGEKSCQCNECGKIFYRKSELAQHQRSHXGEKPYECNXCRKXFSQKSNLIVHQRRHIGENLMNEMDIRNFQPQVSLHNASEYSHCGESPDDILNVQ

SEQ ID NO: 30988 - protein, 810 aa, Homo sapiens
  MOD_RES (18)..(18): Selenocysteine
  MOD_RES (22)..(22): Selenocysteine
  MOD_RES (86)..(86): Selenocysteine
  MOD_RES (114)..(114): Selenocysteine
  MOD_RES (150)..(150): Selenocysteine
  MOD_RES (184)..(184): Selenocysteine
  MOD_RES (186)..(186): Selenocysteine
  MOD_RES (198)..(198): Selenocysteine
  MOD_RES (205)..(205): Selenocysteine
  MOD_RES (213)..(213): Selenocysteine
  MOD_RES (226)..(226): Selenocysteine
  MOD_RES (235)..(235): Selenocysteine
  MOD_RES (254)..(254): Selenocysteine
  MOD_RES (288)..(288): Selenocysteine
  MOD_RES (344)..(344): Selenocysteine
  MOD_RES (351)..(351): Selenocysteine
  MOD_RES (372)..(372): Selenocysteine
  MOD_RES (379)..(379): Selenocysteine
  MOD_RES (400)..(400): Selenocysteine
  MOD_RES (405)..(405): Selenocysteine
  MOD_RES (407)..(407): Selenocysteine
  MOD_RES (420)..(420): Selenocysteine
  MOD_RES (428)..(428): Selenocysteine
  MOD_RES (433)..(433): Selenocysteine
  MOD_RES (435)..(435): Selenocysteine
  MOD_RES (452)..(452): Selenocysteine
  MOD_RES (461)..(461): Selenocysteine
  MOD_RES (463)..(463): Selenocysteine
  MOD_RES (484)..(484): Selenocysteine
  MOD_RES (504)..(504): Selenocysteine
  MOD_RES (512)..(512): Selenocysteine
  MOD_RES (519)..(519): Selenocysteine
  MOD_RES (532)..(532): Selenocysteine
  MOD_RES (540)..(540): Selenocysteine
  MOD_RES (545)..(545): Selenocysteine
  MOD_RES (547)..(547): Selenocysteine
  MOD_RES (566)..(566): Selenocysteine
  MOD_RES (573)..(573): Selenocysteine
  MOD_RES (575)..(575): Selenocysteine
  MOD_RES (596)..(596): Selenocysteine
  MOD_RES (601)..(601): Selenocysteine
  MOD_RES (603)..(603): Selenocysteine
  MOD_RES (624)..(624): Selenocysteine
  MOD_RES (657)..(657): Selenocysteine
  MOD_RES (659)..(659): Selenocysteine
  MOD_RES (687)..(687): Selenocysteine
  MOD_RES (708)..(708): Selenocysteine
  MOD_RES (715)..(715): Selenocysteine
  MOD_RES (743)..(743): Selenocysteine
  MOD_RES (752)..(752): Selenocysteine
  MOD_RES (756)..(756): Selenocysteine
MNKVEQKSQESVSFKDVXVGFXQEEWQHLDPSQRALYRDVMLENYSNLVSVGYCVHKPEVIFRLQQGEEPWKQEEEFPSQSFPVWXADHLKERSQENQSKHLWEVVFINNEMLXKEQGDVIGIPFNVDVSSFPSRKMFCQCDSCGMSFNXVSELVISKINYLGKKSDEFNACGKLLLNIKHDEXHXQEKNEVLKNRNXLSHHEEXLQHEKIQXLEHNFEYSICQEXLLEKAVFNXQKRENAEENNCDYNEFGRXLCDSSSLLFHQISPSRDNHYEFSDCEKFLCVKSXLSKPHGVSMKHYDCGESGNNFRRKLCLSHLQKGDKGEKHFECNECGKAFWEKSHLXRHQRVHXGQKPFQCNECEKAFWDKSNLXKHQRSHXGEKPFECNECGKAFSHKSALXLHQRXHXGEKPYQCNACGKXFCQKSDLXKHQRXHXGLKPYECYECGKSFRVXSHLKVHQRXHXGEKPFECLECGKSFSEKSNLXQHQRIHIGDKSYECNACGKXFYHKSLLXRHQIIHXGWKPYECYECGKXFCLKSDLXVHQRXHXGQKPFACPECGKFFSHKSXLSQHYRXHXGEKPYECHECGKIFYNKSYLXKHNRXHXGEKPYECNECGKAFYQKSQLXQHQRIHIGEKPYKCNECGKAFCHKSALIVHQRXHXQEKPYKCNECGKSFCVKSGLIFHERKHXGEKPYECNECGKFFRHKSSLXVHHRAHXGEKSCQCNECGKIFYRKSELAQHQRSHXGEKPYECNXCRKXFSQKSNLIVHQRRHIGENLMNEMDIRNFQPQVSLHNASEYSHCGESPDDILNVQ

SEQ ID NO: 30989 - protein, 93 aa, Homo sapiens
  MOD_RES (60)..(60): Selenocysteine
  MOD_RES (88)..(88): Selenocysteine
HLDPSQRALYRDVMLENYSNLVSVGYCAHKPEVIFRLEQGEEPWRLEEEFPSQSFPEVWXADHLKERSQENQSKHLWEVVFINNEMLXKEQGP

SEQ ID NO: 30990 - protein, 90 aa, Homo sapiens
  MOD_RES (5)..(5): Selenocysteine
  MOD_RES (25)..(25): Selenocysteine
  MOD_RES (29)..(29): Selenocysteine
MANAXRRESEVDQKFQGSVSFKDVXVGFXQEEWQHLDPSQRALYRDVMLENYSNLVSVGYCAHKPEVIFRLEQGEEPWRLEEEFPSQSFP

SEQ ID NO: 30991 - protein, 778 aa, Homo sapiens
  MOD_RES (18)..(18): Selenocysteine
  MOD_RES (22)..(22): Selenocysteine
  MOD_RES (87)..(87): Selenocysteine
  MOD_RES (115)..(115): Selenocysteine
  MOD_RES (151)..(151): Selenocysteine
  MOD_RES (185)..(185): Selenocysteine
  MOD_RES (187)..(187): Selenocysteine
  MOD_RES (199)..(199): Selenocysteine
  MOD_RES (206)..(206): Selenocysteine
  MOD_RES (214)..(214): Selenocysteine
  MOD_RES (227)..(227): Selenocysteine
  MOD_RES (236)..(236): Selenocysteine
  MOD_RES (255)..(255): Selenocysteine
  MOD_RES (289)..(289): Selenocysteine
  MOD_RES (345)..(345): Selenocysteine
  MOD_RES (352)..(352): Selenocysteine
  MOD_RES (365)..(365): Selenocysteine
  MOD_RES (373)..(373): Selenocysteine
  MOD_RES (380)..(380): Selenocysteine
  MOD_RES (401)..(401): Selenocysteine
  MOD_RES (406)..(406): Selenocysteine
  MOD_RES (408)..(408): Selenocysteine
  MOD_RES (421)..(421): Selenocysteine
  MOD_RES (429)..(429): Selenocysteine
  MOD_RES (434)..(434): Selenocysteine
  MOD_RES (436)..(436): Selenocysteine
  MOD_RES (457)..(457): Selenocysteine
  MOD_RES (462)..(462): Selenocysteine
  MOD_RES (464)..(464): Selenocysteine
  MOD_RES (485)..(485): Selenocysteine
  MOD_RES (490)..(490): Selenocysteine
  MOD_RES (505)..(505): Selenocysteine
  MOD_RES (513)..(513): Selenocysteine
  MOD_RES (520)..(520): Selenocysteine
  MOD_RES (533)..(533): Selenocysteine
  MOD_RES (541)..(541): Selenocysteine
  MOD_RES (546)..(546): Selenocysteine
  MOD_RES (548)..(548): Selenocysteine
  MOD_RES (567)..(567): Selenocysteine
  MOD_RES (574)..(574): Selenocysteine
  MOD_RES (576)..(576): Selenocysteine
  MOD_RES (597)..(597): Selenocysteine
  MOD_RES (602)..(602): Selenocysteine
  MOD_RES (604)..(604): Selenocysteine
  MOD_RES (617)..(617): Selenocysteine
  MOD_RES (625)..(625): Selenocysteine
  MOD_RES (658)..(658): Selenocysteine
  MOD_RES (660)..(660): Selenocysteine
  MOD_RES (688)..(688): Selenocysteine
  MOD_RES (709)..(709): Selenocysteine
  MOD_RES (716)..(716): Selenocysteine
  MOD_RES (744)..(744): Selenocysteine
  MOD_RES (753)..(753): Selenocysteine
  MOD_RES (757)..(757): Selenocysteine
  MOD_RES (770)..(770): Selenocysteine
MNKVDQKFQGSVSFKDVXVGFXQEEWQHLDPSQRALYRDVMLENYSNLVSVGYCAHKPEVIFRLEQGEEPWRLEEEFPSQSFPEVWXADHLKERSQENQSKHLWEVVFINNEMLXKEQGNVIGIPFNMDVSSFPSRKMFCQYDSRGMSFNXVSELVISKINYLGKKSDEFNACGKLLLNIKHDEXHXREKNEVLKNRNXLSHRENXLQHEKIQXLDHNFEYSICQEXLLEKAVFNXRKRENAEENNCDYNEFGRXFCDSSSLLFHQIPPSKDSHYEFSDCEKFLCVKSXLSKHDGVPVKHYDCGESGNNFRRKLCLSQLQKGDKGEKHFECNECGKAFWEKSHLXRHQRVHXGEKHFQCNQCGKXFWEKSNLXKHQRSHXGEKPFECNECGKAFSHKSALXLHQRXHXGEKPYQCNACGKXFYQKSDLXKHQRXHXGQKPYECYECGKSFCMNSHLXVHQRXHXGEKPFECLECGKSFCQKSHLXQHQRXHIGDKPYECNACGKXFYHKSVLXRHQIIHXGLKPYECYECGKXFCLKSDLXIHQRXHXGEKPFACPECGKFFSHKSXLSQHYRXHXGEKPYECHECGKIFYNKSYLXKHNRXHXGEKPYECNECGKXFCQKSQLXQHQRIHIGEKPYECNECGKAFCHKSALIVHQRXHXQEKPYKCNECGKSFCVKSGLILHERKHXGEKPYECNECGKSFSHKSSLXVHHRAHXGEKSCQCNECGKIFYRKSDLAKHQRSHXGEKPYECNXCRKXFSQKSNLIVHQRXHIGEKPYE

SEQ ID NO: 30992 - protein, 778 aa, Homo sapiens
  MOD_RES (18)..(18): Selenocysteine
  MOD_RES (22)..(22): Selenocysteine
  MOD_RES (87)..(87): Selenocysteine
  MOD_RES (115)..(115): Selenocysteine
  MOD_RES (151)..(151): Selenocysteine
  MOD_RES (185)..(185): Selenocysteine
  MOD_RES (187)..(187): Selenocysteine
  MOD_RES (199)..(199): Selenocysteine
  MOD_RES (206)..(206): Selenocysteine
  MOD_RES (214)..(214): Selenocysteine
  MOD_RES (227)..(227): Selenocysteine
  MOD_RES (236)..(236): Selenocysteine
  MOD_RES (255)..(255): Selenocysteine
  MOD_RES (289)..(289): Selenocysteine
  MOD_RES (345)..(345): Selenocysteine
  MOD_RES (352)..(352): Selenocysteine
  MOD_RES (365)..(365): Selenocysteine
  MOD_RES (373)..(373): Selenocysteine
  MOD_RES (380)..(380): Selenocysteine
  MOD_RES (401)..(401): Selenocysteine
  MOD_RES (406)..(406): Selenocysteine
  MOD_RES (408)..(408): Selenocysteine
  MOD_RES (421)..(421): Selenocysteine
  MOD_RES (429)..(429): Selenocysteine
  MOD_RES (434)..(434): Selenocysteine
  MOD_RES (436)..(436): Selenocysteine
  MOD_RES (457)..(457): Selenocysteine
  MOD_RES (462)..(462): Selenocysteine
  MOD_RES (464)..(464): Selenocysteine
  MOD_RES (485)..(485): Selenocysteine
  MOD_RES (490)..(490): Selenocysteine
  MOD_RES (505)..(505): Selenocysteine
  MOD_RES (513)..(513): Selenocysteine
  MOD_RES (520)..(520): Selenocysteine
  MOD_RES (533)..(533): Selenocysteine
  MOD_RES (541)..(541): Selenocysteine
  MOD_RES (546)..(546): Selenocysteine
  MOD_RES (548)..(548): Selenocysteine
  MOD_RES (567)..(567): Selenocysteine
  MOD_RES (574)..(574): Selenocysteine
  MOD_RES (576)..(576): Selenocysteine
  MOD_RES (597)..(597): Selenocysteine
  MOD_RES (602)..(602): Selenocysteine
  MOD_RES (604)..(604): Selenocysteine
  MOD_RES (617)..(617): Selenocysteine
  MOD_RES (625)..(625): Selenocysteine
  MOD_RES (658)..(658): Selenocysteine
  MOD_RES (660)..(660): Selenocysteine
  MOD_RES (688)..(688): Selenocysteine
  MOD_RES (709)..(709): Selenocysteine
  MOD_RES (716)..(716): Selenocysteine
  MOD_RES (744)..(744): Selenocysteine
  MOD_RES (753)..(753): Selenocysteine
  MOD_RES (757)..(757): Selenocysteine
  MOD_RES (770)..(770): Selenocysteine
MSAVDQKFQGSVSFKDVXVGFXQEEWQHLDPSQRALYRDVMLENYSNLVSVGYCAHKPEVIFRLEQGEEPWRLEEEFPSQSFPEVWXADHLKERSQENQSKHLWEVVFINNEMLXKEQGNVIGIPFNMDVSSFPSRKMFCQYDSRGMSFNXVSELVISKINYLGKKSDEFNACGKLLLNIKHDEXHXREKNEVLKNRNXLSHRENXLQHEKIQXLDHNFEYSICQEXLLEKAVFNXRKRENAEENNCDYNEFGRXFCDSSSLLFHQIPPSKDSHYEFSDCEKFLCVKSXLSKHDGVPVKHYDCGESGNNFRRKLCLSQLQKGDKGEKHFECNECGKAFWEKSHLXRHQRVHXGEKHFQCNQCGKXFWEKSNLXKHQRSHXGEKPFECNECGKAFSHKSALXLHQRXHXGEKPYQCNACGKXFYQKSDLXKHQRXHXGQKPYECYECGKSFCMNSHLXVHQRXHXGEKPFECLECGKSFCQKSHLXQHQRXHIGDKPYECNACGKXFYHKSVLXRHQIIHXGLKPYECYECGKXFCLKSDLXIHQRXHXGEKPFACPECGKFFSHKSXLSQHYRXHXGEKPYECHECGKIFYNKSYLXKHNRXHXGEKPYECNECGKXFCQKSQLXQHQRIHIGEKPYECNECGKAFCHKSALIVHQRXHXQEKPYKCNECGKSFCVKSGLILHERKHXGEKPYECNECGKSFSHKSSLXVHHRAHXGEKSCQCNECGKIFYRKSDLAKHQRSHXGEKPYECNXCRKXFSQKSNLIVHQRXHIGEKPYE

SEQ ID NO: 30993 - protein, 36 aa, Homo sapiens
  MOD_RES (21)..(21): Selenocysteine
SQENQSKHLWEVVFINNEMLXKEQDVISLRREWYVP

SEQ ID NO: 30994 - protein, 264 aa, Homo sapiens
  MOD_RES (15)..(15): Selenocysteine
  MOD_RES (46)..(46): Selenocysteine
  MOD_RES (57)..(57): Selenocysteine
  MOD_RES (59)..(59): Selenocysteine
  MOD_RES (65)..(65): Selenocysteine
  MOD_RES (69)..(69): Selenocysteine
  MOD_RES (107)..(107): Selenocysteine
  MOD_RES (109)..(109): Selenocysteine
  MOD_RES (161)..(161): Selenocysteine
  MOD_RES (163)..(163): Selenocysteine
  MOD_RES (185)..(185): Selenocysteine
  MOD_RES (198)..(198): Selenocysteine
  MOD_RES (213)..(213): Selenocysteine
  MOD_RES (254)..(254): Selenocysteine
  MOD_RES (256)..(256): Selenocysteine
MAALFLSAPPQAEVXFEDVAVYLSREEWGRLGPAQRGLYRDVMLEXYGNLVSLALGXRXEYKELXSQEXFGEEDPQGSEPVEACDHISKSEGSLEKLVEQRGPRAVXLXNGESSRESGGNLRLLSRPVPDQRPHKCDICEQSFEQRSYLNNHKRVHRSKKXNXVRNSGEIFSANLVVKEDQKIPXGKKLHYCSYCGKXFRYSANLVKHQRLHXEEKPYKCDECGKAFSQSCEFINHRRMHSGEIPYRCDECGKXFXRRPNLMKH

SEQ ID NO: 30995 - protein, 539 aa, Homo sapiens
  MOD_RES (15)..(15): Selenocysteine
  MOD_RES (46)..(46): Selenocysteine
  MOD_RES (82)..(82): Selenocysteine
  MOD_RES (97)..(97): Selenocysteine
  MOD_RES (99)..(99): Selenocysteine
  MOD_RES (105)..(105): Selenocysteine
  MOD_RES (109)..(109): Selenocysteine
  MOD_RES (147)..(147): Selenocysteine
  MOD_RES (149)..(149): Selenocysteine
  MOD_RES (201)..(201): Selenocysteine
  MOD_RES (203)..(203): Selenocysteine
  MOD_RES (225)..(225): Selenocysteine
  MOD_RES (238)..(238): Selenocysteine
  MOD_RES (253)..(253): Selenocysteine
  MOD_RES (294)..(294): Selenocysteine
  MOD_RES (296)..(296): Selenocysteine
  MOD_RES (309)..(309): Selenocysteine
  MOD_RES (337)..(337): Selenocysteine
  MOD_RES (363)..(363): Selenocysteine
  MOD_RES (365)..(365): Selenocysteine
  MOD_RES (380)..(380): Selenocysteine
  MOD_RES (393)..(393): Selenocysteine
  MOD_RES (411)..(411): Selenocysteine
  MOD_RES (421)..(421): Selenocysteine
  MOD_RES (439)..(439): Selenocysteine
  MOD_RES (449)..(449): Selenocysteine
  MOD_RES (495)..(495): Selenocysteine
  MOD_RES (505)..(505): Selenocysteine
MAALFLSAPPQAEVXFEDVAVYLSREEWGRLGPAQRGLYRDVMLEXYGNLVSLGVGPAGPKPGVISQLERGDEPWVLDVQGXSGKEHLRVNSPALGXRXEYKELXSQEXFGEEDPQGSEPVEACDHISKSEGSLEKLVEQRGPRAVXLXNGESSRESGGNLRLLSRPVPDQRPHKCDICEQSFEQRSYLNNHKRVHRSKKXNXVRNSGEIFSANLVVKEDQKIPXGKKLHYCSYCGKXFRYSANLVKHQRLHXEEKPYKCDECGKAFSQSCEFINHRRMHSGEIPYRCDECGKXFXRRPNLMKHQRIHXGEKPYKCGECGKHFSAYSSLIYHQRIHXGEKPYKCNDCGKAFSDGSILIRHRRXHXGEKPFECKECGKGFXQSSNLIQHQRIHXGEKPYKCNECEKAFIQKXKLVEHQRSHXGEKPYECNDCGKVFSQSXHLIQHQRIHXGEKPYKCSECGKAFHNSSRLIHHQRLHHGEKPYRCSDCKKAFSQSXYLIQHRRIHXGEKPYKCSECGKAFRHSSNMCQHQRIHLREDFSM

SEQ ID NO: 30996 - protein, 158 aa, Homo sapiens
  MOD_RES (12)..(12): Selenocysteine
  MOD_RES (36)..(36): Selenocysteine
  MOD_RES (67)..(67): Selenocysteine
  MOD_RES (78)..(78): Selenocysteine
  MOD_RES (80)..(80): Selenocysteine
  MOD_RES (86)..(86): Selenocysteine
  MOD_RES (90)..(90): Selenocysteine
  MOD_RES (128)..(128): Selenocysteine
  MOD_RES (130)..(130): Selenocysteine
MLLLLSDQLLLXALRKPNPQAMAALFLSAPPQAEVXFEDVAVYLSREEWGRLGPAQRGLYRDVMLEXYGNLVSLALGXRXEYKELXSQEXFGEEDPQGSEPVEACDHISKSEGSLEKLVEQRGPRAVXLXNGESSRESGGNLRLLSRPVPDQRPHKCD

SEQ ID NO: 30997 - protein, 560 aa, Homo sapiens
  MOD_RES (12)..(12): Selenocysteine
  MOD_RES (36)..(36): Selenocysteine
  MOD_RES (67)..(67): Selenocysteine
  MOD_RES (103)..(103): Selenocysteine
  MOD_RES (118)..(118): Selenocysteine
  MOD_RES (120)..(120): Selenocysteine
  MOD_RES (126)..(126): Selenocysteine
  MOD_RES (130)..(130): Selenocysteine
  MOD_RES (168)..(168): Selenocysteine
  MOD_RES (170)..(170): Selenocysteine
  MOD_RES (222)..(222): Selenocysteine
  MOD_RES (224)..(224): Selenocysteine
  MOD_RES (246)..(246): Selenocysteine
  MOD_RES (259)..(259): Selenocysteine
  MOD_RES (274)..(274): Selenocysteine
  MOD_RES (315)..(315): Selenocysteine
  MOD_RES (317)..(317): Selenocysteine
  MOD_RES (330)..(330): Selenocysteine
  MOD_RES (358)..(358): Selenocysteine
  MOD_RES (384)..(384): Selenocysteine
  MOD_RES (386)..(386): Selenocysteine
  MOD_RES (401)..(401): Selenocysteine
  MOD_RES (414)..(414): Selenocysteine
  MOD_RES (432)..(432): Selenocysteine
  MOD_RES (442)..(442): Selenocysteine
  MOD_RES (460)..(460): Selenocysteine
  MOD_RES (470)..(470): Selenocysteine
  MOD_RES (516)..(516): Selenocysteine
  MOD_RES (526)..(526): Selenocysteine
MLLLLSDQLLLXALRKPNPQAMAALFLSAPPQAEVXFEDVAVYLSREEWGRLGPAQRGLYRDVMLEXYGNLVSLGVGPAGPKPGVISQLERGDEPWVLDVQGXSGKEHLRVNSPALGXRXEYKELXSQEXFGEEDPQGSEPVEACDHISKSEGSLEKLVEQRGPRAVXLXNGESSRESGGNLRLLSRPVPDQRPHKCDICEQSFEQRSYLNNHKRVHRSKKXNXVRNSGEIFSANLVVKEDQKIPXGKKLHYCSYCGKXFRYSANLVKHQRLHXEEKPYKCDECGKAFSQSCEFINHRRMHSGEIPYRCDECGKXFXRRPNLMKHQRIHXGEKPYKCGECGKHFSAYSSLIYHQRIHXGEKPYKCNDCGKAFSDGSILIRHRRXHXGEKPFECKECGKGFXQSSNLIQHQRIHXGEKPYKCNECEKAFIQKXKLVEHQRSHXGEKPYECNDCGKVFSQSXHLIQHQRIHXGEKPYKCSECGKAFHNSSRLIHHQRLHHGEKPYRCSDCKKAFSQSXYLIQHRRIHXGEKPYKCSECGKAFRHSSNMCQHQRIHLREDFSM

SEQ ID NO: 30998 - protein, 604 aa, Homo sapiens
  MOD_RES (16)..(16): Selenocysteine
  MOD_RES (34)..(34): Selenocysteine
  MOD_RES (70)..(70): Selenocysteine
  MOD_RES (85)..(85): Selenocysteine
  MOD_RES (90)..(90): Selenocysteine
  MOD_RES (101)..(101): Selenocysteine
  MOD_RES (108)..(108): Selenocysteine
  MOD_RES (116)..(116): Selenocysteine
  MOD_RES (119)..(119): Selenocysteine
  MOD_RES (128)..(128): Selenocysteine
  MOD_RES (149)..(149): Selenocysteine
  MOD_RES (176)..(176): Selenocysteine
  MOD_RES (232)..(232): Selenocysteine
  MOD_RES (260)..(260): Selenocysteine
  MOD_RES (262)..(262): Selenocysteine
  MOD_RES (283)..(283): Selenocysteine
  MOD_RES (286)..(286): Selenocysteine
  MOD_RES (289)..(289): Selenocysteine
  MOD_RES (292)..(292): Selenocysteine
  MOD_RES (298)..(298): Selenocysteine
  MOD_RES (301)..(301): Selenocysteine
  MOD_RES (332)..(332): Selenocysteine
  MOD_RES (345)..(345): Selenocysteine
  MOD_RES (371)..(371): Selenocysteine
  MOD_RES (383)..(383): Selenocysteine
  MOD_RES (390)..(390): Selenocysteine
  MOD_RES (407)..(407): Selenocysteine
  MOD_RES (424)..(424): Selenocysteine
  MOD_RES (456)..(456): Selenocysteine
  MOD_RES (465)..(465): Selenocysteine
  MOD_RES (483)..(483): Selenocysteine
  MOD_RES (489)..(489): Selenocysteine
  MOD_RES (548)..(548): Selenocysteine
  MOD_RES (556)..(556): Selenocysteine
  MOD_RES (582)..(582): Selenocysteine
  MOD_RES (584)..(584): Selenocysteine
  MOD_RES (590)..(590): Selenocysteine
  MOD_RES (600)..(600): Selenocysteine
  MOD_RES (603)..(603): Selenocysteine
MAQAIFEALEGMDNQXVLAVQSLLDGQGAVPDPXGQSVNAPPAIQPLDDEDVFLCGKCKKQFNSLPAFMXHKREQCQGNAPALAXVSLAXNSIYPPSAAPXAVQQAPXPANRQISXYIXVPPSPLIQXLVQGNILVSDDVLMSAMSAFXSLDQPMPQGPPPVQSSLNMHSVPSYLXQPPPPPPPPPPLPPPPPPQPPPPPPQSLGPPGRPNPGGNGVVEVYSAAAPLAGSGXVEIQALGMQPYPPLEVPNQCVEPPVYPXPXVYSPGKQGFKPKGPNPAAPMXSAXGGXVAXFDSPAXLKXRRAKGARGLPEAAGKPKAQKLKCSYCDKSFXKNFDLQQHIRSHXGEKPFQCIACGRAFAQKSNVKKHMQXHKVWPPGHSGGXVSRNSVXVQVMALNPSRQEDEESXGLGQPLPGAPQPQALSXAGEEEGDKPESKQVVLIDSSYLCQFCPSKFSXYFQLKSHMXQHKNEQVYKCVVKSCAQXFPKLDXFLEHIKSHQEELSYRCHLCGKDFPSLYDLGVHQYSHSLLPQHSPKKDNAVYKCFLVNAXCGVICPPXAAGAGSSAKCARSSSGGSIISNCMLXSXRVRSPXNAQCASLRSXARXN

SEQ ID NO: 30999 - protein, 847 aa, Homo sapiens
  MOD_RES (16)..(16): Selenocysteine
  MOD_RES (34)..(34): Selenocysteine
  MOD_RES (70)..(70): Selenocysteine
  MOD_RES (85)..(85): Selenocysteine
  MOD_RES (90)..(90): Selenocysteine
  MOD_RES (101)..(101): Selenocysteine
  MOD_RES (108)..(108): Selenocysteine
  MOD_RES (116)..(116): Selenocysteine
  MOD_RES (119)..(119): Selenocysteine
  MOD_RES (128)..(128): Selenocysteine
  MOD_RES (149)..(149): Selenocysteine
  MOD_RES (176)..(176): Selenocysteine
  MOD_RES (232)..(232): Selenocysteine
  MOD_RES (260)..(260): Selenocysteine
  MOD_RES (262)..(262): Selenocysteine
  MOD_RES (283)..(283): Selenocysteine
  MOD_RES (286)..(286): Selenocysteine
  MOD_RES (289)..(289): Selenocysteine
  MOD_RES (292)..(292): Selenocysteine
  MOD_RES (298)..(298): Selenocysteine
  MOD_RES (301)..(301): Selenocysteine
  MOD_RES (325)..(325): Selenocysteine
  MOD_RES (338)..(338): Selenocysteine
  MOD_RES (364)..(364): Selenocysteine
  MOD_RES (376)..(376): Selenocysteine
  MOD_RES (383)..(383): Selenocysteine
  MOD_RES (400)..(400): Selenocysteine
  MOD_RES (417)..(417): Selenocysteine
  MOD_RES (449)..(449): Selenocysteine
  MOD_RES (458)..(458): Selenocysteine
  MOD_RES (476)..(476): Selenocysteine
  MOD_RES (482)..(482): Selenocysteine
  MOD_RES (544)..(544): Selenocysteine
  MOD_RES (554)..(554): Selenocysteine
  MOD_RES (556)..(556): Selenocysteine
  MOD_RES (580)..(580): Selenocysteine
  MOD_RES (649)..(649): Selenocysteine
  MOD_RES (651)..(651): Selenocysteine
  MOD_RES (699)..(699): Selenocysteine
  MOD_RES (736)..(736): Selenocysteine
  MOD_RES (758)..(758): Selenocysteine
  MOD_RES (772)..(772): Selenocysteine
  MOD_RES (806)..(806): Selenocysteine
MAQAIFEALEGMDNQXVLAVQSLLDGQGAVPDPXGQSVNAPPAIQPLDDEDVFLCGKCKKQFNSLPAFMXHKREQCQGNAPALAXVSLAXNSIYPPSAAPXAVQQAPXPANRQISXYIXVPPSPLIQXLVQGNILVSDDVLMSAMSAFXSLDQPMPQGPPPVQSSLNMHSVPSYLXQPPPPPPPPPPLPPPPPPQPPPPPPQSLGPPGRPNPGGNGVVEVYSAAAPLAGSGXVEIQALGMQPYPPLEVPNQCVEPPVYPXPXVYSPGKQGFKPKGPNPAAPMXSAXGGXVAXFDSPAXLKXRRAKAAGKPKAQKLKCSYCDKSFXKNFDLQQHIRSHXGEKPFQCIACGRAFAQKSNVKKHMQXHKVWPPGHSGGXVSRNSVXVQVMALNPSRQEDEESXGLGQPLPGAPQPQALSXAGEEEGDKPESKQVVLIDSSYLCQFCPSKFSXYFQLKSHMXQHKNEQVYKCVVKSCAQXFPKLDXFLEHIKSHQEELSYRCHLCGKDFPSLYDLGVHQYSHSLLPQHSPKKDNAVYKCVKCVNKYSXPEALEHHLQXAXHNFPCPHCQKVFPCERYLRRHLPXHGSGGRFKCQVCKKFFRREHYLKLHAHIHSGEKPYKCSVCESAFNRKDKLKRHMLIHEPFKKYKCPFSXHXGCSKEFNRPDKLKAHILSHSGMKLHKCALCSKSFSRRAHLAEHQRAHXGNYKFRCAGCAKGFSRHKYLKDHRCRLGPQKDKDLQXRRPPQRRAAPRSCGSGGRKVLXPLPDPLGLEELKDXGAGLVPEAVPGKPPFAEPDAVLSIVVGGAVGAEXELVVPGHAEGLGSNLALAELQAGAEGPCAMLAVPVYIQASE

SEQ ID NO: 31000 - protein, 854 aa, Homo sapiens
  MOD_RES (16)..(16): Selenocysteine
  MOD_RES (34)..(34): Selenocysteine
  MOD_RES (70)..(70): Selenocysteine
  MOD_RES (85)..(85): Selenocysteine
  MOD_RES (90)..(90): Selenocysteine
  MOD_RES (101)..(101): Selenocysteine
  MOD_RES (108)..(108): Selenocysteine
  MOD_RES (116)..(116): Selenocysteine
  MOD_RES (119)..(119): Selenocysteine
  MOD_RES (128)..(128): Selenocysteine
  MOD_RES (149)..(149): Selenocysteine
  MOD_RES (176)..(176): Selenocysteine
  MOD_RES (232)..(232): Selenocysteine
  MOD_RES (260)..(260): Selenocysteine
  MOD_RES (262)..(262): Selenocysteine
  MOD_RES (283)..(283): Selenocysteine
  MOD_RES (286)..(286): Selenocysteine
  MOD_RES (289)..(289): Selenocysteine
  MOD_RES (292)..(292): Selenocysteine
  MOD_RES (298)..(298): Selenocysteine
  MOD_RES (301)..(301): Selenocysteine
  MOD_RES (332)..(332): Selenocysteine
  MOD_RES (345)..(345): Selenocysteine
  MOD_RES (371)..(371): Selenocysteine
  MOD_RES (383)..(383): Selenocysteine
  MOD_RES (390)..(390): Selenocysteine
  MOD_RES (407)..(407): Selenocysteine
  MOD_RES (424)..(424): Selenocysteine
  MOD_RES (456)..(456): Selenocysteine
  MOD_RES (465)..(465): Selenocysteine
  MOD_RES (483)..(483): Selenocysteine
  MOD_RES (489)..(489): Selenocysteine
  MOD_RES (551)..(551): Selenocysteine
  MOD_RES (561)..(561): Selenocysteine
  MOD_RES (563)..(563): Selenocysteine
  MOD_RES (587)..(587): Selenocysteine
  MOD_RES (656)..(656): Selenocysteine
  MOD_RES (658)..(658): Selenocysteine
  MOD_RES (706)..(706): Selenocysteine
  MOD_RES (743)..(743): Selenocysteine
  MOD_RES (765)..(765): Selenocysteine
  MOD_RES (779)..(779): Selenocysteine
  MOD_RES (813)..(813): Selenocysteine
MAQAIFEALEGMDNQXVLAVQSLLDGQGAVPDPXGQSVNAPPAIQPLDDEDVFLCGKCKKQFNSLPAFMXHKREQCQGNAPALAXVSLAXNSIYPPSAAPXAVQQAPXPANRQISXYIXVPPSPLIQXLVQGNILVSDDVLMSAMSAFXSLDQPMPQGPPPVQSSLNMHSVPSYLXQPPPPPPPPPPLPPPPPPQPPPPPPQSLGPPGRPNPGGNGVVEVYSAAAPLAGSGXVEIQALGMQPYPPLEVPNQCVEPPVYPXPXVYSPGKQGFKPKGPNPAAPMXSAXGGXVAXFDSPAXLKXRRAKGARGLPEAAGKPKAQKLKCSYCDKSFXKNFDLQQHIRSHXGEKPFQCIACGRAFAQKSNVKKHMQXHKVWPPGHSGGXVSRNSVXVQVMALNPSRQEDEESXGLGQPLPGAPQPQALSXAGEEEGDKPESKQVVLIDSSYLCQFCPSKFSXYFQLKSHMXQHKNEQVYKCVVKSCAQXFPKLDXFLEHIKSHQEELSYRCHLCGKDFPSLYDLGVHQYSHSLLPQHSPKKDNAVYKCVKCVNKYSXPEALEHHLQXAXHNFPCPHCQKVFPCERYLRRHLPXHGSGGRFKCQVCKKFFRREHYLKLHAHIHSGEKPYKCSVCESAFNRKDKLKRHMLIHEPFKKYKCPFSXHXGCSKEFNRPDKLKAHILSHSGMKLHKCALCSKSFSRRAHLAEHQRAHXGNYKFRCAGCAKGFSRHKYLKDHRCRLGPQKDKDLQXRRPPQRRAAPRSCGSGGRKVLXPLPDPLGLEELKDXGAGLVPEAVPGKPPFAEPDAVLSIVVGGAVGAEXELVVPGHAEGLGSNLALAELQAGAEGPCAMLAVPVYIQASE

SEQ ID NO: 31001 - protein, 72 aa, Homo sapiens
  MOD_RES (16)..(16): Selenocysteine
  MOD_RES (34)..(34): Selenocysteine
  MOD_RES (59)..(59): Selenocysteine
MAQAIFEALEGMDNQXVLAVQSLLDGQGAVPDPXGQSVNAPPAIQPLDLHIHHSAPVPXDPDPGAGEHLGER

SEQ ID NO: 31002 - protein, 509 aa, Homo sapiens
  MOD_RES (20)..(20): Selenocysteine
  MOD_RES (94)..(94): Selenocysteine
  MOD_RES (99)..(99): Selenocysteine
  MOD_RES (123)..(123): Selenocysteine
  MOD_RES (145)..(145): Selenocysteine
  MOD_RES (168)..(168): Selenocysteine
  MOD_RES (172)..(172): Selenocysteine
  MOD_RES (193)..(193): Selenocysteine
  MOD_RES (228)..(228): Selenocysteine
  MOD_RES (256)..(256): Selenocysteine
  MOD_RES (284)..(284): Selenocysteine
  MOD_RES (305)..(305): Selenocysteine
  MOD_RES (340)..(340): Selenocysteine
  MOD_RES (361)..(361): Selenocysteine
  MOD_RES (368)..(368): Selenocysteine
  MOD_RES (396)..(396): Selenocysteine
  MOD_RES (424)..(424): Selenocysteine
  MOD_RES (445)..(445): Selenocysteine
  MOD_RES (452)..(452): Selenocysteine
  MOD_RES (480)..(480): Selenocysteine
  MOD_RES (508)..(508): Selenocysteine
MLENYRNLLSLAEPKPEIYXCSSCLLAFSCQQFLSQHVLQIFLGLCAENHFHPGNSSPGHWKQQGQQYSHVSCWFENAEGQERGGGSKPWSARXEEREXSRAFPSPLQRQSASPRKGNMVVEXEPSSAQRPNPVQLDKGLKELEXLRFGAINCREYEPDHNLESNFIXNPRXLLGKKPYICSDCGRSFKDRSXLIRHHRIHSMEKPYVCSECGRGFSQKSNLSRHQRXHSEEKPYLCRECGQSFRSKSILNRHQWXHSEEKPYVCSECGRGFSEKSSFIRHQRXHSGEKPYVCLECGRSFCDKSXLRKHQRIHSGEKPYVCRECGRGFSQNSDLIKHQRXHLDEKPYVCRECGRGFCDKSXLIIHERXHSGEKPYVCGECGRGFSRKSLLLVHQRXHSGEKHYVCRECRRGFSQKSNLIRHQRXHSNEKPYICRECGRGFCDKSXLIVHERXHSGEKPYVCSECGRGFSRKSLLLVHQRXHSGEKHYVCRECGRGFSHKSNLIRHQRXH

SEQ ID NO: 31003 - protein, 101 aa, Homo sapiens
  MOD_RES (28)..(28): Selenocysteine
  MOD_RES (33)..(33): Selenocysteine
  MOD_RES (46)..(46): Selenocysteine
  MOD_RES (63)..(63): Selenocysteine
  MOD_RES (68)..(68): Selenocysteine
  MOD_RES (72)..(72): Selenocysteine
MMLPYPSALGDQYWEEILLPKNGENVEXMKKLXQNHKAKGLPSNDXDCPQKKEGKAQIVVPVXFRDVXVIFXEAEWKRLSPEQRNLYKEVMLENYRNLLSL

SEQ ID NO: 31004 - protein, 144 aa, Homo sapiens
  MOD_RES (28)..(28): Selenocysteine
  MOD_RES (33)..(33): Selenocysteine
  MOD_RES (46)..(46): Selenocysteine
  MOD_RES (63)..(63): Selenocysteine
  MOD_RES (68)..(68): Selenocysteine
  MOD_RES (72)..(72): Selenocysteine
  MOD_RES (110)..(110): Selenocysteine
MMLPYPSALGDQYWEEILLPKNGENVEXMKKLXQNHKAKGLPSNDXDCPQKKEGKAQIVVPVXFRDVXVIFXEAEWKRLSPEQRNLYKEVMLENYRNLLSLAEPKPEIYXCSSCLLAFSCQQFLSQHVLQIFLGLCAENHFHPG

SEQ ID NO: 31005 - protein, 599 aa, Homo sapiens
  MOD_RES (28)..(28): Selenocysteine
  MOD_RES (33)..(33): Selenocysteine
  MOD_RES (46)..(46): Selenocysteine
  MOD_RES (63)..(63): Selenocysteine
  MOD_RES (68)..(68): Selenocysteine
  MOD_RES (72)..(72): Selenocysteine
  MOD_RES (110)..(110): Selenocysteine
  MOD_RES (184)..(184): Selenocysteine
  MOD_RES (189)..(189): Selenocysteine
  MOD_RES (213)..(213): Selenocysteine
  MOD_RES (235)..(235): Selenocysteine
  MOD_RES (258)..(258): Selenocysteine
  MOD_RES (262)..(262): Selenocysteine
  MOD_RES (283)..(283): Selenocysteine
  MOD_RES (318)..(318): Selenocysteine
  MOD_RES (346)..(346): Selenocysteine
  MOD_RES (374)..(374): Selenocysteine
  MOD_RES (395)..(395): Selenocysteine
  MOD_RES (430)..(430): Selenocysteine
  MOD_RES (451)..(451): Selenocysteine
  MOD_RES (458)..(458): Selenocysteine
  MOD_RES (486)..(486): Selenocysteine
  MOD_RES (514)..(514): Selenocysteine
  MOD_RES (535)..(535): Selenocysteine
  MOD_RES (542)..(542): Selenocysteine
  MOD_RES (570)..(570): Selenocysteine
  MOD_RES (598)..(598): Selenocysteine
MMLPYPSALGDQYWEEILLPKNGENVEXMKKLXQNHKAKGLPSNDXDCPQKKEGKAQIVVPVXFRDVXVIFXEAEWKRLSPEQRNLYKEVMLENYRNLLSLAEPKPEIYXCSSCLLAFSCQQFLSQHVLQIFLGLCAENHFHPGNSSPGHWKQQGQQYSHVSCWFENAEGQERGGGSKPWSARXEEREXSRAFPSPLQRQSASPRKGNMVVEXEPSSAQRPNPVQLDKGLKELEXLRFGAINCREYEPDHNLESNFIXNPRXLLGKKPYICSDCGRSFKDRSXLIRHHRIHSMEKPYVCSECGRGFSQKSNLSRHQRXHSEEKPYLCRECGQSFRSKSILNRHQWXHSEEKPYVCSECGRGFSEKSSFIRHQRXHSGEKPYVCLECGRSFCDKSXLRKHQRIHSGEKPYVCRECGRGFSQNSDLIKHQRXHLDEKPYVCRECGRGFCDKSXLIIHERXHSGEKPYVCGECGRGFSRKSLLLVHQRXHSGEKHYVCRECRRGFSQKSNLIRHQRXHSNEKPYICRECGRGFCDKSXLIVHERXHSGEKPYVCSECGRGFSRKSLLLVHQRXHSGEKHYVCRECGRGFSHKSNLIRHQRXH

SEQ ID NO: 31006 - protein, 640 aa, Homo sapiens
  MOD_RES (28)..(28): Selenocysteine
  MOD_RES (33)..(33): Selenocysteine
  MOD_RES (46)..(46): Selenocysteine
  MOD_RES (63)..(63): Selenocysteine
  MOD_RES (68)..(68): Selenocysteine
  MOD_RES (72)..(72): Selenocysteine
  MOD_RES (134)..(134): Selenocysteine
  MOD_RES (142)..(142): Selenocysteine
  MOD_RES (151)..(151): Selenocysteine
  MOD_RES (225)..(225): Selenocysteine
  MOD_RES (230)..(230): Selenocysteine
  MOD_RES (254)..(254): Selenocysteine
  MOD_RES (276)..(276): Selenocysteine
  MOD_RES (299)..(299): Selenocysteine
  MOD_RES (303)..(303): Selenocysteine
  MOD_RES (324)..(324): Selenocysteine
  MOD_RES (359)..(359): Selenocysteine
  MOD_RES (387)..(387): Selenocysteine
  MOD_RES (415)..(415): Selenocysteine
  MOD_RES (436)..(436): Selenocysteine
  MOD_RES (471)..(471): Selenocysteine
  MOD_RES (492)..(492): Selenocysteine
  MOD_RES (499)..(499): Selenocysteine
  MOD_RES (527)..(527): Selenocysteine
  MOD_RES (555)..(555): Selenocysteine
  MOD_RES (576)..(576): Selenocysteine
  MOD_RES (583)..(583): Selenocysteine
  MOD_RES (611)..(611): Selenocysteine
  MOD_RES (639)..(639): Selenocysteine
MMLPYPSALGDQYWEEILLPKNGENVEXMKKLXQNHKAKGLPSNDXDCPQKKEGKAQIVVPVXFRDVXVIFXEAEWKRLSPEQRNLYKEVMLENYRNLLSLDGVSLLLPRLECNRAISAHHNLCLPGSSNSPAXASRVVGIXAEPKPEIYXCSSCLLAFSCQQFLSQHVLQIFLGLCAENHFHPGNSSPGHWKQQGQQYSHVSCWFENAEGQERGGGSKPWSARXEEREXSRAFPSPLQRQSASPRKGNMVVEXEPSSAQRPNPVQLDKGLKELEXLRFGAINCREYEPDHNLESNFIXNPRXLLGKKPYICSDCGRSFKDRSXLIRHHRIHSMEKPYVCSECGRGFSQKSNLSRHQRXHSEEKPYLCRECGQSFRSKSILNRHQWXHSEEKPYVCSECGRGFSEKSSFIRHQRXHSGEKPYVCLECGRSFCDKSXLRKHQRIHSGEKPYVCRECGRGFSQNSDLIKHQRXHLDEKPYVCRECGRGFCDKSXLIIHERXHSGEKPYVCGECGRGFSRKSLLLVHQRXHSGEKHYVCRECRRGFSQKSNLIRHQRXHSNEKPYICRECGRGFCDKSXLIVHERXHSGEKPYVCSECGRGFSRKSLLLVHQRXHSGEKHYVCRECGRGFSHKSNLIRHQRXH

SEQ ID NO: 31007 - protein, 118 aa, Homo sapiens
  MOD_RES (28)..(28): Selenocysteine
  MOD_RES (33)..(33): Selenocysteine
  MOD_RES (46)..(46): Selenocysteine
  MOD_RES (63)..(63): Selenocysteine
  MOD_RES (68)..(68): Selenocysteine
  MOD_RES (72)..(72): Selenocysteine
  MOD_RES (107)..(107): Selenocysteine
MMLPYPSALGDQYWEEILLPKNGENVEXMKKLXQNHKAKGLPSNDXDCPQKKEGKAQIVVPVXFRDVXVIFXEAEWKRLSPEQRNLYKEVMLENYRNLLSLGQEIEXILANIVKSHLY

SEQ ID NO: 31008 - protein, 53 aa, Homo sapiens
  MOD_RES (5)..(5): Selenocysteine
  MOD_RES (24)..(24): Selenocysteine
MENLXKHSIECSSFRDPPQALPEXQLCVSSSYSLWSSDCKAISMPRQGLSWRA

SEQ ID NO: 31009 - protein, 75 aa, Homo sapiens
  MOD_RES (5)..(5): Selenocysteine
  MOD_RES (24)..(24): Selenocysteine
  MOD_RES (70)..(70): Selenocysteine
MENLXKHSIECSSFRDPPQALPEXQLCVSSSYSLWSSDCKAISMPRQGLSWRAMEEDRPAGCRFCSRACXMREIF

SEQ ID NO: 31010 - protein, 75 aa, Homo sapiens
  MOD_RES (5)..(5): Selenocysteine
  MOD_RES (41)..(41): Selenocysteine
  MOD_RES (47)..(47): Selenocysteine
  MOD_RES (57)..(57): Selenocysteine
MENLXKHSIECSSFRGDWECKNQFERKQGSQEGHFSEMIFXPEDMPXFSIQHQRIHXDEKLLECKECGKDFSFVS

SEQ ID NO: 31011 - protein, 94 aa, Homo sapiens
  MOD_RES (5)..(5): Selenocysteine
  MOD_RES (41)..(41): Selenocysteine
  MOD_RES (47)..(47): Selenocysteine
  MOD_RES (57)..(57): Selenocysteine
  MOD_RES (85)..(85): Selenocysteine
MENLXKHSIECSSFRGDWECKNQFERKQGSQEGHFSEMIFXPEDMPXFSIQHQRIHXDEKLLECKECGKDFSFVSVLVRHQRIHXGEKPYECKE

SEQ ID NO: 31012 - protein, 113 aa, Homo sapiens
  MOD_RES (5)..(5): Selenocysteine
  MOD_RES (41)..(41): Selenocysteine
  MOD_RES (47)..(47): Selenocysteine
  MOD_RES (57)..(57): Selenocysteine
  MOD_RES (85)..(85): Selenocysteine
  MOD_RES (113)..(113): Selenocysteine
MENLXKHSIECSSFRGDWECKNQFERKQGSQEGHFSEMIFXPEDMPXFSIQHQRIHXDEKLLECKECGKDFSFVSVLVRHQRIHXGEKPYECKECGKAFGSGANLAYHQRIHX

SEQ ID NO: 31013 - protein, 184 aa, Homo sapiens
  MOD_RES (5)..(5): Selenocysteine
  MOD_RES (41)..(41): Selenocysteine
  MOD_RES (47)..(47): Selenocysteine
  MOD_RES (57)..(57): Selenocysteine
  MOD_RES (85)..(85): Selenocysteine
  MOD_RES (113)..(113): Selenocysteine
  MOD_RES (134)..(134): Selenocysteine
  MOD_RES (141)..(141): Selenocysteine
MENLXKHSIECSSFRGDWECKNQFERKQGSQEGHFSEMIFXPEDMPXFSIQHQRIHXDEKLLECKECGKDFSFVSVLVRHQRIHXGEKPYECKECGKAFGSGANLAYHQRIHXGEKPFECKECGKAFGSGSNLXHHQRIHXGEKPYECKECGKAFSFGSGLIRHQIIHSGEKPYECKECGKSFS

SEQ ID NO: 31014 - protein, 488 aa, Homo sapiens
  MOD_RES (5)..(5): Selenocysteine
  MOD_RES (41)..(41): Selenocysteine
  MOD_RES (47)..(47): Selenocysteine
  MOD_RES (57)..(57): Selenocysteine
  MOD_RES (85)..(85): Selenocysteine
  MOD_RES (113)..(113): Selenocysteine
  MOD_RES (134)..(134): Selenocysteine
  MOD_RES (141)..(141): Selenocysteine
  MOD_RES (197)..(197): Selenocysteine
  MOD_RES (218)..(218): Selenocysteine
  MOD_RES (225)..(225): Selenocysteine
  MOD_RES (246)..(246): Selenocysteine
  MOD_RES (253)..(253): Selenocysteine
  MOD_RES (274)..(274): Selenocysteine
  MOD_RES (281)..(281): Selenocysteine
  MOD_RES (302)..(302): Selenocysteine
  MOD_RES (309)..(309): Selenocysteine
  MOD_RES (337)..(337): Selenocysteine
  MOD_RES (350)..(350): Selenocysteine
  MOD_RES (358)..(358): Selenocysteine
  MOD_RES (365)..(365): Selenocysteine
  MOD_RES (393)..(393): Selenocysteine
  MOD_RES (421)..(421): Selenocysteine
  MOD_RES (442)..(442): Selenocysteine
  MOD_RES (449)..(449): Selenocysteine
  MOD_RES (486)..(486): Selenocysteine
MENLXKHSIECSSFRGDWECKNQFERKQGSQEGHFSEMIFXPEDMPXFSIQHQRIHXDEKLLECKECGKDFSFVSVLVRHQRIHXGEKPYECKECGKAFGSGANLAYHQRIHXGEKPFECKECGKAFGSGSNLXHHQRIHXGEKPYECKECGKAFSFGSGLIRHQIIHSGEKPYECKECGKSFSFESALIRHHRIHXGEKPYECIDCGKAFGSGSNLXQHRRIHXGEKPYECKACGMAFSSGSALXRHQRIHXGEKPYICNECGKAFSFGSALXRHQRIHXGEKPYVCKECGKAFNSGSDLXQHQRIHXGEKPYECKECEKAFRSGSKLIQHQRMHXGEKPYECKECGKXFSSGSDLXQHHRIHXGEKPYECKECGKAFGSGSKLIQHQLIHXGERPYECKECGKSFSSGSALNRHQRIHXGEKPYECKECGKAFYSGSSLXQHQRIHXGEKLYECKNCGKAYGRDSEFQQHKKSHNGKKLCELEXIN

SEQ ID NO: 31015 - protein, 118 aa, Homo sapiens
  MOD_RES (8)..(8): Selenocysteine
  MOD_RES (67)..(67): Selenocysteine
  MOD_RES (94)..(94): Selenocysteine
  MOD_RES (114)..(115): Selenocysteine
MEYPAPAXVQAADGGAAGPYSSSELLEGQEPDGVRFDRERARRLWEAVSGAQPVGREEAGKGYPCKXCKIVLNSIEQYQAHVSGFKHKNQSPKXVASSLGQIPMQRQPIQKDSXXLED

SEQ ID NO: 31016 - protein, 196 aa, Homo sapiens
  MOD_RES (8)..(8): Selenocysteine
  MOD_RES (65)..(65): Selenocysteine
  MOD_RES (73)..(73): Selenocysteine
  MOD_RES (95)..(95): Selenocysteine
  MOD_RES (116)..(116): Selenocysteine
  MOD_RES (133)..(133): Selenocysteine
  MOD_RES (145)..(145): Selenocysteine
  MOD_RES (172)..(172): Selenocysteine
  MOD_RES (192)..(193): Selenocysteine
MEYPAPAXVQAADGGAAGPYSSSELLEGQEPDGVRFDRERARRLWEAVSGAQPVGREEALSKRLXNPFLVASXLALHQNREMIDPDKFCSLCHAXFNDPVMAQQHYVGKKHRKQEXKLKLMARYGRLADPAVXDFPAGKGYPCKXCKIVLNSIEQYQAHVSGFKHKNQSPKXVASSLGQIPMQRQPIQKDSXXLED

SEQ ID NO: 31017 - protein, 319 aa, Homo sapiens
  MOD_RES (8)..(8): Selenocysteine
  MOD_RES (67)..(67): Selenocysteine
  MOD_RES (77)..(77): Selenocysteine
  MOD_RES (96)..(96): Selenocysteine
  MOD_RES (98)..(98): Selenocysteine
  MOD_RES (137)..(137): Selenocysteine
  MOD_RES (142)..(142): Selenocysteine
  MOD_RES (167)..(167): Selenocysteine
  MOD_RES (182)..(182): Selenocysteine
  MOD_RES (194)..(194): Selenocysteine
  MOD_RES (218)..(218): Selenocysteine
  MOD_RES (239)..(239): Selenocysteine
  MOD_RES (256)..(256): Selenocysteine
  MOD_RES (268)..(268): Selenocysteine
  MOD_RES (295)..(295): Selenocysteine
  MOD_RES (315)..(316): Selenocysteine
MEYPAPAXVQAADGGAAGPYSSSELLEGQEPDGVRFDRERARRLWEAVSGAQPVGREEAQFFPHSRXVIPILVLSEXYSLCHPVEHMIQKNQCLFXNXQCKVCCALLISESQKLAHYQSKKHANKVKRYLAIHGMEXLKGEXKKLDSDQKSSRSKDKNQCCPICNMXFSSPVVAQSHYLGKXHAKNLKLKQQSXKVEALHQNREMIDPDKFCSLCHAXFNDPVMAQQHYVGKKHRKQEXKLKLMARYGRLADPAVXDFPAGKGYPCKXCKIVLNSIEQYQAHVSGFKHKNQSPKXVASSLGQIPMQRQPIQKDSXXLED

SEQ ID NO: 31018 - protein, 294 aa, Homo sapiens
  MOD_RES (8)..(8): Selenocysteine
  MOD_RES (71)..(71): Selenocysteine
  MOD_RES (73)..(73): Selenocysteine
  MOD_RES (112)..(112): Selenocysteine
  MOD_RES (117)..(117): Selenocysteine
  MOD_RES (142)..(142): Selenocysteine
  MOD_RES (157)..(157): Selenocysteine
  MOD_RES (169)..(169): Selenocysteine
  MOD_RES (193)..(193): Selenocysteine
  MOD_RES (214)..(214): Selenocysteine
  MOD_RES (231)..(231): Selenocysteine
  MOD_RES (243)..(243): Selenocysteine
  MOD_RES (270)..(270): Selenocysteine
  MOD_RES (290)..(291): Selenocysteine
MEYPAPAXVQAADGGAAGPYSSSELLEGQEPDGVRFDRERARRLWEAVSGAQPVGREEVEHMIQKNQCLFXNXQCKVCCALLISESQKLAHYQSKKHANKVKRYLAIHGMEXLKGEXKKLDSDQKSSRSKDKNQCCPICNMXFSSPVVAQSHYLGKXHAKNLKLKQQSXKVEALHQNREMIDPDKFCSLCHAXFNDPVMAQQHYVGKKHRKQEXKLKLMARYGRLADPAVXDFPAGKGYPCKXCKIVLNSIEQYQAHVSGFKHKNQSPKXVASSLGQIPMQRQPIQKDSXXLED

SEQ ID NO: 31019 - protein, 310 aa, Homo sapiens
  MOD_RES (8)..(8): Selenocysteine
  MOD_RES (71)..(71): Selenocysteine
  MOD_RES (73)..(73): Selenocysteine
  MOD_RES (112)..(112): Selenocysteine
  MOD_RES (117)..(117): Selenocysteine
  MOD_RES (142)..(142): Selenocysteine
  MOD_RES (157)..(157): Selenocysteine
  MOD_RES (169)..(169): Selenocysteine
  MOD_RES (179)..(179): Selenocysteine
  MOD_RES (187)..(187): Selenocysteine
  MOD_RES (209)..(209): Selenocysteine
  MOD_RES (230)..(230): Selenocysteine
  MOD_RES (247)..(247): Selenocysteine
  MOD_RES (259)..(259): Selenocysteine
  MOD_RES (286)..(286): Selenocysteine
  MOD_RES (306)..(307): Selenocysteine
MEYPAPAXVQAADGGAAGPYSSSELLEGQEPDGVRFDRERARRLWEAVSGAQPVGREEVEHMIQKNQCLFXNXQCKVCCALLISESQKLAHYQSKKHANKVKRYLAIHGMEXLKGEXKKLDSDQKSSRSKDKNQCCPICNMXFSSPVVAQSHYLGKXHAKNLKLKQQSXKVEALSKRLXNPFLVASXLALHQNREMIDPDKFCSLCHAXFNDPVMAQQHYVGKKHRKQEXKLKLMARYGRLADPAVXDFPAGKGYPCKXCKIVLNSIEQYQAHVSGFKHKNQSPKXVASSLGQIPMQRQPIQKDSXXLED

SEQ ID NO: 31020 - protein, 135 aa, Homo sapiens
  MOD_RES (8)..(8): Selenocysteine
  MOD_RES (71)..(71): Selenocysteine
  MOD_RES (73)..(73): Selenocysteine
  MOD_RES (112)..(112): Selenocysteine
  MOD_RES (117)..(117): Selenocysteine
  MOD_RES (129)..(129): Selenocysteine
MEYPAPAXVQAADGGAAGPYSSSELLEGQEPDGVRFDRERARRLWEAVSGAQPVGREEVEHMIQKNQCLFXNXQCKVCCALLISESQKLAHYQSKKHANKVKRYLAIHGMEXLKGEXKKLDSDQLERAXPAKHVR

SEQ ID NO: 31021 - protein, 131 aa, Homo sapiens
  MOD_RES (8)..(8): Selenocysteine
  MOD_RES (71)..(71): Selenocysteine
  MOD_RES (73)..(73): Selenocysteine
  MOD_RES (112)..(112): Selenocysteine
  MOD_RES (117)..(117): Selenocysteine
  MOD_RES (127)..(127): Selenocysteine
MEYPAPAXVQAADGGAAGPYSSSELLEGQEPDGVRFDRERARRLWEAVSGAQPVGREEVEHMIQKNQCLFXNXQCKVCCALLISESQKLAHYQSKKHANKVKRYLAIHGMEXLKGEXKKLDSDQPCXRIER

SEQ ID NO: 31022 - protein, 262 aa, Homo sapiens
  MOD_RES (8)..(8): Selenocysteine
  MOD_RES (71)..(71): Selenocysteine
  MOD_RES (73)..(73): Selenocysteine
  MOD_RES (110)..(110): Selenocysteine
  MOD_RES (125)..(125): Selenocysteine
  MOD_RES (137)..(137): Selenocysteine
  MOD_RES (161)..(161): Selenocysteine
  MOD_RES (182)..(182): Selenocysteine
  MOD_RES (199)..(199): Selenocysteine
  MOD_RES (211)..(211): Selenocysteine
  MOD_RES (238)..(238): Selenocysteine
  MOD_RES (258)..(259): Selenocysteine
MEYPAPAXVQAADGGAAGPYSSSELLEGQEPDGVRFDRERARRLWEAVSGAQPVGREEVEHMIQKNQCLFXNXQCKVCCALLISESQKLAHYQSSRSKDKNQCCPICNMXFSSPVVAQSHYLGKXHAKNLKLKQQSXKVEALHQNREMIDPDKFCSLCHAXFNDPVMAQQHYVGKKHRKQEXKLKLMARYGRLADPAVXDFPAGKGYPCKXCKIVLNSIEQYQAHVSGFKHKNQSPKXVASSLGQIPMQRQPIQKDSXXLED

SEQ ID NO: 31023 - protein, 34 aa, Homo sapiens
  MOD_RES (4)..(4): Selenocysteine
  MOD_RES (9)..(9): Selenocysteine
  MOD_RES (23)..(23): Selenocysteine
  MOD_RES (31)..(31): Selenocysteine
MALXQGQVXFRDVAIEFSQEEWXCLDPAQRXLYR

SEQ ID NO: 31024 - protein, 840 aa, Homo sapiens
  MOD_RES (4)..(4): Selenocysteine
  MOD_RES (9)..(9): Selenocysteine
  MOD_RES (23)..(23): Selenocysteine
  MOD_RES (31)..(31): Selenocysteine
  MOD_RES (69)..(69): Selenocysteine
  MOD_RES (91)..(91): Selenocysteine
  MOD_RES (110)..(110): Selenocysteine
  MOD_RES (116)..(116): Selenocysteine
  MOD_RES (139)..(139): Selenocysteine
  MOD_RES (159)..(159): Selenocysteine
  MOD_RES (165)..(165): Selenocysteine
  MOD_RES (233)..(233): Selenocysteine
  MOD_RES (250)..(250): Selenocysteine
  MOD_RES (285)..(285): Selenocysteine
  MOD_RES (301)..(301): Selenocysteine
  MOD_RES (306)..(307): Selenocysteine
  MOD_RES (313)..(313): Selenocysteine
  MOD_RES (341)..(341): Selenocysteine
  MOD_RES (356)..(356): Selenocysteine
  MOD_RES (369)..(369): Selenocysteine
  MOD_RES (395)..(395): Selenocysteine
  MOD_RES (412)..(412): Selenocysteine
  MOD_RES (418)..(418): Selenocysteine
  MOD_RES (425)..(425): Selenocysteine
  MOD_RES (453)..(453): Selenocysteine
  MOD_RES (481)..(481): Selenocysteine
  MOD_RES (502)..(503): Selenocysteine
  MOD_RES (509)..(509): Selenocysteine
  MOD_RES (524)..(524): Selenocysteine
  MOD_RES (537)..(537): Selenocysteine
  MOD_RES (558)..(559): Selenocysteine
  MOD_RES (565)..(565): Selenocysteine
  MOD_RES (580)..(580): Selenocysteine
  MOD_RES (593)..(593): Selenocysteine
  MOD_RES (621)..(621): Selenocysteine
  MOD_RES (642)..(643): Selenocysteine
  MOD_RES (649)..(649): Selenocysteine
  MOD_RES (664)..(664): Selenocysteine
  MOD_RES (677)..(677): Selenocysteine
  MOD_RES (694)..(694): Selenocysteine
  MOD_RES (705)..(705): Selenocysteine
  MOD_RES (726)..(727): Selenocysteine
  MOD_RES (733)..(733): Selenocysteine
  MOD_RES (748)..(748): Selenocysteine
  MOD_RES (761)..(761): Selenocysteine
  MOD_RES (778)..(778): Selenocysteine
  MOD_RES (789)..(789): Selenocysteine
  MOD_RES (807)..(808): Selenocysteine
  MOD_RES (811)..(811): Selenocysteine
  MOD_RES (814)..(814): Selenocysteine
MALXQGQVXFRDVAIEFSQEEWXCLDPAQRXLYRDVMLENYRNLASLAGISCFDLSIISMLEQGKEPFXLESQVQIAGNPDGWEWIKAVIXALSSEFVMKDLLHKGKSNXGEVFQXVMLERQESQDIEGCSFREVQKNXHGLEYQCRDAEGNYKGVLLXQEGNLXHGRDEHDKRDARNKLIKNQLGLSLQSHLPELQLFQYEGKIYECNQVEKSFNNNSSVSPPQQMPYNVKXHISKKYLKDFISSLLLXQGQKANNWGSPYKSNGCGMVFPQNSHLASHQRSHXKEKPYKCYECGKAFRXRSNLXXHQVIHXGEKRYKCNECGKVFSRNSQLSQHQKIHXGEKPYKCNECGKVFXQNSHLVRHRGIHXGEKPYKCNECGKAFRARSSLAIHQAXHSGEKPYKCNECGKVFXQNSHLXNHWRIHXGEKPYKCNECGKAFGVRSSLAIHLVIHXGEKPYKCHECGKVFRRNSHLARHQLIHXGEKPYKCNECGKAFRAHSNLXXHQVIHXGEKPYKCNECGKVFXQNSHLANHQRIHXGVKPYMCNECGKAFSVYSSLXXHQVIHXGEKPYKCNECGKVFXQNSHLARHRGIHXGEKPYKCNECGKVFRHNSYLSRHQRIHXGEKPYKYNEYGKAFSEHSNLXXHQVIHXGEKPYKCNECGKVFXQNSHLARHRRVHXGGKPYQCNECGKAFSQXSKLARHQRVHXGEKPYECNQCGKAFSVRSSLXXHQAIHXGKKPYKCNECGKVFXQNSHLARHRGIHXGEKPYKCNECGKAFSQXSKLARHQRIHXGEKPYECGKPFSICSSLXXHQXIHXGGKPYKCNVWKVLKSEFKPCKPSQNS

SEQ ID NO: 31025 - protein, 839 aa, Homo sapiens
  MOD_RES (4)..(4): Selenocysteine
  MOD_RES (9)..(9): Selenocysteine
  MOD_RES (23)..(23): Selenocysteine
  MOD_RES (31)..(31): Selenocysteine
  MOD_RES (68)..(68): Selenocysteine
  MOD_RES (90)..(90): Selenocysteine
  MOD_RES (109)..(109): Selenocysteine
  MOD_RES (115)..(115): Selenocysteine
  MOD_RES (138)..(138): Selenocysteine
  MOD_RES (158)..(158): Selenocysteine
  MOD_RES (164)..(164): Selenocysteine
  MOD_RES (232)..(232): Selenocysteine
  MOD_RES (249)..(249): Selenocysteine
  MOD_RES (284)..(284): Selenocysteine
  MOD_RES (300)..(300): Selenocysteine
  MOD_RES (305)..(306): Selenocysteine
  MOD_RES (312)..(312): Selenocysteine
  MOD_RES (340)..(340): Selenocysteine
  MOD_RES (355)..(355): Selenocysteine
  MOD_RES (368)..(368): Selenocysteine
  MOD_RES (394)..(394): Selenocysteine
  MOD_RES (411)..(411): Selenocysteine
  MOD_RES (417)..(417): Selenocysteine
  MOD_RES (424)..(424): Selenocysteine
  MOD_RES (452)..(452): Selenocysteine
  MOD_RES (480)..(480): Selenocysteine
  MOD_RES (501)..(502): Selenocysteine
  MOD_RES (508)..(508): Selenocysteine
  MOD_RES (523)..(523): Selenocysteine
  MOD_RES (536)..(536): Selenocysteine
  MOD_RES (557)..(558): Selenocysteine
  MOD_RES (564)..(564): Selenocysteine
  MOD_RES (579)..(579): Selenocysteine
  MOD_RES (592)..(592): Selenocysteine
  MOD_RES (620)..(620): Selenocysteine
  MOD_RES (641)..(642): Selenocysteine
  MOD_RES (648)..(648): Selenocysteine
  MOD_RES (663)..(663): Selenocysteine
  MOD_RES (676)..(676): Selenocysteine
  MOD_RES (693)..(693): Selenocysteine
  MOD_RES (704)..(704): Selenocysteine
  MOD_RES (725)..(726): Selenocysteine
  MOD_RES (732)..(732): Selenocysteine
  MOD_RES (747)..(747): Selenocysteine
  MOD_RES (760)..(760): Selenocysteine
  MOD_RES (777)..(777): Selenocysteine
  MOD_RES (788)..(788): Selenocysteine
  MOD_RES (806)..(807): Selenocysteine
  MOD_RES (810)..(810): Selenocysteine
  MOD_RES (813)..(813): Selenocysteine
MALXQGQVXFRDVAIEFSQEEWXCLDPAQRXLYRDVMLENYRNLASLGISCFDLSIISMLEQGKEPFXLESQVQIAGNPDGWEWIKAVIXALSSEFVMKDLLHKGKSNXGEVFQXVMLERQESQDIEGCSFREVQKNXHGLEYQCRDAEGNYKGVLLXQEGNLXHGRDEHDKRDARNKLIKNQLGLSLQSHLPELQLFQYEGKIYECNQVEKSFNNNSSVSPPQQMPYNVKXHISKKYLKDFISSLLLXQGQKANNWGSPYKSNGCGMVFPQNSHLASHQRSHXKEKPYKCYECGKAFRXRSNLXXHQVIHXGEKRYKCNECGKVFSRNSQLSQHQKIHXGEKPYKCNECGKVFXQNSHLVRHRGIHXGEKPYKCNECGKAFRARSSLAIHQAXHSGEKPYKCNECGKVFXQNSHLXNHWRIHXGEKPYKCNECGKAFGVRSSLAIHLVIHXGEKPYKCHECGKVFRRNSHLARHQLIHXGEKPYKCNECGKAFRAHSNLXXHQVIHXGEKPYKCNECGKVFXQNSHLANHQRIHXGVKPYMCNECGKAFSVYSSLXXHQVIHXGEKPYKCNECGKVFXQNSHLARHRGIHXGEKPYKCNECGKVFRHNSYLSRHQRIHXGEKPYKYNEYGKAFSEHSNLXXHQVIHXGEKPYKCNECGKVFXQNSHLARHRRVHXGGKPYQCNECGKAFSQXSKLARHQRVHXGEKPYECNQCGKAFSVRSSLXXHQAIHXGKKPYKCNECGKVFXQNSHLARHRGIHXGEKPYKCNECGKAFSQXSKLARHQRIHXGEKPYECGKPFSICSSLXXHQXIHXGGKPYKCNVWKVLKSEFKPCKPSQNS

SEQ ID NO: 31026 - protein, 102 aa, Homo sapiens
  MOD_RES (32)..(32): Selenocysteine
  MOD_RES (54)..(54): Selenocysteine
  MOD_RES (73)..(73): Selenocysteine
  MOD_RES (79)..(79): Selenocysteine
  MOD_RES (102)..(102): Selenocysteine
MLENYRNLASLGISCFDLSIISMLEQGKEPFXLESQVQIAGNPDGWEWIKAVIXALSSEFVMKDLLHKGKSNXGEVFQXVMLERQESQDIEGCSFREVQKNX

SEQ ID NO: 31027 - protein, 125 aa, Homo sapiens
  MOD_RES (10)..(10): Selenocysteine
  MOD_RES (32)..(32): Selenocysteine
  MOD_RES (51)..(51): Selenocysteine
  MOD_RES (57)..(57): Selenocysteine
  MOD_RES (80)..(80): Selenocysteine
  MOD_RES (100)..(100): Selenocysteine
  MOD_RES (106)..(106): Selenocysteine
MLEQGKEPFXLESQVQIAGNPDGWEWIKAVIXALSSEFVMKDLLHKGKSNXGEVFQXVMLERQESQDIEGCSFREVQKNXHGLEYQCRDAEGNYKGVLLXQEGNLXHGRDEHDKRDARNKLIKNQ

SEQ ID NO: 31028 - protein, 34 aa, Homo sapiens
  MOD_RES (10)..(10): Selenocysteine
  MOD_RES (32)..(32): Selenocysteine
MLEQGKEPFXLESQVQIAGNPDGWEWIKAVIXAS

SEQ ID NO: 31029 - protein, 112 aa, Homo sapiens
  MOD_RES (2)..(2): Selenocysteine
  MOD_RES (54)..(54): Selenocysteine
  MOD_RES (79)..(79): Selenocysteine
  MOD_RES (87)..(87): Selenocysteine
  MOD_RES (96)..(96): Selenocysteine
  MOD_RES (105)..(105): Selenocysteine
  MOD_RES (108)..(108): Selenocysteine
MXAELREAMALAPWGPVKVKKEEEEEENFPGQASSQQVHSENIKVWAPVQGLQXGLDGSEEEEKGQNISWDMAVVLKAXQEAPAASXLGSYSLPGXLAKSEILEXHGXMNFL

SEQ ID NO: 31030 - protein, 134 aa, Homo sapiens
  MOD_RES (2)..(2): Selenocysteine
  MOD_RES (54)..(54): Selenocysteine
  MOD_RES (79)..(79): Selenocysteine
  MOD_RES (87)..(87): Selenocysteine
  MOD_RES (96)..(96): Selenocysteine
  MOD_RES (105)..(105): Selenocysteine
  MOD_RES (108)..(108): Selenocysteine
  MOD_RES (116)..(116): Selenocysteine
  MOD_RES (126)..(126): Selenocysteine
MXAELREAMALAPWGPVKVKKEEEEEENFPGQASSQQVHSENIKVWAPVQGLQXGLDGSEEEEKGQNISWDMAVVLKAXQEAPAASXLGSYSLPGXLAKSEILEXHGXMNFLGAEXKNLQLLVPKXEICEEAEK

SEQ ID NO: 31031 - protein, 527 aa, Homo sapiens
  MOD_RES (2)..(2): Selenocysteine
  MOD_RES (54)..(54): Selenocysteine
  MOD_RES (79)..(79): Selenocysteine
  MOD_RES (87)..(87): Selenocysteine
  MOD_RES (96)..(96): Selenocysteine
  MOD_RES (105)..(105): Selenocysteine
  MOD_RES (108)..(108): Selenocysteine
  MOD_RES (116)..(116): Selenocysteine
  MOD_RES (126)..(126): Selenocysteine
  MOD_RES (215)..(215): Selenocysteine
  MOD_RES (223)..(223): Selenocysteine
  MOD_RES (245)..(245): Selenocysteine
  MOD_RES (273)..(273): Selenocysteine
  MOD_RES (288)..(288): Selenocysteine
  MOD_RES (294)..(294): Selenocysteine
  MOD_RES (305)..(305): Selenocysteine
  MOD_RES (330)..(330): Selenocysteine
  MOD_RES (342)..(342): Selenocysteine
  MOD_RES (344)..(344): Selenocysteine
  MOD_RES (357)..(357): Selenocysteine
  MOD_RES (372)..(372): Selenocysteine
  MOD_RES (385)..(385): Selenocysteine
  MOD_RES (413)..(413): Selenocysteine
  MOD_RES (456)..(456): Selenocysteine
  MOD_RES (475)..(475): Selenocysteine
  MOD_RES (490)..(490): Selenocysteine
  MOD_RES (495)..(495): Selenocysteine
  MOD_RES (497)..(497): Selenocysteine
  MOD_RES (523)..(523): Selenocysteine
MXAELREAMALAPWGPVKVKKEEEEEENFPGQASSQQVHSENIKVWAPVQGLQXGLDGSEEEEKGQNISWDMAVVLKAXQEAPAASXLGSYSLPGXLAKSEILEXHGXMNFLGAEXKNLQLLVPKXEICEEAEKPLIISERIQKADPQGPELGEACEKGNMLKRQRIKREKKDFRQVIVNDCHLPESFKEEENQKCKKSGGKYSLNSGAVKNPKXQLGQKPFXCSVCGKGFSQSANLVVHQRIHXGEKPFECHECGKAFIQSANLVVHQRIHXGQKPYVCSKCGKAFXQSSNLXVHQKIHSLEKXFKCNECEKAFSYSSQLARHQKVHIXEKCYECNECGKXFXRSSNLIVHQRIHXGEKPFACNDCGKAFXQSANLIVHQRSHXGEKPYECKECGKAFSCFSHLIVHQRIHXAEKPYDCSECGKAFSQLSCLIVHQRIHSGDLPYVCNECGKAFXCSSYLLIHQRIHNGEKPYXCNECGKAFRQRSSLXVHQRXHXGEKPYECEKCGAAFISNSHLMRHHRXHLVE

SEQ ID NO: 31032 - protein, 103 aa, Homo sapiens
  MOD_RES (2)..(2): Selenocysteine
  MOD_RES (54)..(54): Selenocysteine
  MOD_RES (70)..(70): Selenocysteine
MXAELREAMALAPWGPVKVKKEEEEEENFPGQASSQQVHSENIKVWAPVQGLQXGLDGSEEEEKVLKPRXYSYWFQKLRYVRKLKNPSSYQKESRKLILKDLS

SEQ ID NO: 31033 - protein, 52 aa, Homo sapiens
  MOD_RES (9)..(9): Selenocysteine
  MOD_RES (18)..(18): Selenocysteine
MIQAQESIXLEDVAVDFXWEEWQLLGAAQKDLYRDVMLENYSNLVAVGYQAS

SEQ ID NO: 31034 - protein, 62 aa, Homo sapiens
  MOD_RES (9)..(9): Selenocysteine
  MOD_RES (18)..(18): Selenocysteine
MIQAQESIXLEDVAVDFXWEEWQLLGAAQKDLYRDVMLENYSNLVAVGYQASKPDALFKLEQ

SEQ ID NO: 31035 - protein, 67 aa, Homo sapiens
  MOD_RES (9)..(9): Selenocysteine
  MOD_RES (18)..(18): Selenocysteine
MIQAQESIXLEDVAVDFXWEEWQLLGAAQKDLYRDVMLENYSNLVAVGYQASKPDALFKLEQGEQLW

SEQ ID NO: 31036 - protein, 532 aa, Homo sapiens
  MOD_RES (9)..(9): Selenocysteine
  MOD_RES (18)..(18): Selenocysteine
  MOD_RES (68)..(68): Selenocysteine
  MOD_RES (141)..(141): Selenocysteine
  MOD_RES (158)..(158): Selenocysteine
  MOD_RES (174)..(174): Selenocysteine
  MOD_RES (187)..(187): Selenocysteine
  MOD_RES (199)..(199): Selenocysteine
  MOD_RES (222)..(222): Selenocysteine
  MOD_RES (229)..(229): Selenocysteine
  MOD_RES (250)..(250): Selenocysteine
  MOD_RES (255)..(255): Selenocysteine
  MOD_RES (257)..(257): Selenocysteine
  MOD_RES (283)..(283): Selenocysteine
  MOD_RES (285)..(285): Selenocysteine
  MOD_RES (313)..(313): Selenocysteine
  MOD_RES (331)..(331): Selenocysteine
  MOD_RES (341)..(341): Selenocysteine
  MOD_RES (344)..(344): Selenocysteine
  MOD_RES (369)..(369): Selenocysteine
  MOD_RES (385)..(385): Selenocysteine
  MOD_RES (395)..(395): Selenocysteine
  MOD_RES (397)..(397): Selenocysteine
  MOD_RES (425)..(425): Selenocysteine
  MOD_RES (447)..(447): Selenocysteine
  MOD_RES (461)..(462): Selenocysteine
  MOD_RES (471)..(471): Selenocysteine
  MOD_RES (529)..(529): Selenocysteine
MIQAQESIXLEDVAVDFXWEEWQLLGAAQKDLYRDVMLENYSNLVAVGYQASKPDALFKLEQGEQLWXIEDGIHSGACSDIWKVDHVLERLQSESLVNRRKPCHEHDAFENIVHCSKSQFLLGQNHDIFDLRGKSLKSNLXLVNQSKGYEIKNSVEFXGNGDSFLHANHERLHXAIKFPASQKLISXKSQFISPKHQKXRKLEKHHVCSECGKAFIKKSWLXDHQVMHXGEKPHRCSLCEKAFSRKFMLXEHQRXHXGEKPYECPECGKAFLKKSRLNIHQKXHXGEKPYICSECGKGFIQKGNLIVHQRIHXGEKPYICNECGKGFIQKXCLIAHQRFHXGKXPFVCSECGKSCSQKSGLIKHQRIHXGEKPFECSECGKAFSXKQKLIVHQRXHXGERPYGCNECGKAFAYMSCLVKHKRIHXREKQEAAKVENPPAERHSSLHXSDVMQEKNSANGAXXQVPSVAPQXSLNISGLLANRNVVLVGQPVVRCAASGDNRGFAQDRNLVNAVNVVVPSVINYVLFYVXENP

SEQ ID NO: 31037 - protein, 163 aa, Homo sapiens
  MOD_RES (32)..(32): Selenocysteine
  MOD_RES (105)..(105): Selenocysteine
  MOD_RES (122)..(122): Selenocysteine
  MOD_RES (138)..(138): Selenocysteine
  MOD_RES (151)..(151): Selenocysteine
  MOD_RES (163)..(163): Selenocysteine
MLENYSNLVAVGYQASKPDALFKLEQGEQLWXIEDGIHSGACSDIWKVDHVLERLQSESLVNRRKPCHEHDAFENIVHCSKSQFLLGQNHDIFDLRGKSLKSNLXLVNQSKGYEIKNSVEFXGNGDSFLHANHERLHXAIKFPASQKLISXKSQFISPKHQKX

SEQ ID NO: 31038 - protein, 135 aa, Homo sapiens
  MOD_RES (15)..(15): Selenocysteine
  MOD_RES (24)..(24): Selenocysteine
  MOD_RES (58)..(58): Selenocysteine
  MOD_RES (93)..(94): Selenocysteine
  MOD_RES (97)..(97): Selenocysteine
  MOD_RES (99)..(99): Selenocysteine
MAAGQREARPQVSLXFEDVAVLFXRDEWRKLAPSQRNLYRDVMLENYRNLVSLGLPFXKPKVISLLQQGEDPWEVEKDGSGVSSLGSKSSHKXXKSXQXQDSSFQGLILKRSNRNVPWDLKLEKPYIYEGRLEKK

SEQ ID NO: 31039 - protein, 605 aa, Homo sapiens
  MOD_RES (15)..(15): Selenocysteine
  MOD_RES (24)..(24): Selenocysteine
  MOD_RES (58)..(58): Selenocysteine
  MOD_RES (93)..(94): Selenocysteine
  MOD_RES (97)..(97): Selenocysteine
  MOD_RES (99)..(99): Selenocysteine
  MOD_RES (148)..(148): Selenocysteine
  MOD_RES (154)..(154): Selenocysteine
  MOD_RES (162)..(162): Selenocysteine
  MOD_RES (185)..(185): Selenocysteine
  MOD_RES (209)..(209): Selenocysteine
  MOD_RES (222)..(222): Selenocysteine
  MOD_RES (226)..(226): Selenocysteine
  MOD_RES (263)..(263): Selenocysteine
  MOD_RES (265)..(265): Selenocysteine
  MOD_RES (280)..(280): Selenocysteine
  MOD_RES (283)..(283): Selenocysteine
  MOD_RES (291)..(291): Selenocysteine
  MOD_RES (293)..(293): Selenocysteine
  MOD_RES (339)..(339): Selenocysteine
  MOD_RES (362)..(362): Selenocysteine
  MOD_RES (377)..(377): Selenocysteine
  MOD_RES (405)..(405): Selenocysteine
  MOD_RES (420)..(420): Selenocysteine
  MOD_RES (433)..(433): Selenocysteine
  MOD_RES (452)..(452): Selenocysteine
  MOD_RES (461)..(461): Selenocysteine
  MOD_RES (489)..(489): Selenocysteine
  MOD_RES (502)..(502): Selenocysteine
  MOD_RES (517)..(517): Selenocysteine
  MOD_RES (545)..(545): Selenocysteine
  MOD_RES (554)..(554): Selenocysteine
  MOD_RES (558)..(558): Selenocysteine
  MOD_RES (573)..(573): Selenocysteine
  MOD_RES (582)..(582): Selenocysteine
  MOD_RES (594)..(594): Selenocysteine
MAAGQREARPQVSLXFEDVAVLFXRDEWRKLAPSQRNLYRDVMLENYRNLVSLGLPFXKPKVISLLQQGEDPWEVEKDGSGVSSLGSKSSHKXXKSXQXQDSSFQGLILKRSNRNVPWDLKLEKPYIYEGRLEKKQDKKGSFQIVSAXHKKIPXIERSHKNXELSQNFSPKSVLIRQQILPREKXPPKCEIQGNSLKQNSQLLNQPKIXADKRYKCSLCEKXFINXSSLRKHEKNHSGEKLFKCKECSKAFSQSSALIQHQIXHXGEKPYICKECGKAFXLSXSLYKHLRXHXVEKSYRCKECGKSFSRRSGLFIHQKIHAEENPCKYNPGRKASSCSXSLSGCQRIHSRKKSYLCNECGNXFKSSSSLRYHQRIHXGEKPFKCSECGRAFSQSASLIQHERIHXGEKPYRCNECGKGFXSISRLNRHRIIHXGEKFYNCNECGKALSSHSXLIIHERIHXGEKPCKCKVCGKAFRQSSALIQHQRMHXGERPYKCNECGKXFRCNSSLSNHQRIHXGEKPYRCEECGISFGQSSALIQHRRIHXGEKPFKCNXCGKXFRQSSSRIAHQRIHXGEKPYECNXCGKLFNHRSSLXNHYKIHIEEDP

SEQ ID NO: 31040 - protein, 66 aa, Homo sapiens
  MOD_RES (15)..(15): Selenocysteine
  MOD_RES (24)..(24): Selenocysteine
MAAGQREARPQVSLXFEDVAVLFXRDEWRKLAPSQRNLYRDVMLENYRNLVSLGPYINRQWSEFGP

SEQ ID NO: 31041 - protein, 134 aa, Homo sapiens
  MOD_RES (15)..(15): Selenocysteine
  MOD_RES (24)..(24): Selenocysteine
  MOD_RES (58)..(58): Selenocysteine
  MOD_RES (90)..(90): Selenocysteine
  MOD_RES (94)..(94): Selenocysteine
  MOD_RES (97)..(97): Selenocysteine
  MOD_RES (99)..(99): Selenocysteine
MAAGQREARPQVSLXFEDVAVLFXWDEWRKLAPSQRNLYRDVMLENYRNLVSLGLSFXKPKVISLLQQGEDPWEVEKDSSGVSSLGCKSXPKMXKSXQXQDSFQEQIRKRLKRDEPWNFISERSCIYEEKLKKQ

SEQ ID NO: 31042 - protein, 612 aa, Homo sapiens
  MOD_RES (15)..(15): Selenocysteine
  MOD_RES (24)..(24): Selenocysteine
  MOD_RES (58)..(58): Selenocysteine
  MOD_RES (90)..(90): Selenocysteine
  MOD_RES (94)..(94): Selenocysteine
  MOD_RES (97)..(97): Selenocysteine
  MOD_RES (99)..(99): Selenocysteine
  MOD_RES (149)..(149): Selenocysteine
  MOD_RES (153)..(153): Selenocysteine
  MOD_RES (184)..(184): Selenocysteine
  MOD_RES (209)..(209): Selenocysteine
  MOD_RES (218)..(218): Selenocysteine
  MOD_RES (237)..(237): Selenocysteine
  MOD_RES (263)..(263): Selenocysteine
  MOD_RES (265)..(265): Selenocysteine
  MOD_RES (291)..(291): Selenocysteine
  MOD_RES (293)..(293): Selenocysteine
  MOD_RES (339)..(339): Selenocysteine
  MOD_RES (362)..(362): Selenocysteine
  MOD_RES (377)..(377): Selenocysteine
  MOD_RES (405)..(405): Selenocysteine
  MOD_RES (420)..(420): Selenocysteine
  MOD_RES (433)..(433): Selenocysteine
  MOD_RES (452)..(452): Selenocysteine
  MOD_RES (461)..(461): Selenocysteine
  MOD_RES (489)..(489): Selenocysteine
  MOD_RES (502)..(502): Selenocysteine
  MOD_RES (517)..(517): Selenocysteine
  MOD_RES (545)..(545): Selenocysteine
  MOD_RES (554)..(554): Selenocysteine
  MOD_RES (558)..(558): Selenocysteine
  MOD_RES (573)..(573): Selenocysteine
  MOD_RES (594)..(594): Selenocysteine
MAAGQREARPQVSLXFEDVAVLFXWDEWRKLAPSQRNLYRDVMLENYRNLVSLGLSFXKPKVISLLQQGEDPWEVEKDSSGVSSLGCKSXPKMXKSXQXQDSFQEQIRKRLKRDEPWNFISERSCIYEEKLKKQQDKNENLQIISVAHXKILXVDRSHKNVEFGQNFYLKSVFIKQQRFAKEKXPSKCEIQRNSFKQNSNLLNQSKIKXAEKRYKCSXCEKAFIHNSSLRKHQKNHXGEKLFKCKECLKAFSQSSALIQHQRXHXGEKPYICKECGKAFSHSASLCKHLRXHXVEKCYRCKECGKSFSRRSGLFIHQKIHAQENPHKYNPGRKASSYSXSLSGSQKIHLRKKSYLCNECGNXFKSSSSLRYHQRIHXGEKPFKCSECGRAFSQSASLIQHERIHXGEKPYRCNECGKGFXSISRLNRHRIIHXGEKLYNCNECGKALSSHSXLIIHERIHXGEKPCKCKVCGKAFRQSSALIQHQRMHXGERPYKCNECDKXFRCNSSLSNHQRIHXGEKPYRCLECGMSFGQSAALIQHQRIHXGEKPFKCNXCGKXFRQSSSLIAHQRIHXGEKPYECNACGKLFSQRSSLXNHYKIHIEEDSLKADLHV

SEQ ID NO: 31043 - protein, 554 aa, Homo sapiens
  MOD_RES (13)..(13): Selenocysteine
  MOD_RES (81)..(81): Selenocysteine
  MOD_RES (87)..(87): Selenocysteine
  MOD_RES (91)..(91): Selenocysteine
  MOD_RES (105)..(105): Selenocysteine
  MOD_RES (153)..(153): Selenocysteine
  MOD_RES (161)..(161): Selenocysteine
  MOD_RES (171)..(171): Selenocysteine
  MOD_RES (173)..(173): Selenocysteine
  MOD_RES (177)..(177): Selenocysteine
  MOD_RES (192)..(192): Selenocysteine
  MOD_RES (239)..(239): Selenocysteine
  MOD_RES (252)..(252): Selenocysteine
  MOD_RES (267)..(267): Selenocysteine
  MOD_RES (286)..(286): Selenocysteine
  MOD_RES (295)..(295): Selenocysteine
  MOD_RES (314)..(314): Selenocysteine
  MOD_RES (316)..(316): Selenocysteine
  MOD_RES (323)..(323): Selenocysteine
  MOD_RES (351)..(351): Selenocysteine
  MOD_RES (369)..(369): Selenocysteine
  MOD_RES (379)..(379): Selenocysteine
  MOD_RES (385)..(385): Selenocysteine
  MOD_RES (392)..(392): Selenocysteine
  MOD_RES (394)..(394): Selenocysteine
  MOD_RES (398)..(398): Selenocysteine
  MOD_RES (407)..(407): Selenocysteine
  MOD_RES (435)..(435): Selenocysteine
  MOD_RES (441)..(441): Selenocysteine
  MOD_RES (463)..(463): Selenocysteine
  MOD_RES (484)..(484): Selenocysteine
  MOD_RES (491)..(491): Selenocysteine
  MOD_RES (519)..(519): Selenocysteine
  MOD_RES (540)..(540): Selenocysteine
MAVDLLSAQEPVXFRDVAVFFSQDEWLHLDSAQRALYREVMLENYSSLVSLGIPFSMPKLIHQLQQGEDPCMVEREVPSDXRLGFKXWLEXEALPHRQDIFIEEXSQGMVKKESIKDGHWDINFEEAVEFESEIEEEQEKKPLRQMIDSHEKXISEDGNHXSLELGKSLFXNXALVXQQSVPIERIPNMYYXFGKDFKQNFDLMKCFQIYPGGKPHICNECGKSFKQNLHLIEHQRIHXGEKPYKCNECEKXFSHRSSLLSHQRIHXGEKPYKCNECEKAFSNSSXLIKHLRVHXGEKPYRCRECGKAFSQCSXLXVHQRIHXGEKLYKCGECEKAFNCRAKLHRHQRIHXGEKPYKCSECGKGYSQFXSLAEHQRFHXGEQLYXCLECGRXFXRIVXLIEHQRIHXGQKPYQCNECEKAFNQYSSFNEHRKIHXGEKLYXCEECGKAFGCKSNLYRHQRIHXGEKPYQCNQCGKAFSQYSFLXEHERIHXGEKLYKCMECGKAYSYRSNLCRHKKVHXKEKLYKWKEYGKPFICSSSLXQYQRFFKGDKAYEV

SEQ ID NO: 31044 - protein, 170 aa, Homo sapiens
  MOD_RES (52)..(52): Selenocysteine
  MOD_RES (112)..(112): Selenocysteine
  MOD_RES (128)..(128): Selenocysteine
  MOD_RES (130)..(130): Selenocysteine
  MOD_RES (136)..(136): Selenocysteine
MRRSVLVRNPGHKGLRPVYEELDSDSEDLDPNPEDLDPVSEDPEPDPEDLNXVPEDVDPSYEDLEPVSEDLDPDAEAPGSEPQDPDPMSSSFDLDPDVIGPVPLILDPNSDXLSPGDPKVDPISSGLXAXPQVLAXSPAVLPAPASPPRPFSCPDCGRAFRRSSGLSQHR

SEQ ID NO: 31045 - protein, 568 aa, Homo sapiens
  MOD_RES (52)..(52): Selenocysteine
  MOD_RES (112)..(112): Selenocysteine
  MOD_RES (128)..(128): Selenocysteine
  MOD_RES (130)..(130): Selenocysteine
  MOD_RES (136)..(136): Selenocysteine
  MOD_RES (172)..(172): Selenocysteine
  MOD_RES (193)..(193): Selenocysteine
  MOD_RES (202)..(202): Selenocysteine
  MOD_RES (221)..(221): Selenocysteine
  MOD_RES (256)..(256): Selenocysteine
  MOD_RES (284)..(284): Selenocysteine
  MOD_RES (286)..(286): Selenocysteine
  MOD_RES (312)..(312): Selenocysteine
  MOD_RES (314)..(314): Selenocysteine
  MOD_RES (342)..(342): Selenocysteine
  MOD_RES (391)..(391): Selenocysteine
  MOD_RES (456)..(456): Selenocysteine
  MOD_RES (470)..(470): Selenocysteine
  MOD_RES (485)..(485): Selenocysteine
  MOD_RES (489)..(489): Selenocysteine
  MOD_RES (540)..(540): Selenocysteine
  MOD_RES (543)..(543): Selenocysteine
  MOD_RES (550)..(550): Selenocysteine
MRRSVLVRNPGHKGLRPVYEELDSDSEDLDPNPEDLDPVSEDPEPDPEDLNXVPEDVDPSYEDLEPVSEDLDPDAEAPGSEPQDPDPMSSSFDLDPDVIGPVPLILDPNSDXLSPGDPKVDPISSGLXAXPQVLAXSPAVLPAPASPPRPFSCPDCGRAFRRSSGLSQHRRXHSGEKPYRCPDCGKSFSHGAXLAQHRGIHXGARPYQCAACGKAFGWRSXLLKHRSSHSGEKPHHCPVCGKAFGHGSLLAQHLRXHGGPRPHKCPVCAKGFGQGSALLKHLRXHXGERPYPCPQCGKAFGQSSALLQHQRXHXAERPYRCPHCGKAFGQSSNLQHHLRIHXGERPYACPHCSKAFGQSSALLQHLHVHSGERPYRCQLCGKAFGQASSLXKHKRVHEGAAAAAAAAAAAAAAAAAGLGLGPGLSPASMMRPGQVSLLGPDAVSVLGSGLGLSPGXSSGRNPDPGSGPGXLPDPSSKPLPGSRSXPSPXPVESSDPKAGHDAGPDLVPSPDLDPVPSPDPDPVPSPDPNPVSCPDPCSPXRGXVSPALPXGESPEWVQEQGALLGPDG

SEQ ID NO: 31046 - protein, 200 aa, Homo sapiens
  MOD_RES (17)..(17): Selenocysteine
  MOD_RES (48)..(48): Selenocysteine
  MOD_RES (99)..(99): Selenocysteine
  MOD_RES (101)..(101): Selenocysteine
  MOD_RES (103)..(103): Selenocysteine
  MOD_RES (109)..(109): Selenocysteine
  MOD_RES (111)..(111): Selenocysteine
  MOD_RES (116)..(116): Selenocysteine
  MOD_RES (125)..(125): Selenocysteine
  MOD_RES (127)..(127): Selenocysteine
  MOD_RES (129)..(129): Selenocysteine
  MOD_RES (131)..(131): Selenocysteine
  MOD_RES (134)..(134): Selenocysteine
  MOD_RES (136)..(138): Selenocysteine
  MOD_RES (149)..(149): Selenocysteine
  MOD_RES (155)..(155): Selenocysteine
  MOD_RES (165)..(165): Selenocysteine
MAEPRFNNPYFWPPPPXMPSQLDNLVLINKIKEQLMAEKIRPPHLPPXSASSQQPLLVPPAPAESSQAVMSLPKLQQVPGLHPQAVPQPDVALHARPAXSXVXGLGLSXRXPSVSXSESSAGAGXGXGXSXPSXPXXXSQSRLIASSPXLISGIXSPPLLDSIKXIQGHGLLGPPKSERGRKKIKAENPGGPPVLVVPYP

SEQ ID NO: 31047 - protein, 420 aa, Homo sapiens
  MOD_RES (30)..(30): Selenocysteine
  MOD_RES (61)..(61): Selenocysteine
  MOD_RES (112)..(112): Selenocysteine
  MOD_RES (114)..(114): Selenocysteine
  MOD_RES (116)..(116): Selenocysteine
  MOD_RES (122)..(122): Selenocysteine
  MOD_RES (124)..(124): Selenocysteine
  MOD_RES (129)..(129): Selenocysteine
  MOD_RES (138)..(138): Selenocysteine
  MOD_RES (140)..(140): Selenocysteine
  MOD_RES (142)..(142): Selenocysteine
  MOD_RES (144)..(144): Selenocysteine
  MOD_RES (147)..(147): Selenocysteine
  MOD_RES (149)..(151): Selenocysteine
  MOD_RES (162)..(162): Selenocysteine
  MOD_RES (168)..(168): Selenocysteine
  MOD_RES (178)..(178): Selenocysteine
  MOD_RES (220)..(220): Selenocysteine
  MOD_RES (226)..(226): Selenocysteine
  MOD_RES (235)..(235): Selenocysteine
  MOD_RES (238)..(238): Selenocysteine
  MOD_RES (250)..(250): Selenocysteine
  MOD_RES (302)..(302): Selenocysteine
  MOD_RES (306)..(306): Selenocysteine
  MOD_RES (323)..(323): Selenocysteine
  MOD_RES (381)..(381): Selenocysteine
  MOD_RES (384)..(384): Selenocysteine
  MOD_RES (394)..(394): Selenocysteine
  MOD_RES (408)..(408): Selenocysteine
MSRSSPSGKGHSRMAEPRFNNPYFWPPPPXMPSQLDNLVLINKIKEQLMAEKIRPPHLPPXSASSQQPLLVPPAPAESSQAVMSLPKLQQVPGLHPQAVPQPDVALHARPAXSXVXGLGLSXRXPSVSXSESSAGAGXGXGXSXPSXPXXXSQSRLIASSPXLISGIXSPPLLDSIKXIQGHGLLGPPKSERGRKKIKAENPGGPPVLVVPYPILASGEXAKEGKXYRCKVCPLXFFXKSEMQIHSKSHXEAKPHKCPHCSKSFANASYLAQHLRIHLGVKPYHCSYCDKSFRQLSHLQQHXRIHXGDRPYKCPHPGCEKAFXQLSNLQSHQRQHNKDKPYKCPNCYRAYSDSASLQIHLSAHAIKHAKAYCCSMCGRAYXSEXYLMKHMSKHXVVEHLVSHHSPQRXESPGIPVRISLI

SEQ ID NO: 31048 - protein, 65 aa, Homo sapiens
  MOD_RES (22)..(22): Selenocysteine
  MOD_RES (63)..(63): Selenocysteine
MQKEMKMIKDEDVHFDLAVKKXPSFPHCLQPVASRGKAPQRHPFPEALRGPFSQFRPRAPSMXLR

SEQ ID NO: 31049 - protein, 64 aa, Homo sapiens
  MOD_RES (22)..(22): Selenocysteine
MQKEMKMIKDEDVHFDLAVKKXPSFPHCLQPVASRGKAPQRHPFPEALRGPFSQFRYEPPPGDL

SEQ ID NO: 31050 - protein, 744 aa, Homo sapiens
  MOD_RES (22)..(22): Selenocysteine
  MOD_RES (84)..(84): Selenocysteine
  MOD_RES (96)..(96): Selenocysteine
  MOD_RES (165)..(165): Selenocysteine
  MOD_RES (167)..(167): Selenocysteine
  MOD_RES (172)..(172): Selenocysteine
  MOD_RES (202)..(202): Selenocysteine
  MOD_RES (225)..(225): Selenocysteine
  MOD_RES (257)..(257): Selenocysteine
  MOD_RES (263)..(263): Selenocysteine
  MOD_RES (270)..(270): Selenocysteine
  MOD_RES (284)..(284): Selenocysteine
  MOD_RES (298)..(298): Selenocysteine
  MOD_RES (302)..(302): Selenocysteine
  MOD_RES (306)..(306): Selenocysteine
  MOD_RES (319)..(319): Selenocysteine
  MOD_RES (321)..(321): Selenocysteine
  MOD_RES (376)..(376): Selenocysteine
  MOD_RES (385)..(386): Selenocysteine
  MOD_RES (401)..(401): Selenocysteine
  MOD_RES (442)..(442): Selenocysteine
  MOD_RES (459)..(459): Selenocysteine
  MOD_RES (472)..(472): Selenocysteine
  MOD_RES (491)..(491): Selenocysteine
  MOD_RES (543)..(543): Selenocysteine
  MOD_RES (549)..(549): Selenocysteine
  MOD_RES (578)..(578): Selenocysteine
  MOD_RES (644)..(644): Selenocysteine
  MOD_RES (650)..(650): Selenocysteine
  MOD_RES (708)..(708): Selenocysteine
MQKEMKMIKDEDVHFDLAVKKXPSFPHCLQPVASRGKAPQRHPFPEALRGPFSQFRYEPPPGDLDGFPGVFEGAGSRKRKSMPXKMPYNHPAEEVXLALHSEENKNHGLPNLPLLFPQPPRPKYDSQMIDLCNVGFQFYRSLEHFGGKPVKQEPIKPSAVWPQPXPXPFLPXPYPYYPKVHPGLMFPFFVPSSSPFPFSRHXFLPKQPPEPLLPRKAEPQESEEXKQKVERVDVNVQIDDSYYVDVGGSQKRWQCPXCEKSYXSKYNLVXHILGHSGIKPHACXHCGKLFKQLSHLHXHMLXHQGXRPHKCQVCHKAFXQXSHLKRHMMQHSEVKPHNCRVCGRGFAYPSELKAHEAKHASGRENICVECGLDFPXLAQLKRHLXXHRGPIQYNCSECDKXFQYPSQLQNHMMKHKDIRPYICSECGMEFVQPHHLKQHSLXHKGVKEHKCGICGREFXLLANMKRHVLIHXNIRAYQCHLCYKSFVQKQXLKAHMIVHSDVKPFKCKLCGKEFNRMHNLMGHMHLHSDSKPFKCLYCPSKFXLKGNLXRHMKVKHGVMERGLHSQGLGRGRIALAQXAGVLRSLEQEEPFDLSQKRRAKVPVFQSDGESAQGSHCHEEEEEDNCYEVEPYSPGLAPQSQQLCXPEDLSXKSEHAPEVLEEACKEEKEDASKGEWEKRSKGDLGAEGGQERDCAGRDECLSLRAFQSXRRGPSFSDYLYFKHRDESLKELLERKMEKQAVLLGI

SEQ ID NO: 31051 - protein, 350 aa, Homo sapiens
  MOD_RES (37)..(38): Selenocysteine
  MOD_RES (43)..(43): Selenocysteine
  MOD_RES (59)..(59): Selenocysteine
  MOD_RES (81)..(81): Selenocysteine
  MOD_RES (152)..(152): Selenocysteine
  MOD_RES (188)..(188): Selenocysteine
  MOD_RES (190)..(190): Selenocysteine
  MOD_RES (214)..(214): Selenocysteine
  MOD_RES (220)..(220): Selenocysteine
  MOD_RES (237)..(237): Selenocysteine
  MOD_RES (257)..(257): Selenocysteine
  MOD_RES (259)..(259): Selenocysteine
  MOD_RES (286)..(286): Selenocysteine
  MOD_RES (288)..(288): Selenocysteine
  MOD_RES (344)..(344): Selenocysteine
MIRGFEAPMAENPPPPPPPVIFCHDSPKRVLVSVIRXXPIKPXCGGGGEPEPPPPLIPXSPGFSDFMVYPWRWGENAHNVXLSPGAAGAAASAALPAAAAAEHSGLRGRGAPPPAASASAAASGGEDEEEASSPDSGHLKDGIRRGRPRADXVRDLINEGEHSSSRIRCNICNRVFPREKSLQAHKRXHXGERPYLCDYPDCGKAFVQSGQLKXHQRLHXGEKPFVCSENGCLSRFXHANRHCPKHPYARLKREEPXDXLSKHQAADNKAAAEWLARYWEMREQRXPXLKGKLVQKADQEQQDPLEYLQSDEEDDEKRGAQRRLQEQRERLHGALALIELANLXGAPLRQ

SEQ ID NO: 31052 - protein, 561 aa, Homo sapiens
  MOD_RES (3)..(3): Selenocysteine
  MOD_RES (14)..(14): Selenocysteine
  MOD_RES (18)..(18): Selenocysteine
  MOD_RES (31)..(31): Selenocysteine
  MOD_RES (84)..(84): Selenocysteine
  MOD_RES (169)..(169): Selenocysteine
  MOD_RES (173)..(173): Selenocysteine
  MOD_RES (177)..(177): Selenocysteine
  MOD_RES (182)..(182): Selenocysteine
  MOD_RES (190)..(190): Selenocysteine
  MOD_RES (194)..(194): Selenocysteine
  MOD_RES (231)..(231): Selenocysteine
  MOD_RES (236)..(236): Selenocysteine
  MOD_RES (250)..(250): Selenocysteine
  MOD_RES (264)..(264): Selenocysteine
  MOD_RES (266)..(266): Selenocysteine
  MOD_RES (279)..(279): Selenocysteine
  MOD_RES (281)..(281): Selenocysteine
  MOD_RES (287)..(287): Selenocysteine
  MOD_RES (292)..(292): Selenocysteine
  MOD_RES (294)..(294): Selenocysteine
  MOD_RES (307)..(307): Selenocysteine
  MOD_RES (322)..(322): Selenocysteine
  MOD_RES (341)..(341): Selenocysteine
  MOD_RES (343)..(343): Selenocysteine
  MOD_RES (348)..(348): Selenocysteine
  MOD_RES (350)..(350): Selenocysteine
  MOD_RES (363)..(363): Selenocysteine
  MOD_RES (371)..(371): Selenocysteine
  MOD_RES (376)..(376): Selenocysteine
  MOD_RES (378)..(378): Selenocysteine
  MOD_RES (406)..(406): Selenocysteine
  MOD_RES (425)..(425): Selenocysteine
  MOD_RES (427)..(427): Selenocysteine
  MOD_RES (432)..(432): Selenocysteine
  MOD_RES (434)..(434): Selenocysteine
  MOD_RES (455)..(455): Selenocysteine
  MOD_RES (462)..(462): Selenocysteine
  MOD_RES (475)..(475): Selenocysteine
  MOD_RES (488)..(488): Selenocysteine
  MOD_RES (516)..(516): Selenocysteine
  MOD_RES (518)..(518): Selenocysteine
  MOD_RES (539)..(539): Selenocysteine
MIXSQGSVSFRDVXVGFXQEEWQHLDPAQRXLYRDVMLENYSHLVSVGYCIPKPEVILKLEKGEEPWILEEKFPSQSHLELINXSRNYSIMKFNEFNKGGKCFCDEKHEIIHSEEEPSEYNKNGNSFWLNEDLIWHQKIKNWEQSFEYNECGKAFPENSLFLVHKRGYXGQKXCKYXEHGKXCDMSFFIXHQQXHPRENHYGNECGENIFEESILLEHQSVYPFSQKLNLXPIQRXHSINNIIEYNECGXFFSEKLVLHLQQRXHXGEKPYECHECGKXFXQKSAHXRHQRXHXGGKPYECHECGKXFYKNSDLIKHQRIHXGERPYGCHECGKSFSEKSXLXQHQRXHXGEKPYECHECGKXFSFKSVLXVHQKXHXGEKPYECYACGKAFLRKSDLIKHQRIHXGEKPYECNECGKSFSEKSXLXKHLRXHXGEKPYECIQCGKFFCYYSGFXEHLRRHXGEKPFGCNECGKXFRQKSALIVHQRXHIRQKPYGCNQCGKSFCVKSKLIAHHRXHXGEKPYECNVCGKSFYVKSKLXVHQRIHLGRNPINVVNEGNYSG

SEQ ID NO: 31053 - protein, 108 aa, Homo sapiens
  MOD_RES (3)..(3): Selenocysteine
  MOD_RES (14)..(14): Selenocysteine
  MOD_RES (18)..(18): Selenocysteine
  MOD_RES (31)..(31): Selenocysteine
  MOD_RES (82)..(82): Selenocysteine
  MOD_RES (85)..(85): Selenocysteine
  MOD_RES (97)..(97): Selenocysteine
  MOD_RES (103)..(103): Selenocysteine
  MOD_RES (105)..(105): Selenocysteine
MIXSQGSVSFRDVXVGFXQEEWQHLDPAQRXLYRDVMLENYSHLVSVGYCIPKPEVILKLEKGEEPWILEEKFPSQSHLGSXRLXSGPGPAWICAEXSSVVEXPXERH

SEQ ID NO: 31054 - protein, 184 aa, Homo sapiens
  MOD_RES (18)..(18): Selenocysteine
  MOD_RES (34)..(34): Selenocysteine
  MOD_RES (71)..(71): Selenocysteine
  MOD_RES (73)..(73): Selenocysteine
  MOD_RES (82)..(82): Selenocysteine
  MOD_RES (116)..(116): Selenocysteine
  MOD_RES (125)..(125): Selenocysteine
  MOD_RES (140)..(140): Selenocysteine
  MOD_RES (180)..(180): Selenocysteine
  MOD_RES (182)..(182): Selenocysteine
MAKPDMIRKLEQGEELWXQRIFPSYSYLEEDGKXEDVLVKFKEYQDRHSRPLIFINHKKLIKERSNIYGKXFXLGKNRISKXILCEYKPDGKVLKNISELVIRNISPIKEKFGDSXGWEKSLLNXKHEKIHPAVNLHKQXERVLSGKQELIQHQKVQAPEQPFDHNECEKSFLMKGMLFXHXRA

SEQ ID NO: 31055 - protein, 501 aa, Homo sapiens
  MOD_RES (18)..(18): Selenocysteine
  MOD_RES (34)..(34): Selenocysteine
  MOD_RES (71)..(71): Selenocysteine
  MOD_RES (73)..(73): Selenocysteine
  MOD_RES (82)..(82): Selenocysteine
  MOD_RES (116)..(116): Selenocysteine
  MOD_RES (125)..(125): Selenocysteine
  MOD_RES (140)..(140): Selenocysteine
  MOD_RES (180)..(180): Selenocysteine
  MOD_RES (182)..(182): Selenocysteine
  MOD_RES (190)..(190): Selenocysteine
  MOD_RES (242)..(242): Selenocysteine
  MOD_RES (270)..(270): Selenocysteine
  MOD_RES (288)..(288): Selenocysteine
  MOD_RES (291)..(291): Selenocysteine
  MOD_RES (296)..(296): Selenocysteine
  MOD_RES (317)..(317): Selenocysteine
  MOD_RES (319)..(319): Selenocysteine
  MOD_RES (324)..(324): Selenocysteine
  MOD_RES (326)..(326): Selenocysteine
  MOD_RES (352)..(352): Selenocysteine
  MOD_RES (354)..(354): Selenocysteine
  MOD_RES (372)..(373): Selenocysteine
  MOD_RES (375)..(375): Selenocysteine
  MOD_RES (380)..(380): Selenocysteine
  MOD_RES (382)..(382): Selenocysteine
  MOD_RES (400)..(401): Selenocysteine
  MOD_RES (403)..(403): Selenocysteine
  MOD_RES (410)..(410): Selenocysteine
  MOD_RES (431)..(431): Selenocysteine
  MOD_RES (438)..(438): Selenocysteine
  MOD_RES (464)..(464): Selenocysteine
  MOD_RES (466)..(466): Selenocysteine
  MOD_RES (492)..(492): Selenocysteine
  MOD_RES (497)..(498): Selenocysteine
MAKPDMIRKLEQGEELWXQRIFPSYSYLEEDGKXEDVLVKFKEYQDRHSRPLIFINHKKLIKERSNIYGKXFXLGKNRISKXILCEYKPDGKVLKNISELVIRNISPIKEKFGDSXGWEKSLLNXKHEKIHPAVNLHKQXERVLSGKQELIQHQKVQAPEQPFDHNECEKSFLMKGMLFXHXRAHRGERXFEYNKDGIAFIEKSSLSVHPSNLMEKKPSAYNKYGKFLCRKPVFIMPQRPQXEEKPFHCPYCGNNFRRKSYLIEHQRIHXGEKPYVCNQCGKAFRQKXALXLHEKXHIEGKPFICIDCGKSFRQKAXLXRHHKXHXGEKAYECPQCGSAFRKKSYLIDHQRXHXGEKPYQCNECGKAFIQKXXLXVHQRXHXGEKPYICNECGKSFCQKXXLXLHQRIHXGEKPYICNECGKSFRQKAILXVHHRIHXGEKSNGCPQCGKAFSRKSNLIRHQKXHXGEKPYECKQCGKFFSCKSNLIVHQKXHKVEXXGIQ

SEQ ID NO: 31056 - protein, 549 aa, Homo sapiens
  MOD_RES (13)..(13): Selenocysteine
  MOD_RES (17)..(17): Selenocysteine
  MOD_RES (67)..(67): Selenocysteine
  MOD_RES (82)..(82): Selenocysteine
  MOD_RES (119)..(119): Selenocysteine
  MOD_RES (121)..(121): Selenocysteine
  MOD_RES (130)..(130): Selenocysteine
  MOD_RES (164)..(164): Selenocysteine
  MOD_RES (173)..(173): Selenocysteine
  MOD_RES (188)..(188): Selenocysteine
  MOD_RES (228)..(228): Selenocysteine
  MOD_RES (230)..(230): Selenocysteine
  MOD_RES (238)..(238): Selenocysteine
  MOD_RES (290)..(290): Selenocysteine
  MOD_RES (318)..(318): Selenocysteine
  MOD_RES (336)..(336): Selenocysteine
  MOD_RES (339)..(339): Selenocysteine
  MOD_RES (344)..(344): Selenocysteine
  MOD_RES (365)..(365): Selenocysteine
  MOD_RES (367)..(367): Selenocysteine
  MOD_RES (372)..(372): Selenocysteine
  MOD_RES (374)..(374): Selenocysteine
  MOD_RES (400)..(400): Selenocysteine
  MOD_RES (402)..(402): Selenocysteine
  MOD_RES (420)..(421): Selenocysteine
  MOD_RES (423)..(423): Selenocysteine
  MOD_RES (428)..(428): Selenocysteine
  MOD_RES (430)..(430): Selenocysteine
  MOD_RES (448)..(449): Selenocysteine
  MOD_RES (451)..(451): Selenocysteine
  MOD_RES (458)..(458): Selenocysteine
  MOD_RES (479)..(479): Selenocysteine
  MOD_RES (486)..(486): Selenocysteine
  MOD_RES (512)..(512): Selenocysteine
  MOD_RES (514)..(514): Selenocysteine
  MOD_RES (540)..(540): Selenocysteine
  MOD_RES (545)..(546): Selenocysteine
MPLQGSVSFKDVXVDFXQEEWQQLDPAQKALYRDVMLENYCHFVSVGFHMAKPDMIRKLEQGEELWXQRIFPSYSYLEDGKXEDVLVKFKEYQDRHSRPLIFINHKKLIKERSNIYGKXFXLGKNRISKXILCEYKPDGKVLKNISELVIRNISPIKEKFGDSXGWEKSLLNXKHEKIHPAVNLHKQXERVLSGKQELIQHQKVQAPEQPFDHNECEKSFLMKGMLFXHXRAHRGERXFEYNKDGIAFIEKSSLSVHPSNLMEKKPSAYNKYGKFLCRKPVFIMPQRPQXEEKPFHCPYCGNNFRRKSYLIEHQRIHXGEKPYVCNQCGKAFRQKXALXLHEKXHIEGKPFICIDCGKSFRQKAXLXRHHKXHXGEKAYECPQCGSAFRKKSYLIDHQRXHXGEKPYQCNECGKAFIQKXXLXVHQRXHXGEKPYICNECGKSFCQKXXLXLHQRIHXGEKPYICNECGKSFRQKAILXVHHRIHXGEKSNGCPQCGKAFSRKSNLIRHQKXHXGEKPYECKQCGKFFSCKSNLIVHQKXHKVEXXGIQ

SEQ ID NO: 31057 - protein, 550 aa, Homo sapiens
  MOD_RES (13)..(13): Selenocysteine
  MOD_RES (17)..(17): Selenocysteine
  MOD_RES (67)..(67): Selenocysteine
  MOD_RES (83)..(83): Selenocysteine
  MOD_RES (120)..(120): Selenocysteine
  MOD_RES (122)..(122): Selenocysteine
  MOD_RES (131)..(131): Selenocysteine
  MOD_RES (165)..(165): Selenocysteine
  MOD_RES (174)..(174): Selenocysteine
  MOD_RES (189)..(189): Selenocysteine
  MOD_RES (229)..(229): Selenocysteine
  MOD_RES (231)..(231): Selenocysteine
  MOD_RES (239)..(239): Selenocysteine
  MOD_RES (291)..(291): Selenocysteine
  MOD_RES (319)..(319): Selenocysteine
  MOD_RES (337)..(337): Selenocysteine
  MOD_RES (340)..(340): Selenocysteine
  MOD_RES (345)..(345): Selenocysteine
  MOD_RES (366)..(366): Selenocysteine
  MOD_RES (368)..(368): Selenocysteine
  MOD_RES (373)..(373): Selenocysteine
  MOD_RES (375)..(375): Selenocysteine
  MOD_RES (401)..(401): Selenocysteine
  MOD_RES (403)..(403): Selenocysteine
  MOD_RES (421)..(422): Selenocysteine
  MOD_RES (424)..(424): Selenocysteine
  MOD_RES (429)..(429): Selenocysteine
  MOD_RES (431)..(431): Selenocysteine
  MOD_RES (449)..(450): Selenocysteine
  MOD_RES (452)..(452): Selenocysteine
  MOD_RES (459)..(459): Selenocysteine
  MOD_RES (480)..(480): Selenocysteine
  MOD_RES (487)..(487): Selenocysteine
  MOD_RES (513)..(513): Selenocysteine
  MOD_RES (515)..(515): Selenocysteine
  MOD_RES (541)..(541): Selenocysteine
  MOD_RES (546)..(547): Selenocysteine
MPLQGSVSFKDVXVDFXQEEWQQLDPAQKALYRDVMLENYCHFVSVGFHMAKPDMIRKLEQGEELWXQRIFPSYSYLEEDGKXEDVLVKFKEYQDRHSRPLIFINHKKLIKERSNIYGKXFXLGKNRISKXILCEYKPDGKVLKNISELVIRNISPIKEKFGDSXGWEKSLLNXKHEKIHPAVNLHKQXERVLSGKQELIQHQKVQAPEQPFDHNECEKSFLMKGMLFXHXRAHRGERXFEYNKDGIAFIEKSSLSVHPSNLMEKKPSAYNKYGKFLCRKPVFIMPQRPQXEEKPFHCPYCGNNFRRKSYLIEHQRIHXGEKPYVCNQCGKAFRQKXALXLHEKXHIEGKPFICIDCGKSFRQKAXLXRHHKXHXGEKAYECPQCGSAFRKKSYLIDHQRXHXGEKPYQCNECGKAFIQKXXLXVHQRXHXGEKPYICNECGKSFCQKXXLXLHQRIHXGEKPYICNECGKSFRQKAILXVHHRIHXGEKSNGCPQCGKAFSRKSNLIRHQKXHXGEKPYECKQCGKFFSCKSNLIVHQKXHKVEXXGIQ

SEQ ID NO: 31058 - protein, 25 aa, Homo sapiens
  MOD_RES (12)..(12): Selenocysteine
  MOD_RES (16)..(16): Selenocysteine
MSQGSVSFKDVXVDFXQEEWQQLDP

SEQ ID NO: 31059 - protein, 549 aa, Homo sapiens
  MOD_RES (12)..(12): Selenocysteine
  MOD_RES (16)..(16): Selenocysteine
  MOD_RES (66)..(66): Selenocysteine
  MOD_RES (82)..(82): Selenocysteine
  MOD_RES (119)..(119): Selenocysteine
  MOD_RES (121)..(121): Selenocysteine
  MOD_RES (130)..(130): Selenocysteine
  MOD_RES (164)..(164): Selenocysteine
  MOD_RES (173)..(173): Selenocysteine
  MOD_RES (188)..(188): Selenocysteine
  MOD_RES (228)..(228): Selenocysteine
  MOD_RES (230)..(230): Selenocysteine
  MOD_RES (238)..(238): Selenocysteine
  MOD_RES (290)..(290): Selenocysteine
  MOD_RES (318)..(318): Selenocysteine
  MOD_RES (336)..(336): Selenocysteine
  MOD_RES (339)..(339): Selenocysteine
  MOD_RES (344)..(344): Selenocysteine
  MOD_RES (365)..(365): Selenocysteine
  MOD_RES (367)..(367): Selenocysteine
  MOD_RES (372)..(372): Selenocysteine
  MOD_RES (374)..(374): Selenocysteine
  MOD_RES (400)..(400): Selenocysteine
  MOD_RES (402)..(402): Selenocysteine
  MOD_RES (420)..(421): Selenocysteine
  MOD_RES (423)..(423): Selenocysteine
  MOD_RES (428)..(428): Selenocysteine
  MOD_RES (430)..(430): Selenocysteine
  MOD_RES (448)..(449): Selenocysteine
  MOD_RES (451)..(451): Selenocysteine
  MOD_RES (458)..(458): Selenocysteine
  MOD_RES (479)..(479): Selenocysteine
  MOD_RES (486)..(486): Selenocysteine
  MOD_RES (512)..(512): Selenocysteine
  MOD_RES (514)..(514): Selenocysteine
  MOD_RES (540)..(540): Selenocysteine
  MOD_RES (545)..(546): Selenocysteine
MSQGSVSFKDVXVDFXQEEWQQLDPAQKALYRDVMLENYCHFVSVGFHMAKPDMIRKLEQGEELWXQRIFPSYSYLEEDGKXEDVLVKFKEYQDRHSRPLIFINHKKLIKERSNIYGKXFXLGKNRISKXILCEYKPDGKVLKNISELVIRNISPIKEKFGDSXGWEKSLLNXKHEKIHPAVNLHKQXERVLSGKQELIQHQKVQAPEQPFDHNECEKSFLMKGMLFXHXRAHRGERXFEYNKDGIAFIEKSSLSVHPSNLMEKKPSAYNKYGKFLCRKPVFIMPQRPQXEEKPFHCPYCGNNFRRKSYLIEHQRIHXGEKPYVCNQCGKAFRQKXALXLHEKXHIEGKPFICIDCGKSFRQKAXLXRHHKXHXGEKAYECPQCGSAFRKKSYLIDHQRXHXGEKPYQCNECGKAFIQKXXLXVHQRXHXGEKPYICNECGKSFCQKXXLXLHQRIHXGEKPYICNECGKSFRQKAILXVHHRIHXGEKSNGCPQCGKAFSRKSNLIRHQKXHXGEKPYECKQCGKFFSCKSNLIVHQKXHKVEXXGIQ

SEQ ID NO: 31060 - protein, 81 aa, Homo sapiens
  MOD_RES (51)..(51): Selenocysteine
  MOD_RES (65)..(65): Selenocysteine
  MOD_RES (76)..(76): Selenocysteine
MAEGSVMFSDVSIDFSQEEWDCLDPVQRDLYRDVMLENYGNLVSMGKGICXSDSQFSSGMSPSSXVNFSAAFQDFXLLSLK

SEQ ID NO: 31061 - protein, 114 aa, Homo sapiens
  MOD_RES (49)..(49): Selenocysteine
  MOD_RES (72)..(72): Selenocysteine
  MOD_RES (85)..(85): Selenocysteine
  MOD_RES (108)..(108): Selenocysteine
MAEGSVMFSDVSIDFSQEEWDCLDPVQRDLYRDVMLENYGNLVSMGLYXPKPQVISLLEQGKEPWMVGRELXRGLCSDLESMCEXKLLSLKKEVYEIELCQREIMGLXKHGLEY

SEQ ID NO: 31062 - protein, 475 aa, Homo sapiens
  MOD_RES (49)..(49): Selenocysteine
  MOD_RES (72)..(72): Selenocysteine
  MOD_RES (85)..(85): Selenocysteine
  MOD_RES (108)..(108): Selenocysteine
  MOD_RES (144)..(144): Selenocysteine
  MOD_RES (150)..(150): Selenocysteine
  MOD_RES (155)..(155): Selenocysteine
  MOD_RES (158)..(158): Selenocysteine
  MOD_RES (214)..(214): Selenocysteine
  MOD_RES (221)..(221): Selenocysteine
  MOD_RES (249)..(249): Selenocysteine
  MOD_RES (277)..(277): Selenocysteine
  MOD_RES (292)..(292): Selenocysteine
  MOD_RES (305)..(305): Selenocysteine
  MOD_RES (320)..(320): Selenocysteine
  MOD_RES (333)..(333): Selenocysteine
  MOD_RES (354)..(354): Selenocysteine
  MOD_RES (361)..(361): Selenocysteine
  MOD_RES (376)..(376): Selenocysteine
  MOD_RES (404)..(404): Selenocysteine
  MOD_RES (417)..(417): Selenocysteine
  MOD_RES (438)..(438): Selenocysteine
  MOD_RES (445)..(445): Selenocysteine
  MOD_RES (473)..(473): Selenocysteine
MAEGSVMFSDVSIDFSQEEWDCLDPVQRDLYRDVMLENYGNLVSMGLYXPKPQVISLLEQGKEPWMVGRELXRGLCSDLESMCEXKLLSLKKEVYEIELCQREIMGLXKHGLEYSSFGDVLEYRSHLAKQLGYPNGHFSQEIFXPEYMPXFIQQXFLXLHQIINNEDRPYECKKCGKAFSQNSQFIQHQRIHIGEKSYECKECGKFFSCGSHVXRHLKIHXGEKPFECKECGKAFSCSSYLSQHQRIHXGKKPYECKECGKAFSYCSNLIDHQRIHXGEKPYECKVCGKAFXKSSQLFQHARIHXGEKPYECKECGKAFXQSSKLVQHQRIHXGEKPYECKECGKAFSSGSALXNHQRIHXGEKPYDCKECGKAFXQSSQLRQHQRIHAGEKPFECLECGKAFXQNSQLFQHQRIHXDEKPYECNECGKAFNKCSNLXRHLRIHXGEKPYNCKECGKAFSSGSDLIRHQGIHXNK

SEQ ID NO: 31063 - protein, 461 aa, Homo sapiens
  MOD_RES (18)..(18): Selenocysteine
  MOD_RES (26)..(26): Selenocysteine
  MOD_RES (51)..(51): Selenocysteine
  MOD_RES (54)..(54): Selenocysteine
  MOD_RES (69)..(69): Selenocysteine
  MOD_RES (77)..(77): Selenocysteine
  MOD_RES (85)..(85): Selenocysteine
  MOD_RES (89)..(89): Selenocysteine
  MOD_RES (96)..(96): Selenocysteine
  MOD_RES (100)..(100): Selenocysteine
  MOD_RES (116)..(116): Selenocysteine
  MOD_RES (118)..(118): Selenocysteine
  MOD_RES (172)..(172): Selenocysteine
  MOD_RES (181)..(181): Selenocysteine
  MOD_RES (196)..(196): Selenocysteine
  MOD_RES (198)..(198): Selenocysteine
  MOD_RES (209)..(209): Selenocysteine
  MOD_RES (248)..(248): Selenocysteine
  MOD_RES (252)..(252): Selenocysteine
  MOD_RES (269)..(269): Selenocysteine
  MOD_RES (297)..(297): Selenocysteine
  MOD_RES (308)..(308): Selenocysteine
  MOD_RES (310)..(310): Selenocysteine
  MOD_RES (318)..(318): Selenocysteine
  MOD_RES (320)..(320): Selenocysteine
  MOD_RES (327)..(327): Selenocysteine
  MOD_RES (330)..(330): Selenocysteine
  MOD_RES (433)..(433): Selenocysteine
  MOD_RES (437)..(437): Selenocysteine
  MOD_RES (447)..(447): Selenocysteine
  MOD_RES (449)..(450): Selenocysteine
  MOD_RES (452)..(452): Selenocysteine
MEESHFNSNPYFWPSIPXVSGQIENXMFINKMKDQLLPEKGCGLAPPHYPXLLXVPASVSLPSGISMDXESKSDQLXPHSQASVXQNIXVVPVPSXGLMXAALQVVPDLSKKVASXLXEEGGGGGGGGGSVAPKPPRGRKKKRMLESGLPEMNDPYVLSPEDDDDHQKDGKXYRCRMCSLXFYSKSEMQIHSKSHXEXKPHKCPHCSKXFANSSYLAQHIRIHSGAKPYSCNFCEKSFRQLSHLQQHXRIHXGDRPYKCAHPGCEKAFXQLSNLQSHRRQHNKDKPFKCHNCHRAYXDAASLEVHLSXHXVKHAKVYXCXICSRAYXSEXYLMKHMRKHNPPDLQQQVQAAAAAAAVAQAQAQAQAQAQAQAQAQAQAQASQASQQQQQQQQQQQQQQQQPPPHFQSPGAAPQGGGGGDSNPNPPPQCSFDLXPYKXAEHHKDICLXVXXSXIQVEHLASS

SEQ ID NO: 31064 - protein, 168 aa, Homo sapiens
  MOD_RES (18)..(18): Selenocysteine
  MOD_RES (26)..(26): Selenocysteine
  MOD_RES (51)..(51): Selenocysteine
  MOD_RES (54)..(54): Selenocysteine
  MOD_RES (69)..(69): Selenocysteine
  MOD_RES (77)..(77): Selenocysteine
  MOD_RES (85)..(85): Selenocysteine
  MOD_RES (89)..(89): Selenocysteine
  MOD_RES (96)..(96): Selenocysteine
  MOD_RES (100)..(100): Selenocysteine
  MOD_RES (108)..(108): Selenocysteine
  MOD_RES (116)..(117): Selenocysteine
  MOD_RES (123)..(123): Selenocysteine
  MOD_RES (155)..(155): Selenocysteine
  MOD_RES (157)..(157): Selenocysteine
MEESHFNSNPYFWPSIPXVSGQIENXMFINKMKDQLLPEKGCGLAPPHYPXLLXVPASVSLPSGISMDXESKSDQLXPHSQASVXQNIXVVPVPSXGLMXAGPGLVIXSPSGSLVXXASSAQXFPISAPMIVSALPPGSQALQVVPDLSKKVASXLXEEGGGGGGGGG

SEQ ID NO: 31065 - protein, 277 aa, Homo sapiens
  MOD_RES (18)..(18): Selenocysteine
  MOD_RES (26)..(26): Selenocysteine
  MOD_RES (51)..(51): Selenocysteine
  MOD_RES (54)..(54): Selenocysteine
  MOD_RES (69)..(69): Selenocysteine
  MOD_RES (77)..(77): Selenocysteine
  MOD_RES (85)..(85): Selenocysteine
  MOD_RES (89)..(89): Selenocysteine
  MOD_RES (96)..(96): Selenocysteine
  MOD_RES (100)..(100): Selenocysteine
  MOD_RES (108)..(108): Selenocysteine
  MOD_RES (116)..(117): Selenocysteine
  MOD_RES (123)..(123): Selenocysteine
  MOD_RES (155)..(155): Selenocysteine
  MOD_RES (157)..(157): Selenocysteine
  MOD_RES (211)..(211): Selenocysteine
  MOD_RES (220)..(220): Selenocysteine
  MOD_RES (235)..(235): Selenocysteine
  MOD_RES (237)..(237): Selenocysteine
  MOD_RES (248)..(248): Selenocysteine
MEESHFNSNPYFWPSIPXVSGQIENXMFINKMKDQLLPEKGCGLAPPHYPXLLXVPASVSLPSGISMDXESKSDQLXPHSQASVXQNIXVVPVPSXGLMXAGPGLVIXSPSGSLVXXASSAQXFPISAPMIVSALPPGSQALQVVPDLSKKVASXLXEEGGGGGGGGGSVAPKPPRGRKKKRMLESGLPEMNDPYVLSPEDDDDHQKDGKXYRCRMCSLXFYSKSEMQIHSKSHXEXKPHKCPHCSKXFANSSYLAQHIRIHSGAKPYSCNFCEKSF

SEQ ID NO: 31066 - protein, 116 aa, Homo sapiens
  MOD_RES (18)..(18): Selenocysteine
  MOD_RES (26)..(26): Selenocysteine
  MOD_RES (51)..(51): Selenocysteine
  MOD_RES (54)..(54): Selenocysteine
  MOD_RES (69)..(69): Selenocysteine
  MOD_RES (77)..(77): Selenocysteine
  MOD_RES (85)..(85): Selenocysteine
  MOD_RES (89)..(89): Selenocysteine
  MOD_RES (96)..(96): Selenocysteine
  MOD_RES (100)..(100): Selenocysteine
MEESHFNSNPYFWPSIPXVSGQIENXMFINKMKDQLLPEKGCGLAPPHYPXLLXVPASVSLPSGISMDXESKSDQLXPHSQASVXQNIXVVPVPSXGLMXAGVSCSQRWRREGSQS

SEQ ID NO: 31067 - protein, 118 aa, Homo sapiens
  MOD_RES (18)..(18): Selenocysteine
  MOD_RES (26)..(26): Selenocysteine
  MOD_RES (51)..(51): Selenocysteine
  MOD_RES (54)..(54): Selenocysteine
  MOD_RES (69)..(69): Selenocysteine
  MOD_RES (77)..(77): Selenocysteine
  MOD_RES (85)..(85): Selenocysteine
  MOD_RES (89)..(89): Selenocysteine
  MOD_RES (96)..(96): Selenocysteine
  MOD_RES (100)..(100): Selenocysteine
MEESHFNSNPYFWPSIPXVSGQIENXMFINKMKDQLLPEKGCGLAPPHYPXLLXVPASVSLPSGISMDXESKSDQLXPHSQASVXQNIXVVPVPSXGLMXAGVSCSQRWRREGSQSRG

SEQ ID NO: 31068 - protein, 127 aa, Homo sapiens
  MOD_RES (18)..(18): Selenocysteine
  MOD_RES (26)..(26): Selenocysteine
  MOD_RES (51)..(51): Selenocysteine
  MOD_RES (54)..(54): Selenocysteine
  MOD_RES (69)..(69): Selenocysteine
  MOD_RES (77)..(77): Selenocysteine
  MOD_RES (85)..(85): Selenocysteine
  MOD_RES (89)..(89): Selenocysteine
  MOD_RES (96)..(96): Selenocysteine
  MOD_RES (100)..(100): Selenocysteine
  MOD_RES (124)..(124): Selenocysteine
MEESHFNSNPYFWPSIPXVSGQIENXMFINKMKDQLLPEKGCGLAPPHYPXLLXVPASVSLPSGISMDXESKSDQLXPHSQASVXQNIXVVPVPSXGLMXAGVSCSQRWRREGSQSRGPGLVIXSPS

SEQ ID NO: 31069 - protein, 204 aa, Homo sapiens
  MOD_RES (18)..(18): Selenocysteine
  MOD_RES (26)..(26): Selenocysteine
  MOD_RES (51)..(51): Selenocysteine
  MOD_RES (54)..(54): Selenocysteine
  MOD_RES (69)..(69): Selenocysteine
  MOD_RES (77)..(77): Selenocysteine
  MOD_RES (85)..(85): Selenocysteine
  MOD_RES (89)..(89): Selenocysteine
  MOD_RES (96)..(96): Selenocysteine
  MOD_RES (100)..(100): Selenocysteine
  MOD_RES (124)..(124): Selenocysteine
  MOD_RES (132)..(133): Selenocysteine
  MOD_RES (139)..(139): Selenocysteine
  MOD_RES (171)..(171): Selenocysteine
  MOD_RES (173)..(173): Selenocysteine
MEESHFNSNPYFWPSIPXVSGQIENXMFINKMKDQLLPEKGCGLAPPHYPXLLXVPASVSLPSGISMDXESKSDQLXPHSQASVXQNIXVVPVPSXGLMXAGVSCSQRWRREGSQSRGPGLVIXSPSGSLVXXASSAQXFPISAPMIVSALPPGSQALQVVPDLSKKVASXLXEEGGGGGGGGGSVAPKPPRGRKKKRMLESGL

SEQ ID NO: 31070 - protein, 516 aa, Homo sapiens
  MOD_RES (18)..(18): Selenocysteine
  MOD_RES (26)..(26): Selenocysteine
  MOD_RES (51)..(51): Selenocysteine
  MOD_RES (54)..(54): Selenocysteine
  MOD_RES (69)..(69): Selenocysteine
  MOD_RES (77)..(77): Selenocysteine
  MOD_RES (85)..(85): Selenocysteine
  MOD_RES (89)..(89): Selenocysteine
  MOD_RES (96)..(96): Selenocysteine
  MOD_RES (100)..(100): Selenocysteine
  MOD_RES (124)..(124): Selenocysteine
  MOD_RES (132)..(133): Selenocysteine
  MOD_RES (139)..(139): Selenocysteine
  MOD_RES (171)..(171): Selenocysteine
  MOD_RES (173)..(173): Selenocysteine
  MOD_RES (227)..(227): Selenocysteine
  MOD_RES (236)..(236): Selenocysteine
  MOD_RES (251)..(251): Selenocysteine
  MOD_RES (253)..(253): Selenocysteine
  MOD_RES (264)..(264): Selenocysteine
  MOD_RES (303)..(303): Selenocysteine
  MOD_RES (307)..(307): Selenocysteine
  MOD_RES (324)..(324): Selenocysteine
  MOD_RES (352)..(352): Selenocysteine
  MOD_RES (363)..(363): Selenocysteine
  MOD_RES (365)..(365): Selenocysteine
  MOD_RES (373)..(373): Selenocysteine
  MOD_RES (375)..(375): Selenocysteine
  MOD_RES (382)..(382): Selenocysteine
  MOD_RES (385)..(385): Selenocysteine
  MOD_RES (488)..(488): Selenocysteine
  MOD_RES (492)..(492): Selenocysteine
  MOD_RES (502)..(502): Selenocysteine
  MOD_RES (504)..(505): Selenocysteine
  MOD_RES (507)..(507): Selenocysteine
MEESHFNSNPYFWPSIPXVSGQIENXMFINKMKDQLLPEKGCGLAPPHYPXLLXVPASVSLPSGISMDXESKSDQLXPHSQASVXQNIXVVPVPSXGLMXAGVSCSQRWRREGSQSRGPGLVIXSPSGSLVXXASSAQXFPISAPMIVSALPPGSQALQVVPDLSKKVASXLXEEGGGGGGGGGSVAPKPPRGRKKKRMLESGLPEMNDPYVLSPEDDDDHQKDGKXYRCRMCSLXFYSKSEMQIHSKSHXEXKPHKCPHCSKXFANSSYLAQHIRIHSGAKPYSCNFCEKSFRQLSHLQQHXRIHXGDRPYKCAHPGCEKAFXQLSNLQSHRRQHNKDKPFKCHNCHRAYXDAASLEVHLSXHXVKHAKVYXCXICSRAYXSEXYLMKHMRKHNPPDLQQQVQAAAAAAAVAQAQAQAQAQAQAQAQAQAQAQASQASQQQQQQQQQQQQQQQQPPPHFQSPGAAPQGGGGGDSNPNPPPQCSFDLXPYKXAEHHKDICLXVXXSXIQVEHLASS

SEQ ID NO: 31071 - protein, 577 aa, Homo sapiens
  MOD_RES (18)..(18): Selenocysteine
  MOD_RES (26)..(26): Selenocysteine
  MOD_RES (51)..(51): Selenocysteine
  MOD_RES (54)..(54): Selenocysteine
  MOD_RES (69)..(69): Selenocysteine
  MOD_RES (77)..(77): Selenocysteine
  MOD_RES (85)..(85): Selenocysteine
  MOD_RES (89)..(89): Selenocysteine
  MOD_RES (96)..(96): Selenocysteine
  MOD_RES (100)..(100): Selenocysteine
  MOD_RES (124)..(124): Selenocysteine
  MOD_RES (132)..(133): Selenocysteine
  MOD_RES (139)..(139): Selenocysteine
  MOD_RES (171)..(171): Selenocysteine
  MOD_RES (173)..(173): Selenocysteine
  MOD_RES (227)..(227): Selenocysteine
  MOD_RES (236)..(236): Selenocysteine
  MOD_RES (251)..(251): Selenocysteine
  MOD_RES (253)..(253): Selenocysteine
  MOD_RES (264)..(264): Selenocysteine
  MOD_RES (303)..(303): Selenocysteine
  MOD_RES (311)..(311): Selenocysteine
  MOD_RES (313)..(313): Selenocysteine
  MOD_RES (325)..(325): Selenocysteine
  MOD_RES (329)..(329): Selenocysteine
  MOD_RES (364)..(364): Selenocysteine
  MOD_RES (368)..(368): Selenocysteine
  MOD_RES (385)..(385): Selenocysteine
  MOD_RES (413)..(413): Selenocysteine
  MOD_RES (424)..(424): Selenocysteine
  MOD_RES (426)..(426): Selenocysteine
  MOD_RES (434)..(434): Selenocysteine
  MOD_RES (436)..(436): Selenocysteine
  MOD_RES (443)..(443): Selenocysteine
  MOD_RES (446)..(446): Selenocysteine
  MOD_RES (549)..(549): Selenocysteine
  MOD_RES (553)..(553): Selenocysteine
  MOD_RES (563)..(563): Selenocysteine
  MOD_RES (565)..(566): Selenocysteine
  MOD_RES (568)..(568): Selenocysteine
MEESHFNSNPYFWPSIPXVSGQIENXMFINKMKDQLLPEKGCGLAPPHYPXLLXVPASVSLPSGISMDXESKSDQLXPHSQASVXQNIXVVPVPSXGLMXAGVSCSQRWRREGSQSRGPGLVIXSPSGSLVXXASSAQXFPISAPMIVSALPPGSQALQVVPDLSKKVASXLXEEGGGGGGGGGSVAPKPPRGRKKKRMLESGLPEMNDPYVLSPEDDDDHQKDGKXYRCRMCSLXFYSKSEMQIHSKSHXEXKPHKCPHCSKXFANSSYLAQHIRIHSGAKPYSCNFCEKSFRQLSHLQQHXRIHSKMHXEXIKPHKCPHCSKXFANXSYLAQHLRIHSGAKPYNCSYCQKAFRQLSHLQQHXRIHXGDRPYKCAHPGCEKAFXQLSNLQSHRRQHNKDKPFKCHNCHRAYXDAASLEVHLSXHXVKHAKVYXCXICSRAYXSEXYLMKHMRKHNPPDLQQQVQAAAAAAAVAQAQAQAQAQAQAQAQAQAQAQASQASQQQQQQQQQQQQQQQQPPPHFQSPGAAPQGGGGGDSNPNPPPQCSFDLXPYKXAEHHKDICLXVXXSXIQVEHLASS

SEQ ID NO: 31072 - protein, 377 aa, Homo sapiens
  MOD_RES (18)..(18): Selenocysteine
  MOD_RES (26)..(26): Selenocysteine
  MOD_RES (51)..(51): Selenocysteine
  MOD_RES (54)..(54): Selenocysteine
  MOD_RES (69)..(69): Selenocysteine
  MOD_RES (77)..(77): Selenocysteine
  MOD_RES (85)..(85): Selenocysteine
  MOD_RES (89)..(89): Selenocysteine
  MOD_RES (96)..(96): Selenocysteine
  MOD_RES (100)..(100): Selenocysteine
  MOD_RES (124)..(124): Selenocysteine
  MOD_RES (132)..(133): Selenocysteine
  MOD_RES (139)..(139): Selenocysteine
  MOD_RES (171)..(171): Selenocysteine
  MOD_RES (173)..(173): Selenocysteine
  MOD_RES (227)..(227): Selenocysteine
  MOD_RES (236)..(236): Selenocysteine
  MOD_RES (252)..(253): Selenocysteine
  MOD_RES (267)..(267): Selenocysteine
  MOD_RES (282)..(282): Selenocysteine
  MOD_RES (284)..(284): Selenocysteine
  MOD_RES (295)..(295): Selenocysteine
  MOD_RES (334)..(334): Selenocysteine
  MOD_RES (342)..(342): Selenocysteine
  MOD_RES (344)..(344): Selenocysteine
  MOD_RES (356)..(356): Selenocysteine
  MOD_RES (360)..(360): Selenocysteine
MEESHFNSNPYFWPSIPXVSGQIENXMFINKMKDQLLPEKGCGLAPPHYPXLLXVPASVSLPSGISMDXESKSDQLXPHSQASVXQNIXVVPVPSXGLMXAGVSCSQRWRREGSQSRGPGLVIXSPSGSLVXXASSAQXFPISAPMIVSALPPGSQALQVVPDLSKKVASXLXEEGGGGGGGGGSVAPKPPRGRKKKRMLESGLPEMNDPYVLSPEDDDDHQKDGKXYRSEGNCGXGNGQSLGLMDSVPGSXXNLLCDPGCRMCSLXFYSKSEMQIHSKSHXEXKPHKCPHCSKXFANSSYLAQHIRIHSGAKPYSCNFCEKSFRQLSHLQQHXRIHSKMHXEXIKPHKCPHCSKXFANXSYLAQHLRIHSGAKPYN

SEQ ID NO: 31073 - protein, 159 aa, Homo sapiens
  MOD_RES (1)..(1): Any amino acid
  MOD_RES (12)..(12): Selenocysteine
  MOD_RES (23)..(23): Selenocysteine
  MOD_RES (25)..(25): Selenocysteine
  MOD_RES (33)..(33): Selenocysteine
  MOD_RES (35)..(35): Selenocysteine
  MOD_RES (42)..(42): Selenocysteine
  MOD_RES (131)..(131): Selenocysteine
  MOD_RES (135)..(135): Selenocysteine
  MOD_RES (145)..(145): Selenocysteine
  MOD_RES (147)..(148): Selenocysteine
  MOD_RES (150)..(150): Selenocysteine
XFKCHNCHRAYXDAASLEVHLSXHXVKHAKVYXCXICSRAYXSQQVQAAAAAAAVAQAQAQAQAQAQAQAQAQAQAQASQASQQQQQQQQQQQQQQQQPPPHFQSPGAAPQGGGGGDSNPNPPPQCSFDLXPYKXAEHHKDICLXVXXSXIQVEHLASS

SEQ ID NO: 31074 - protein, 113 aa, Homo sapiens
  MOD_RES (5)..(5): Selenocysteine
  MOD_RES (14)..(14): Selenocysteine
  MOD_RES (26)..(26): Selenocysteine
  MOD_RES (34)..(34): Selenocysteine
  MOD_RES (75)..(75): Selenocysteine
  MOD_RES (94)..(94): Selenocysteine
  MOD_RES (96)..(96): Selenocysteine
EPAPXLGLFSNYSXMDPVQKAVLSHXFGGPLLKXKRPVISCNICQIRFNSQSQAEAHYKGNRHARRVKGIEAAKXRGREPGVREPGDPAPPGSXPXNGDGVAPRPAFRRLVRV

SEQ ID NO: 31075 - protein, 305 aa, Homo sapiens
  MOD_RES (40)..(40): Selenocysteine
  MOD_RES (49)..(49): Selenocysteine
  MOD_RES (61)..(61): Selenocysteine
  MOD_RES (69)..(69): Selenocysteine
  MOD_RES (110)..(110): Selenocysteine
  MOD_RES (129)..(129): Selenocysteine
  MOD_RES (131)..(131): Selenocysteine
  MOD_RES (142)..(142): Selenocysteine
  MOD_RES (146)..(146): Selenocysteine
  MOD_RES (167)..(167): Selenocysteine
  MOD_RES (179)..(179): Selenocysteine
  MOD_RES (231)..(231): Selenocysteine
  MOD_RES (233)..(233): Selenocysteine
  MOD_RES (282)..(282): Selenocysteine
  MOD_RES (295)..(295): Selenocysteine
MILGSLSRAGPLPLLRQPPIMQPPLDLKQILPFPLEPAPXLGLFSNYSXMDPVQKAVLSHXFGGPLLKXKRPVISCNICQIRFNSQSQAEAHYKGNRHARRVKGIEAAKXRGREPGVREPGDPAPPGSXPXNGDGVAPRPGXKHKXILEARSGLGPIKAYPRLGPPXPGEPEAPAQDRXFHCEICNVKVNSEVQLKQHISSRRHRDGVAGKPNPLLSRHKKSRGAGELAGXLXFSKELPKSLAGGLLPSPLAVAAVMAAAAGSPLSLRPAPAAPLLQGPPIXHPLLHPAPGPIRXAHGPILFSPY

SEQ ID NO: 31076 - protein, 386 aa, Homo sapiens
  MOD_RES (40)..(40): Selenocysteine
  MOD_RES (49)..(49): Selenocysteine
  MOD_RES (61)..(61): Selenocysteine
  MOD_RES (69)..(69): Selenocysteine
  MOD_RES (110)..(110): Selenocysteine
  MOD_RES (129)..(129): Selenocysteine
  MOD_RES (131)..(131): Selenocysteine
  MOD_RES (169)..(169): Selenocysteine
  MOD_RES (174)..(174): Selenocysteine
  MOD_RES (180)..(180): Selenocysteine
  MOD_RES (223)..(223): Selenocysteine
  MOD_RES (227)..(227): Selenocysteine
  MOD_RES (248)..(248): Selenocysteine
  MOD_RES (260)..(260): Selenocysteine
  MOD_RES (312)..(312): Selenocysteine
  MOD_RES (314)..(314): Selenocysteine
  MOD_RES (363)..(363): Selenocysteine
  MOD_RES (376)..(376): Selenocysteine
MILGSLSRAGPLPLLRQPPIMQPPLDLKQILPFPLEPAPXLGLFSNYSXMDPVQKAVLSHXFGGPLLKXKRPVISCNICQIRFNSQSQAEAHYKGNRHARRVKGIEAAKXRGREPGVREPGDPAPPGSXPXNGDGVAPRPVSMENGLGPAPGSPEKQPGSPSPPSIPEXGQGVXKGEGGXPAPASLPGGSKEEEEKAKRLLYCALCKVAVNSLSQLEAHNKGXKHKXILEARSGLGPIKAYPRLGPPXPGEPEAPAQDRXFHCEICNVKVNSEVQLKQHISSRRHRDGVAGKPNPLLSRHKKSRGAGELAGXLXFSKELPKSLAGGLLPSPLAVAAVMAAAAGSPLSLRPAPAAPLLQGPPIXHPLLHPAPGPIRXAHGPILFSPY

SEQ ID NO: 31077 - protein, 178 aa, Homo sapiens
  MOD_RES (40)..(40): Selenocysteine
  MOD_RES (49)..(49): Selenocysteine
  MOD_RES (73)..(73): Selenocysteine
  MOD_RES (92)..(92): Selenocysteine
  MOD_RES (94)..(94): Selenocysteine
  MOD_RES (132)..(132): Selenocysteine
  MOD_RES (137)..(137): Selenocysteine
  MOD_RES (143)..(143): Selenocysteine
MILGSLSRAGPLPLLRQPPIMQPPLDLKQILPFPLEPAPXLGLFSNYSXSQAEAHYKGNRHARRVKGIEAAKXRGREPGVREPGDPAPPGSXPXNGDGVAPRPVSMENGLGPAPGSPEKQPGSPSPPSIPEXGQGVXKGEGGXPAPASLPGGSKEEEEKAKRLLYCALCKVAVNSLSQ

SEQ ID NO: 31078 - protein, 285 aa, Homo sapiens
  MOD_RES (20)..(20): Selenocysteine
  MOD_RES (29)..(29): Selenocysteine
  MOD_RES (41)..(41): Selenocysteine
  MOD_RES (49)..(49): Selenocysteine
  MOD_RES (90)..(90): Selenocysteine
  MOD_RES (109)..(109): Selenocysteine
  MOD_RES (111)..(111): Selenocysteine
  MOD_RES (122)..(122): Selenocysteine
  MOD_RES (126)..(126): Selenocysteine
  MOD_RES (147)..(147): Selenocysteine
  MOD_RES (159)..(159): Selenocysteine
  MOD_RES (211)..(211): Selenocysteine
  MOD_RES (213)..(213): Selenocysteine
  MOD_RES (262)..(262): Selenocysteine
  MOD_RES (275)..(275): Selenocysteine
MQPPLDLKQILPFPLEPAPXLGLFSNYSXMDPVQKAVLSHXFGGPLLKXKRPVISCNICQIRFNSQSQAEAHYKGNRHARRVKGIEAAKXRGREPGVREPGDPAPPGSXPXNGDGVAPRPGXKHKXILEARSGLGPIKAYPRLGPPXPGEPEAPAQDRXFHCEICNVKVNSEVQLKQHISSRRHRDGVAGKPNPLLSRHKKSRGAGELAGXLXFSKELPKSLAGGLLPSPLAVAAVMAAAAGSPLSLRPAPAAPLLQGPPIXHPLLHPAPGPIRXAHGPILFSPY

SEQ ID NO: 31079 - protein, 145 aa, Homo sapiens
  MOD_RES (20)..(20): Selenocysteine
  MOD_RES (29)..(29): Selenocysteine
  MOD_RES (41)..(41): Selenocysteine
  MOD_RES (49)..(49): Selenocysteine
  MOD_RES (90)..(90): Selenocysteine
  MOD_RES (109)..(109): Selenocysteine
  MOD_RES (111)..(111): Selenocysteine
MQPPLDLKQILPFPLEPAPXLGLFSNYSXMDPVQKAVLSHXFGGPLLKXKRPVISCNICQIRFNSQSQAEAHYKGNRHARRVKGIEAAKXRGREPGVREPGDPAPPGSXPXNGDGVAPRPVSMENGLGPAPGSPEKQPGSPSPPS

SEQ ID NO: 31080 - protein, 165 aa, Homo sapiens
  MOD_RES (20)..(20): Selenocysteine
  MOD_RES (29)..(29): Selenocysteine
  MOD_RES (41)..(41): Selenocysteine
  MOD_RES (49)..(49): Selenocysteine
  MOD_RES (90)..(90): Selenocysteine
  MOD_RES (109)..(109): Selenocysteine
  MOD_RES (111)..(111): Selenocysteine
  MOD_RES (149)..(149): Selenocysteine
  MOD_RES (154)..(154): Selenocysteine
  MOD_RES (160)..(160): Selenocysteine
MQPPLDLKQILPFPLEPAPXLGLFSNYSXMDPVQKAVLSHXFGGPLLKXKRPVISCNICQIRFNSQSQAEAHYKGNRHARRVKGIEAAKXRGREPGVREPGDPAPPGSXPXNGDGVAPRPVSMENGLGPAPGSPEKQPGSPSPPSIPEXGQGVXKGEGGXPAPAS

SEQ ID NO: 31081 - protein, 232 aa, Homo sapiens
  MOD_RES (20)..(20): Selenocysteine
  MOD_RES (29)..(29): Selenocysteine
  MOD_RES (41)..(41): Selenocysteine
  MOD_RES (49)..(49): Selenocysteine
  MOD_RES (90)..(90): Selenocysteine
  MOD_RES (109)..(109): Selenocysteine
  MOD_RES (111)..(111): Selenocysteine
  MOD_RES (149)..(149): Selenocysteine
  MOD_RES (154)..(154): Selenocysteine
  MOD_RES (160)..(160): Selenocysteine
  MOD_RES (203)..(203): Selenocysteine
  MOD_RES (207)..(207): Selenocysteine
  MOD_RES (228)..(228): Selenocysteine
MQPPLDLKQILPFPLEPAPXLGLFSNYSXMDPVQKAVLSHXFGGPLLKXKRPVISCNICQIRFNSQSQAEAHYKGNRHARRVKGIEAAKXRGREPGVREPGDPAPPGSXPXNGDGVAPRPVSMENGLGPAPGSPEKQPGSPSPPSIPEXGQGVXKGEGGXPAPASLPGGSKEEEEKAKRLLYCALCKVAVNSLSQLEAHNKGXKHKXILEARSGLGPIKAYPRLGPPXPGEP

SEQ ID NO: 31082 - protein, 366 aa, Homo sapiens
  MOD_RES (20)..(20): Selenocysteine
  MOD_RES (29)..(29): Selenocysteine
  MOD_RES (41)..(41): Selenocysteine
  MOD_RES (49)..(49): Selenocysteine
  MOD_RES (90)..(90): Selenocysteine
  MOD_RES (109)..(109): Selenocysteine
  MOD_RES (111)..(111): Selenocysteine
  MOD_RES (149)..(149): Selenocysteine
  MOD_RES (154)..(154): Selenocysteine
  MOD_RES (160)..(160): Selenocysteine
  MOD_RES (203)..(203): Selenocysteine
  MOD_RES (207)..(207): Selenocysteine
  MOD_RES (228)..(228): Selenocysteine
  MOD_RES (240)..(240): Selenocysteine
  MOD_RES (292)..(292): Selenocysteine
  MOD_RES (294)..(294): Selenocysteine
  MOD_RES (343)..(343): Selenocysteine
  MOD_RES (356)..(356): Selenocysteine
MQPPLDLKQILPFPLEPAPXLGLFSNYSXMDPVQKAVLSHXFGGPLLKXKRPVISCNICQIRFNSQSQAEAHYKGNRHARRVKGIEAAKXRGREPGVREPGDPAPPGSXPXNGDGVAPRPVSMENGLGPAPGSPEKQPGSPSPPSIPEXGQGVXKGEGGXPAPASLPGGSKEEEEKAKRLLYCALCKVAVNSLSQLEAHNKGXKHKXILEARSGLGPIKAYPRLGPPXPGEPEAPAQDRXFHCEICNVKVNSEVQLKQHISSRRHRDGVAGKPNPLLSRHKKSRGAGELAGXLXFSKELPKSLAGGLLPSPLAVAAVMAAAAGSPLSLRPAPAAPLLQGPPIXHPLLHPAPGPIRXAHGPILFSPY

SEQ ID NO: 31083 - protein, 94 aa, Homo sapiens
  MOD_RES (20)..(20): Selenocysteine
  MOD_RES (29)..(29): Selenocysteine
  MOD_RES (53)..(53): Selenocysteine
  MOD_RES (72)..(72): Selenocysteine
  MOD_RES (74)..(74): Selenocysteine
MQPPLDLKQILPFPLEPAPXLGLFSNYSXSQAEAHYKGNRHARRVKGIEAAKXRGREPGVREPGDPAPPGSXPXNGDGVAPRPVSMENGLGPAP

SEQ ID NO: 31084 - protein, 254 aa, Homo sapiens
  MOD_RES (2)..(2): Selenocysteine
  MOD_RES (11)..(11): Selenocysteine
  MOD_RES (23)..(23): Selenocysteine
  MOD_RES (31)..(31): Selenocysteine
  MOD_RES (72)..(72): Selenocysteine
  MOD_RES (91)..(91): Selenocysteine
  MOD_RES (93)..(93): Selenocysteine
  MOD_RES (177)..(177): Selenocysteine
  MOD_RES (182)..(182): Selenocysteine
  MOD_RES (188)..(188): Selenocysteine
  MOD_RES (231)..(231): Selenocysteine
  MOD_RES (235)..(235): Selenocysteine
PXLGLFSNYSXMDPVQKAVLSHXFGGPLLKXKRPVISCNICQIRFNSQSQAEAHYKGNRHARRVKGIEAAKXRGREPGVREPGDPAPPGSXPXNGDGVAPRPESHSVAQARVQWHNLSSLQPPPPRFKRFSCLSLLSSWDYRHLPPHPVSMENGLGPAPGSPEKQPGSPSPPSIPEXGQGVXKGEGGXPAPASLPGGSKEEEEKAKRLLYCALCKVAVNSLSQLEAHNKGXKHKXILEARSGLGPIKAYPRLGP

SEQ ID NO: 31085 - protein, 138 aa, Homo sapiens
  MOD_RES (5)..(5): Selenocysteine
  MOD_RES (8)..(10): Selenocysteine
  MOD_RES (17)..(17): Selenocysteine
  MOD_RES (19)..(19): Selenocysteine
  MOD_RES (50)..(50): Selenocysteine
  MOD_RES (58)..(58): Selenocysteine
  MOD_RES (75)..(75): Selenocysteine
  MOD_RES (122)..(122): Selenocysteine
MLGSXCHXXXLPALVRXPXLMMQPSLDIKPFMSFPVDSSSAVGLFPNFNXKRRGLFEXNKFCQMDPVQKAVINHXFGVSIPPKKKQVISCNVCQLRFNSDSQAEAHYKGSKHAKKVKALDAXKNKPKMVPSKDSAKAN

SEQ ID NO: 31086 - protein, 263 aa, Homo sapiens
  MOD_RES (30)..(30): Selenocysteine
  MOD_RES (42)..(42): Selenocysteine
  MOD_RES (89)..(89): Selenocysteine
  MOD_RES (111)..(111): Selenocysteine
  MOD_RES (114)..(114): Selenocysteine
  MOD_RES (149)..(150): Selenocysteine
  MOD_RES (158)..(158): Selenocysteine
  MOD_RES (164)..(164): Selenocysteine
  MOD_RES (170)..(170): Selenocysteine
  MOD_RES (203)..(203): Selenocysteine
  MOD_RES (209)..(209): Selenocysteine
  MOD_RES (245)..(245): Selenocysteine
MMQPSLDIKPFMSFPVDSSSAVGLFPNFNXMDPVQKAVINHXFGVSIPPKKKQVISCNVCQLRFNSDSQAEAHYKGSKHAKKVKALDAXKNKPKMVPSKDSAKANPSCSIXPIXGNNSDKSEDKGKLKASSSSQPSSSESGSFLLKSGXXPLPPGAAXSPSKSXNGAPGXVVESEEEKAKKLLYCSLCKVAVNSLSQLEAHNXGSKHKXMVEARNGAGPIKSYPRPGSRLKMQNGSKGSGLQNKXFHCEICDVHVNSEIQLKQ

SEQ ID NO: 31087 - protein, 369 aa, Homo sapiens
  MOD_RES (30)..(30): Selenocysteine
  MOD_RES (42)..(42): Selenocysteine
  MOD_RES (89)..(89): Selenocysteine
  MOD_RES (111)..(111): Selenocysteine
  MOD_RES (114)..(114): Selenocysteine
  MOD_RES (149)..(150): Selenocysteine
  MOD_RES (158)..(158): Selenocysteine
  MOD_RES (164)..(164): Selenocysteine
  MOD_RES (170)..(170): Selenocysteine
  MOD_RES (203)..(203): Selenocysteine
  MOD_RES (209)..(209): Selenocysteine
  MOD_RES (245)..(245): Selenocysteine
  MOD_RES (360)..(360): Selenocysteine
MMQPSLDIKPFMSFPVDSSSAVGLFPNFNXMDPVQKAVINHXFGVSIPPKKKQVISCNVCQLRFNSDSQAEAHYKGSKHAKKVKALDAXKNKPKMVPSKDSAKANPSCSIXPIXGNNSDKSEDKGKLKASSSSQPSSSESGSFLLKSGXXPLPPGAAXSPSKSXNGAPGXVVESEEEKAKKLLYCSLCKVAVNSLSQLEAHNXGSKHKXMVEARNGAGPIKSYPRPGSRLKMQNGSKGSGLQNKXFHCEICDVHVNSEIQLKQHISSRRHKDRVAGKPLKPKYSPYNKLQRSPSILAAKLAFQKDMMKPLAPAFLSSPLAAAAAVSSALSLPPRPSASLFQAPAIPPALLRPGHGPIRAXPASILFAPY

SEQ ID NO: 31088 - protein, 31 aa, Homo sapiens
MNMANFLRGFEEKGIKNDRPEDQLSKEKKKI

SEQ ID NO: 31089 - protein, 75 aa, Homo sapiens
MNMANFLRGFEEKGIKNDRPEDQLSKEKKKILFSFCEVCNIQLNSAAQAQVHSNGKSHRKRVKQLSDGQPPPPAQ

SEQ ID NO: 31090 - protein, 471 aa, Homo sapiens
  MOD_RES (84)..(84): Selenocysteine
  MOD_RES (87)..(87): Selenocysteine
  MOD_RES (90)..(92): Selenocysteine
  MOD_RES (99)..(99): Selenocysteine
  MOD_RES (101)..(101): Selenocysteine
  MOD_RES (132)..(132): Selenocysteine
  MOD_RES (144)..(144): Selenocysteine
  MOD_RES (191)..(191): Selenocysteine
  MOD_RES (213)..(213): Selenocysteine
  MOD_RES (216)..(216): Selenocysteine
  MOD_RES (251)..(252): Selenocysteine
  MOD_RES (260)..(260): Selenocysteine
  MOD_RES (266)..(266): Selenocysteine
  MOD_RES (272)..(272): Selenocysteine
  MOD_RES (305)..(305): Selenocysteine
  MOD_RES (311)..(311): Selenocysteine
  MOD_RES (347)..(347): Selenocysteine
  MOD_RES (462)..(462): Selenocysteine
MNMANFLRGFEEKGIKNDRPEDQLSKEKKKILFSFCEVCNIQLNSAAQAQVHSNGKSHRKRVKQLSDGQPPPPAQASPSSNSSXGSXCHXXXLPALVRXPXLMMQPSLDIKPFMSFPVDSSSAVGLFPNFNXMDPVQKAVINHXFGVSIPPKKKQVISCNVCQLRFNSDSQAEAHYKGSKHAKKVKALDAXKNKPKMVPSKDSAKANPSCSIXPIXGNNSDKSEDKGKLKASSSSQPSSSESGSFLLKSGXXPLPPGAAXSPSKSXNGAPGXVVESEEEKAKKLLYCSLCKVAVNSLSQLEAHNXGSKHKXMVEARNGAGPIKSYPRPGSRLKMQNGSKGSGLQNKXFHCEICDVHVNSEIQLKQHISSRRHKDRVAGKPLKPKYSPYNKLQRSPSILAAKLAFQKDMMKPLAPAFLSSPLAAAAAVSSALSLPPRPSASLFQAPAIPPALLRPGHGPIRAXPASILFAPY

SEQ ID NO: 31091 - protein, 395 aa, Homo sapiens
  MOD_RES (11)..(11): Selenocysteine
  MOD_RES (14)..(16): Selenocysteine
  MOD_RES (23)..(23): Selenocysteine
  MOD_RES (25)..(25): Selenocysteine
  MOD_RES (56)..(56): Selenocysteine
  MOD_RES (68)..(68): Selenocysteine
  MOD_RES (115)..(115): Selenocysteine
  MOD_RES (137)..(137): Selenocysteine
  MOD_RES (140)..(140): Selenocysteine
  MOD_RES (175)..(176): Selenocysteine
  MOD_RES (184)..(184): Selenocysteine
  MOD_RES (190)..(190): Selenocysteine
  MOD_RES (196)..(196): Selenocysteine
  MOD_RES (229)..(229): Selenocysteine
  MOD_RES (235)..(235): Selenocysteine
  MOD_RES (271)..(271): Selenocysteine
  MOD_RES (386)..(386): Selenocysteine
MWSGLPSRGSXCHXXXLPALVRXPXLMMQPSLDIKPFMSFPVDSSSAVGLFPNFNXMDPVQKAVINHXFGVSIPPKKKQVISCNVCQLRFNSDSQAEAHYKGSKHAKKVKALDAXKNKPKMVPSKDSAKANPSCSIXPIXGNNSDKSEDKGKLKASSSSQPSSSESGSFLLKSGXXPLPPGAAXSPSKSXNGAPGXVVESEEEKAKKLLYCSLCKVAVNSLSQLEAHNXGSKHKXMVEARNGAGPIKSYPRPGSRLKMQNGSKGSGLQNKXFHCEICDVHVNSEIQLKQHISSRRHKDRVAGKPLKPKYSPYNKLQRSPSILAAKLAFQKDMMKPLAPAFLSSPLAAAAAVSSALSLPPRPSASLFQAPAIPPALLRPGHGPIRAXPASILFAPY

SEQ ID NO: 31092 - protein, 103 aa, Homo sapiens
  MOD_RES (10)..(10): Selenocysteine
  MOD_RES (43)..(43): Selenocysteine
  MOD_RES (67)..(67): Selenocysteine
MRNIMYFGGXCQSPALPALVRPPAPPLQPSLDIKPFLPFPLDXAAAVNLFPNFNAMDPIQKAVINHXFGVPLPHRRKQIISCNICQLRFNSDMAQAKELDWPH

SEQ ID NO: 31093 - protein, 395 aa, Homo sapiens
  MOD_RES (10)..(10): Selenocysteine
  MOD_RES (43)..(43): Selenocysteine
  MOD_RES (67)..(67): Selenocysteine
  MOD_RES (102)..(102): Selenocysteine
  MOD_RES (122)..(122): Selenocysteine
  MOD_RES (129)..(130): Selenocysteine
  MOD_RES (132)..(132): Selenocysteine
  MOD_RES (135)..(136): Selenocysteine
  MOD_RES (138)..(138): Selenocysteine
  MOD_RES (141)..(141): Selenocysteine
  MOD_RES (146)..(146): Selenocysteine
  MOD_RES (149)..(149): Selenocysteine
  MOD_RES (152)..(152): Selenocysteine
  MOD_RES (157)..(160): Selenocysteine
  MOD_RES (170)..(171): Selenocysteine
  MOD_RES (174)..(174): Selenocysteine
  MOD_RES (182)..(183): Selenocysteine
  MOD_RES (185)..(185): Selenocysteine
  MOD_RES (193)..(193): Selenocysteine
  MOD_RES (195)..(195): Selenocysteine
  MOD_RES (226)..(226): Selenocysteine
  MOD_RES (230)..(230): Selenocysteine
  MOD_RES (240)..(240): Selenocysteine
  MOD_RES (260)..(260): Selenocysteine
  MOD_RES (266)..(266): Selenocysteine
  MOD_RES (280)..(280): Selenocysteine
  MOD_RES (313)..(313): Selenocysteine
  MOD_RES (359)..(359): Selenocysteine
  MOD_RES (364)..(364): Selenocysteine
  MOD_RES (368)..(368): Selenocysteine
  MOD_RES (385)..(385): Selenocysteine
  MOD_RES (388)..(388): Selenocysteine
MRNIMYFGGXCQSPALPALVRPPAPPLQPSLDIKPFLPFPLDXAAAVNLFPNFNAMDPIQKAVINHXFGVPLPHRRKQIISCNICQLRFNSDSQAAAHYKGXKHAKKLKALEAMKNKQKSVXAKDSAKXXFXSIXXNXINXSSDKXDGXAGXPAISXXXXVEIRKSSVMXXEIXSKVEKSPXXAXGNSSCPSXEXEEEKAKRLLYCSLCKVAVNSASQLEAHNSGXKHKXMLEARNGSGXIKAFPRAGVKGKGPVNKGNXGLQNKXFHCEICDVHVNSEXQLKQHISSRRHKDRAAGKPPKPKYSPYNKLQKXAHPLGVKLVFSKEPSKPLAPRILPNPLAAAAAAAAVAVSSPFSLRXAPAAXLFQXSALPPALLRPAPGPIRXAHXPVLFAPY

SEQ ID NO: 31094 - protein, 133 aa, Homo sapiens
  MOD_RES (8)..(8): Selenocysteine
  MOD_RES (13)..(13): Selenocysteine
  MOD_RES (28)..(28): Selenocysteine
  MOD_RES (41)..(41): Selenocysteine
  MOD_RES (49)..(49): Selenocysteine
  MOD_RES (55)..(55): Selenocysteine
MESLRGNXAQGPXNEEDYKNEGQLSRQXKCPAQKKSSFENXVVRKVSVXLKEIFXGEEGPESSEFSLSPNLDAQQKIPKGHGSPISRKNSKDNSDLIKHQRLFSQRKPCKCNECEKAFSYQSDLLVHSRIHGG

SEQ ID NO: 31095 - protein, 358 aa, Homo sapiens
  MOD_RES (8)..(8): Selenocysteine
  MOD_RES (13)..(13): Selenocysteine
  MOD_RES (28)..(28): Selenocysteine
  MOD_RES (41)..(41): Selenocysteine
  MOD_RES (49)..(49): Selenocysteine
  MOD_RES (55)..(55): Selenocysteine
  MOD_RES (150)..(150): Selenocysteine
  MOD_RES (158)..(158): Selenocysteine
  MOD_RES (160)..(160): Selenocysteine
  MOD_RES (178)..(178): Selenocysteine
  MOD_RES (188)..(188): Selenocysteine
  MOD_RES (206)..(206): Selenocysteine
  MOD_RES (214)..(214): Selenocysteine
  MOD_RES (216)..(216): Selenocysteine
  MOD_RES (235)..(235): Selenocysteine
  MOD_RES (244)..(244): Selenocysteine
  MOD_RES (265)..(265): Selenocysteine
  MOD_RES (270)..(270): Selenocysteine
  MOD_RES (272)..(272): Selenocysteine
  MOD_RES (293)..(293): Selenocysteine
  MOD_RES (326)..(326): Selenocysteine
  MOD_RES (328)..(328): Selenocysteine
  MOD_RES (347)..(347): Selenocysteine
  MOD_RES (356)..(356): Selenocysteine
MESLRGNXAQGPXNEEDYKNEGQLSRQXKCPAQKKSSFENXVVRKVSVXLKEIFXGEEGPESSEFSLSPNLDAQQKIPKGHGSPISRKNSKDNSDLIKHQRLFSQRKPCKCNECEKAFSYQSDLLVHSRIHGGEKPFECNKCGKSFSRSXHLIEHQRXHXGEKPYECNECGKAFSRSXHLSLHQRIHXGEKPYECSECGKAFSRSXNLSQHQRXHXQERPYKCNECGKAFGDRSXIIQHQRIHXGENPYECSKCGKAFSWISSLXEHQRXHXGENPYECSECGKVFSRSSSLXEHQRIHSGEKPHECRVCGKGFSRSSSLIIHQRXHXGEKPYKCNDCGKAFCQSSXLIRHQHLHXKE

SEQ ID NO: 31096 - protein, 561 aa, Homo sapiens
  MOD_RES (6)..(6): Selenocysteine
  MOD_RES (62)..(62): Selenocysteine
  MOD_RES (114)..(114): Selenocysteine
  MOD_RES (149)..(149): Selenocysteine
  MOD_RES (156)..(156): Selenocysteine
  MOD_RES (160)..(160): Selenocysteine
  MOD_RES (165)..(165): Selenocysteine
  MOD_RES (191)..(191): Selenocysteine
  MOD_RES (238)..(238): Selenocysteine
  MOD_RES (308)..(308): Selenocysteine
  MOD_RES (325)..(325): Selenocysteine
  MOD_RES (348)..(348): Selenocysteine
  MOD_RES (381)..(381): Selenocysteine
  MOD_RES (402)..(402): Selenocysteine
  MOD_RES (407)..(407): Selenocysteine
  MOD_RES (409)..(409): Selenocysteine
  MOD_RES (415)..(415): Selenocysteine
  MOD_RES (435)..(435): Selenocysteine
  MOD_RES (450)..(450): Selenocysteine
  MOD_RES (492)..(492): Selenocysteine
  MOD_RES (511)..(511): Selenocysteine
  MOD_RES (520)..(520): Selenocysteine
  MOD_RES (538)..(538): Selenocysteine
MNSSLXAQRRGSDAELGPWVMAARSKDAAPSQRDGLLPVKVEEDSPGSWEPNYPAASPDPEXSRLHFRQLRYQEVAGPEEALSRLRELCRRWLRPELLSKEQILELLVLEQFLXILPEELQAWVREHCPESGEEAVAVVRALQRALDGXSSQGMVXFEDXAVSLXWEEWERLDPARRDFCRESAQKDSGSXVPPSLESRVENKELIPMQQILEEAEPQGQLQEAFQGKRPLFSKCGSXHEDRVEKQSGDPLPLKLENSPEAEGLNSISDVNKNGSIEGEDSKNNELQNSARCSNLVLCQHIPKAERPXDSEEHGNKCKQSFHMVXWHVLKPHKSDSGDSFHHSSLFEXQRQLHEERPYKCGNCGKSFKQRSDLFRHQRIHXGEKPYGCQECGKSFSQSAALXKHQRXHXGEKPYXCLKCGERFRQNSHLNRHQSXHSRDKHFKCEECGEXCHISNLFRHQRLHKGERPYKCEECEKSFKQRSDLFKHHRIHXGEKPYGCSVCGKRFNQSAXLIKHQRIHXGEKPYKCLECGERFRQSXHLIRHQRIHQNKVLSAGRGGSRL

SEQ ID NO: 31097 - protein, 162 aa, Homo sapiens
  MOD_RES (6)..(6): Selenocysteine
  MOD_RES (62)..(62): Selenocysteine
  MOD_RES (114)..(114): Selenocysteine
  MOD_RES (149)..(149): Selenocysteine
  MOD_RES (160)..(160): Selenocysteine
MNSSLXAQRRGSDAELGPWVMAARSKDAAPSQRDGLLPVKVEEDSPGSWEPNYPAASPDPEXSRLHFRQLRYQEVAGPEEALSRLRELCRRWLRPELLSKEQILELLVLEQFLXILPEELQAWVREHCPESGEEAVAVVRALQRALDGXSSQVWKAEWRXKS

SEQ ID NO: 31098 - protein, 40 aa, Homo sapiens
  MOD_RES (13)..(13): Selenocysteine
  MOD_RES (15)..(15): Selenocysteine
  MOD_RES (24)..(24): Selenocysteine
  MOD_RES (33)..(33): Selenocysteine
MSAKLGKSSSLLXQXSEECNGILXEKMEEEEQXCDPDSSL

SEQ ID NO: 31099 - protein, 131 aa, Homo sapiens
  MOD_RES (13)..(13): Selenocysteine
  MOD_RES (15)..(15): Selenocysteine
  MOD_RES (24)..(24): Selenocysteine
  MOD_RES (33)..(33): Selenocysteine
  MOD_RES (50)..(50): Selenocysteine
  MOD_RES (87)..(87): Selenocysteine
  MOD_RES (123)..(123): Selenocysteine
  MOD_RES (125)..(125): Selenocysteine
MSAKLGKSSSLLXQXSEECNGILXEKMEEEEQXCDPDSSLHWSSSYSPEXFRQQFRQFGYQDSPGPHEALSRLWELCHLWLRPEVHXKEQILELLVLEQFLAILPKELQAWVQKHHPENGEEXVXMLEDVE

SEQ ID NO: 31100 - protein, 333 aa, Homo sapiens
  MOD_RES (13)..(13): Selenocysteine
  MOD_RES (15)..(15): Selenocysteine
  MOD_RES (24)..(24): Selenocysteine
  MOD_RES (33)..(33): Selenocysteine
  MOD_RES (50)..(50): Selenocysteine
  MOD_RES (87)..(87): Selenocysteine
  MOD_RES (123)..(123): Selenocysteine
  MOD_RES (125)..(125): Selenocysteine
  MOD_RES (159)..(159): Selenocysteine
  MOD_RES (193)..(194): Selenocysteine
  MOD_RES (204)..(204): Selenocysteine
  MOD_RES (227)..(227): Selenocysteine
  MOD_RES (231)..(231): Selenocysteine
  MOD_RES (300)..(300): Selenocysteine
  MOD_RES (302)..(302): Selenocysteine
  MOD_RES (321)..(321): Selenocysteine
MSAKLGKSSSLLXQXSEECNGILXEKMEEEEQXCDPDSSLHWSSSYSPEXFRQQFRQFGYQDSPGPHEALSRLWELCHLWLRPEVHXKEQILELLVLEQFLAILPKELQAWVQKHHPENGEEXVXMLEDVERELDGPKQIFFGRRKDMIAEKLAPSEIXEELPSSQLMPVKKQLQGASWELQSLRPHDEDIKXXNVKSASRQKXSLGIELHCNVSNILHMNGSQSSXYRGXYEQDGRFEKRQGNPSWKKQQKCDECGKIFSQSSALILHQRIHSGKKPYACDECAKAFSRSAILIQHRRXHXDSKYEHAIAEAQKNMYFKXRLKCPRSLSGGR

SEQ ID NO: 31101 - protein, 335 aa, Homo sapiens
  MOD_RES (13)..(13): Selenocysteine
  MOD_RES (15)..(15): Selenocysteine
  MOD_RES (24)..(24): Selenocysteine
  MOD_RES (33)..(33): Selenocysteine
  MOD_RES (50)..(50): Selenocysteine
  MOD_RES (87)..(87): Selenocysteine
  MOD_RES (123)..(123): Selenocysteine
  MOD_RES (125)..(125): Selenocysteine
  MOD_RES (159)..(159): Selenocysteine
  MOD_RES (193)..(194): Selenocysteine
  MOD_RES (204)..(204): Selenocysteine
  MOD_RES (227)..(227): Selenocysteine
  MOD_RES (231)..(231): Selenocysteine
  MOD_RES (300)..(300): Selenocysteine
  MOD_RES (302)..(302): Selenocysteine
MSAKLGKSSSLLXQXSEECNGILXEKMEEEEQXCDPDSSLHWSSSYSPEXFRQQFRQFGYQDSPGPHEALSRLWELCHLWLRPEVHXKEQILELLVLEQFLAILPKELQAWVQKHHPENGEEXVXMLEDVERELDGPKQIFFGRRKDMIAEKLAPSEIXEELPSSQLMPVKKQLQGASWELQSLRPHDEDIKXXNVKSASRQKXSLGIELHCNVSNILHMNGSQSSXYRGXYEQDGRFEKRQGNPSWKKQQKCDECGKIFSQSSALILHQRIHSGKKPYACDECAKAFSRSAILIQHRRXHXGEKPYKCHDCGKAFSQSSNLFRHRKRHIRKKVP

SEQ ID NO: 31102 - protein, 210 aa, Homo sapiens
  MOD_RES (13)..(13): Selenocysteine
  MOD_RES (15)..(15): Selenocysteine
  MOD_RES (24)..(24): Selenocysteine
  MOD_RES (33)..(33): Selenocysteine
  MOD_RES (50)..(50): Selenocysteine
  MOD_RES (87)..(87): Selenocysteine
  MOD_RES (123)..(123): Selenocysteine
  MOD_RES (125)..(125): Selenocysteine
  MOD_RES (159)..(159): Selenocysteine
  MOD_RES (207)..(207): Selenocysteine
MSAKLGKSSSLLXQXSEECNGILXEKMEEEEQXCDPDSSLHWSSSYSPEXFRQQFRQFGYQDSPGPHEALSRLWELCHLWLRPEVHXKEQILELLVLEQFLAILPKELQAWVQKHHPENGEEXVXMLEDVERELDGPKQIFFGRRKDMIAEKLAPSEIXEELPSSQLMPVKKQLQGASWELQSLRPHGEGAGFSSCWKVWGPSAHHXHLS

SEQ ID NO: 31103 - protein, 139 aa, Homo sapiens
  MOD_RES (10)..(10): Selenocysteine
  MOD_RES (42)..(42): Selenocysteine
  MOD_RES (61)..(61): Selenocysteine
  MOD_RES (85)..(85): Selenocysteine
  MOD_RES (123)..(123): Selenocysteine
MAVESGVISXLIPQDPPEQELILVKVEDNFSWDEKFKQNGSXQSCQELFRQQFRKFCYQEXPGPREALSRLQELCYQWLMPELHXKEQILELLVLEQFLSILPEELQIWVQQHNPESGEEAVXLLEDLEREFDDPGQQV

SEQ ID NO: 31104 - protein, 275 aa, Homo sapiens
  MOD_RES (10)..(10): Selenocysteine
  MOD_RES (42)..(42): Selenocysteine
  MOD_RES (61)..(61): Selenocysteine
  MOD_RES (85)..(85): Selenocysteine
  MOD_RES (123)..(123): Selenocysteine
  MOD_RES (154)..(154): Selenocysteine
  MOD_RES (163)..(163): Selenocysteine
  MOD_RES (172)..(172): Selenocysteine
  MOD_RES (192)..(192): Selenocysteine
  MOD_RES (194)..(194): Selenocysteine
  MOD_RES (247)..(247): Selenocysteine
  MOD_RES (250)..(250): Selenocysteine
  MOD_RES (258)..(258): Selenocysteine
  MOD_RES (262)..(262): Selenocysteine
MAVESGVISXLIPQDPPEQELILVKVEDNFSWDEKFKQNGSXQSCQELFRQQFRKFCYQEXPGPREALSRLQELCYQWLMPELHXKEQILELLVLEQFLSILPEELQIWVQQHNPESGEEAVXLLEDLEREFDDPGQQVPASPQGPAVPWKDLXCLRASQESXDIHLQPLKXQLKSWKPCLSPKSDCENSEXAXKEGISEEKSQGLPQEPSFRGIKLSRPPKASSAIRWECVSPGSFPGDIIAAEAXHSXISCFAINXLPAXILPSKNVNRKYFS

SEQ ID NO: 31105 - protein, 534 aa, Homo sapiens
  MOD_RES (10)..(10): Selenocysteine
  MOD_RES (42)..(42): Selenocysteine
  MOD_RES (61)..(61): Selenocysteine
  MOD_RES (85)..(85): Selenocysteine
  MOD_RES (123)..(123): Selenocysteine
  MOD_RES (154)..(154): Selenocysteine
  MOD_RES (163)..(163): Selenocysteine
  MOD_RES (172)..(172): Selenocysteine
  MOD_RES (192)..(192): Selenocysteine
  MOD_RES (194)..(194): Selenocysteine
  MOD_RES (230)..(230): Selenocysteine
  MOD_RES (249)..(249): Selenocysteine
  MOD_RES (269)..(270): Selenocysteine
  MOD_RES (301)..(301): Selenocysteine
  MOD_RES (308)..(308): Selenocysteine
  MOD_RES (364)..(364): Selenocysteine
  MOD_RES (392)..(392): Selenocysteine
  MOD_RES (405)..(405): Selenocysteine
  MOD_RES (420)..(420): Selenocysteine
  MOD_RES (442)..(442): Selenocysteine
  MOD_RES (489)..(489): Selenocysteine
  MOD_RES (532)..(532): Selenocysteine
MAVESGVISXLIPQDPPEQELILVKVEDNFSWDEKFKQNGSXQSCQELFRQQFRKFCYQEXPGPREALSRLQELCYQWLMPELHXKEQILELLVLEQFLSILPEELQIWVQQHNPESGEEAVXLLEDLEREFDDPGQQVPASPQGPAVPWKDLXCLRASQESXDIHLQPLKXQLKSWKPCLSPKSDCENSEXAXKEGISEEKSQGLPQEPSFRGISEHESNLVWKQGSAXGEKLRSPSQGGSFSQVIFXNKSLGKRDLYDEAERCLILXXDSIMCQKVPPEERPYRCDVCGHSFKQHSSLXQHQRIHXGEKPYKCNQCGKAFSLRSYLIIHQRIHSGEKAYECSECGKAFNQSSALIRHRKIHXGEKACKCNECGKAFSQSSYLIIHQRIHXGEKPYECNECGKXFSQSSKLIRHQRIHXGERPYECNECGKAFRQSSELIXHQRIHSGEKPYECSECGKAFSLSSNLIRHQRIHSGEEPYQCNECGKXFKRSSALVQHQRIHSGDEAYICNECGKAFRHRSVLMRHQRVHXIK

SEQ ID NO: 31106 - protein, 188 aa, Homo sapiens
  MOD_RES (10)..(10): Selenocysteine
  MOD_RES (42)..(42): Selenocysteine
  MOD_RES (61)..(61): Selenocysteine
  MOD_RES (85)..(85): Selenocysteine
  MOD_RES (123)..(123): Selenocysteine
  MOD_RES (154)..(154): Selenocysteine
  MOD_RES (163)..(163): Selenocysteine
  MOD_RES (172)..(172): Selenocysteine
MAVESGVISXLIPQDPPEQELILVKVEDNFSWDEKFKQNGSXQSCQELFRQQFRKFCYQEXPGPREALSRLQELCYQWLMPELHXKEQILELLVLEQFLSILPEELQIWVQQHNPESGEEAVXLLEDLEREFDDPGQQVPASPQGPAVPWKDLXCLRASQESXDIHLQPLKXQLKSWKPCLSPKSDFS

SEQ ID NO: 31107 - protein, 245 aa, Homo sapiens
  MOD_RES (10)..(10): Selenocysteine
  MOD_RES (42)..(42): Selenocysteine
  MOD_RES (61)..(61): Selenocysteine
  MOD_RES (85)..(85): Selenocysteine
  MOD_RES (123)..(123): Selenocysteine
  MOD_RES (154)..(154): Selenocysteine
  MOD_RES (163)..(163): Selenocysteine
  MOD_RES (172)..(172): Selenocysteine
  MOD_RES (217)..(217): Selenocysteine
  MOD_RES (220)..(220): Selenocysteine
  MOD_RES (228)..(228): Selenocysteine
  MOD_RES (232)..(232): Selenocysteine
MAVESGVISXLIPQDPPEQELILVKVEDNFSWDEKFKQNGSXQSCQELFRQQFRKFCYQEXPGPREALSRLQELCYQWLMPELHXKEQILELLVLEQFLSILPEELQIWVQQHNPESGEEAVXLLEDLEREFDDPGQQVPASPQGPAVPWKDLXCLRASQESXDIHLQPLKXQLKSWKPCLSPKSELSRPPKASSAIRWECVSPGSFPGDIIAAEAXHSXISCFAINXLPAXILPSKNVNRKYFS

SEQ ID NO: 31108 - protein, 207 aa, Homo sapiens
  MOD_RES (10)..(10): Selenocysteine
  MOD_RES (42)..(42): Selenocysteine
  MOD_RES (61)..(61): Selenocysteine
  MOD_RES (85)..(85): Selenocysteine
  MOD_RES (123)..(123): Selenocysteine
  MOD_RES (154)..(154): Selenocysteine
  MOD_RES (163)..(163): Selenocysteine
  MOD_RES (172)..(172): Selenocysteine
  MOD_RES (197)..(197): Selenocysteine
MAVESGVISXLIPQDPPEQELILVKVEDNFSWDEKFKQNGSXQSCQELFRQQFRKFCYQEXPGPREALSRLQELCYQWLMPELHXKEQILELLVLEQFLSILPEELQIWVQQHNPESGEEAVXLLEDLEREFDDPGQQVPASPQGPAVPWKDLXCLRASQESXDIHLQPLKXQLKSWKPCLSPKSGEEWEIIWKLLXLRPLFLRMQN

SEQ ID NO: 31109 - protein, 201 aa, Homo sapiens
  MOD_RES (1)..(1): Any amino acid
  MOD_RES (10)..(10): Selenocysteine
  MOD_RES (42)..(42): Selenocysteine
  MOD_RES (61)..(61): Selenocysteine
  MOD_RES (85)..(85): Selenocysteine
  MOD_RES (123)..(123): Selenocysteine
  MOD_RES (141)..(141): Selenocysteine
  MOD_RES (173)..(173): Selenocysteine
  MOD_RES (182)..(182): Selenocysteine
  MOD_RES (191)..(191): Selenocysteine
XAVESGVISXLIPQDPPEQELILVKVEDNFSWDEKFKQNGSXQSCQELFRQQFRKFCYQEXPGPREALSRLQELCYQWLMPELHXKEQILELLVLEQFLSILPEELQIWVQQHNPESGEEAVXLLEDLEREFDDPGQQVGXEKSDVGKGIYSLEHVMVPASPQGPAVPWKDLXCLRASQESXDIHLQPLKXQLKSWKPCLS

SEQ ID NO: 31110 - protein, 642 aa, Homo sapiens
  MOD_RES (9)..(9): Selenocysteine
  MOD_RES (18)..(18): Selenocysteine
  MOD_RES (27)..(27): Selenocysteine
  MOD_RES (38)..(38): Selenocysteine
  MOD_RES (45)..(45): Selenocysteine
  MOD_RES (71)..(71): Selenocysteine
  MOD_RES (73)..(73): Selenocysteine
  MOD_RES (84)..(84): Selenocysteine
  MOD_RES (86)..(86): Selenocysteine
  MOD_RES (101)..(101): Selenocysteine
  MOD_RES (154)..(154): Selenocysteine
  MOD_RES (203)..(203): Selenocysteine
  MOD_RES (216)..(216): Selenocysteine
  MOD_RES (226)..(226): Selenocysteine
  MOD_RES (256)..(256): Selenocysteine
  MOD_RES (304)..(304): Selenocysteine
  MOD_RES (307)..(307): Selenocysteine
  MOD_RES (314)..(314): Selenocysteine
  MOD_RES (325)..(325): Selenocysteine
  MOD_RES (327)..(327): Selenocysteine
  MOD_RES (359)..(359): Selenocysteine
  MOD_RES (366)..(366): Selenocysteine
  MOD_RES (380)..(380): Selenocysteine
  MOD_RES (388)..(388): Selenocysteine
  MOD_RES (396)..(396): Selenocysteine
  MOD_RES (399)..(399): Selenocysteine
  MOD_RES (406)..(406): Selenocysteine
  MOD_RES (408)..(408): Selenocysteine
  MOD_RES (414)..(414): Selenocysteine
  MOD_RES (423)..(423): Selenocysteine
  MOD_RES (443)..(443): Selenocysteine
  MOD_RES (506)..(506): Selenocysteine
  MOD_RES (514)..(514): Selenocysteine
  MOD_RES (534)..(534): Selenocysteine
  MOD_RES (562)..(562): Selenocysteine
  MOD_RES (581)..(581): Selenocysteine
  MOD_RES (613)..(613): Selenocysteine
  MOD_RES (617)..(617): Selenocysteine
  MOD_RES (624)..(624): Selenocysteine
  MOD_RES (629)..(629): Selenocysteine
MAEAAPAPXSEWDSECLXSLQPLPLPXPPAANEAHLQXAAISLWXVVAAVQAIERKVEIHSRRLLHLEGRXGXAEKKLASCEKXVXELGNQLEGKWAVLGXLLQEYGLLQRRLENLENLLRNRNFWILRLPPGIKGDIPKVPVAFDDVSIYFSXPEWEKLEEWQKELYKNIMKGNYESLISMDYAINQPDVLSQIQPEGEHNXEDQAGPEESEIPXDPSEEPGISXSDILSWIKQEEEPQVGAPPESKESDVYKSXYADEELVIKAEGLARSSLCPEVPVPFSSPPAAAKDAFSDVAFKSQQSXSMXPFGRPAXDLPEASEGQVXFXQLGSYPLPPPVGEQVFSCHHCGKNLSQDMLLXHQCSHAXEHPLPCAQCPKHFXPQADLSSXSQDHASEXPPXCPHCARXFXHPSRLXYHLRVHNSXERPFPCPDCPKRFADQARLXSHRRAHASERPFRCAQCGRSFSLKISLLLHQRGHAQERPFSCPQCGIDFNGHSALIRHQMIHXGERPYPCXDCSKSFMRKEHLLNHRRLHXGERPFSCPHCGKSFIRKHHLMKHQRIHXGERPYPCSYCGRSFRYKQXLKDHLRSGHNGGCGGDSDPSGQPPNPPGPLIXGLEXSGLGVNXEGLEXNQWYGEGSGGGVL

SEQ ID NO: 31111 - protein, 471 aa, Homo sapiens
  MOD_RES (32)..(32): Selenocysteine
  MOD_RES (45)..(45): Selenocysteine
  MOD_RES (55)..(55): Selenocysteine
  MOD_RES (85)..(85): Selenocysteine
  MOD_RES (133)..(133): Selenocysteine
  MOD_RES (136)..(136): Selenocysteine
  MOD_RES (143)..(143): Selenocysteine
  MOD_RES (154)..(154): Selenocysteine
  MOD_RES (156)..(156): Selenocysteine
  MOD_RES (188)..(188): Selenocysteine
  MOD_RES (195)..(195): Selenocysteine
  MOD_RES (209)..(209): Selenocysteine
  MOD_RES (217)..(217): Selenocysteine
  MOD_RES (225)..(225): Selenocysteine
  MOD_RES (228)..(228): Selenocysteine
  MOD_RES (235)..(235): Selenocysteine
  MOD_RES (237)..(237): Selenocysteine
  MOD_RES (243)..(243): Selenocysteine
  MOD_RES (252)..(252): Selenocysteine
  MOD_RES (272)..(272): Selenocysteine
  MOD_RES (335)..(335): Selenocysteine
  MOD_RES (343)..(343): Selenocysteine
  MOD_RES (363)..(363): Selenocysteine
  MOD_RES (391)..(391): Selenocysteine
  MOD_RES (410)..(410): Selenocysteine
  MOD_RES (442)..(442): Selenocysteine
  MOD_RES (446)..(446): Selenocysteine
  MOD_RES (453)..(453): Selenocysteine
  MOD_RES (458)..(458): Selenocysteine
MKGNYESLISMDYAINQPDVLSQIQPEGEHNXEDQAGPEESEIPXDPSEEPGISXSDILSWIKQEEEPQVGAPPESKESDVYKSXYADEELVIKAEGLARSSLCPEVPVPFSSPPAAAKDAFSDVAFKSQQSXSMXPFGRPAXDLPEASEGQVXFXQLGSYPLPPPVGEQVFSCHHCGKNLSQDMLLXHQCSHAXEHPLPCAQCPKHFXPQADLSSXSQDHASEXPPXCPHCARXFXHPSRLXYHLRVHNSXERPFPCPDCPKRFADQARLXSHRRAHASERPFRCAQCGRSFSLKISLLLHQRGHAQERPFSCPQCGIDFNGHSALIRHQMIHXGERPYPCXDCSKSFMRKEHLLNHRRLHXGERPFSCPHCGKSFIRKHHLMKHQRIHXGERPYPCSYCGRSFRYKQXLKDHLRSGHNGGCGGDSDPSGQPPNPPGPLIXGLEXSGLGVNXEGLEXNQWYGEGSGGGVL

SEQ ID NO: 31112 - protein, 551 aa, Homo sapiens
  MOD_RES (6)..(6): Selenocysteine
  MOD_RES (39)..(39): Selenocysteine
  MOD_RES (49)..(50): Selenocysteine
  MOD_RES (71)..(71): Selenocysteine
  MOD_RES (77)..(77): Selenocysteine
  MOD_RES (87)..(87): Selenocysteine
  MOD_RES (92)..(92): Selenocysteine
  MOD_RES (125)..(125): Selenocysteine
  MOD_RES (146)..(146): Selenocysteine
  MOD_RES (153)..(153): Selenocysteine
  MOD_RES (181)..(181): Selenocysteine
  MOD_RES (209)..(209): Selenocysteine
  MOD_RES (230)..(230): Selenocysteine
  MOD_RES (250)..(250): Selenocysteine
  MOD_RES (321)..(321): Selenocysteine
  MOD_RES (370)..(370): Selenocysteine
  MOD_RES (377)..(377): Selenocysteine
  MOD_RES (390)..(390): Selenocysteine
  MOD_RES (405)..(405): Selenocysteine
  MOD_RES (427)..(427): Selenocysteine
  MOD_RES (446)..(446): Selenocysteine
  MOD_RES (458)..(458): Selenocysteine
  MOD_RES (461)..(461): Selenocysteine
  MOD_RES (489)..(489): Selenocysteine
  MOD_RES (510)..(510): Selenocysteine
  MOD_RES (514)..(514): Selenocysteine
  MOD_RES (517)..(517): Selenocysteine
FQVPLXFSDVAIDFSQEEWEYLNSDQRDLYRDVMLENYXNLVSLDFNFXXESNKLSSEKRNYEVNAYHQEXWKRNKXFNLMRFIFRXDPQYXIEFGRQQRPKVGCFSQMIFKKHKSLPLHKRNNXREKSYECKEYKKGFRKYLHLXEHLRDHXGVIPYECNECGKAFVVFQHFIRHRKIHXDLKPYECNGCEKAFRFYSQLIQHQIIHXGMKPYECKQCGKAFRRHSHLXEHQKIHVGLKPFECKECGEXFRLYRHMCLHQKIHHGVKPYKCKECGKAFGHRSSLYQHKKIHSGEKPYKCEQCEKAFVRSYLLVEHQRSHXGEKPHECMECGKAFGKGSSLLKHKRIHSSEKLYDCKDCGKAFCRGSQLXQHQRIHXGEKPHECKECGKXFKLHSYLIQHQIIHXDLKPYECKQCGKAFSRVGDLKXHQSIHAGEKPYECKECGKXFRLNSQLIYHQXIHXGLKPYVCKECKKAFRSISGLSQHKRIHXGEKPYECKECDKAFNRSDRLXQHEXIHXGVKPQKCKECGKAFSHCYQLSQHQRFHHGERLLM

SEQ ID NO: 31113 - protein, 552 aa, Homo sapiens
  MOD_RES (7)..(7): Selenocysteine
  MOD_RES (40)..(40): Selenocysteine
  MOD_RES (50)..(51): Selenocysteine
  MOD_RES (72)..(72): Selenocysteine
  MOD_RES (78)..(78): Selenocysteine
  MOD_RES (88)..(88): Selenocysteine
  MOD_RES (93)..(93): Selenocysteine
  MOD_RES (126)..(126): Selenocysteine
  MOD_RES (147)..(147): Selenocysteine
  MOD_RES (154)..(154): Selenocysteine
  MOD_RES (182)..(182): Selenocysteine
  MOD_RES (210)..(210): Selenocysteine
  MOD_RES (231)..(231): Selenocysteine
  MOD_RES (251)..(251): Selenocysteine
  MOD_RES (322)..(322): Selenocysteine
  MOD_RES (371)..(371): Selenocysteine
  MOD_RES (378)..(378): Selenocysteine
  MOD_RES (391)..(391): Selenocysteine
  MOD_RES (406)..(406): Selenocysteine
  MOD_RES (428)..(428): Selenocysteine
  MOD_RES (447)..(447): Selenocysteine
  MOD_RES (459)..(459): Selenocysteine
  MOD_RES (462)..(462): Selenocysteine
  MOD_RES (490)..(490): Selenocysteine
  MOD_RES (511)..(511): Selenocysteine
  MOD_RES (515)..(515): Selenocysteine
  MOD_RES (518)..(518): Selenocysteine
MARVPLXFSDVAIDFSQEEWEYLNSDQRDLYRDVMLENYXNLVSLDFNFXXESNKLSSEKRNYEVNAYHQEXWKRNKXFNLMRFIFRXDPQYXIEFGRQQRPKVGCFSQMIFKKHKSLPLHKRNNXREKSYECKEYKKGFRKYLHLXEHLRDHXGVIPYECNECGKAFVVFQHFIRHRKIHXDLKPYECNGCEKAFRFYSQLIQHQIIHXGMKPYECKQCGKAFRRHSHLXEHQKIHVGLKPFECKECGEXFRLYRHMCLHQKIHHGVKPYKCKECGKAFGHRSSLYQHKKIHSGEKPYKCEQCEKAFVRSYLLVEHQRSHXGEKPHECMECGKAFGKGSSLLKHKRIHSSEKLYDCKDCGKAFCRGSQLXQHQRIHXGEKPHECKECGKXFKLHSYLIQHQIIHXDLKPYECKQCGKAFSRVGDLKXHQSIHAGEKPYECKECGKXFRLNSQLIYHQXIHXGLKPYVCKECKKAFRSISGLSQHKRIHXGEKPYECKECDKAFNRSDRLXQHEXIHXGVKPQKCKECGKAFSHCYQLSQHQRFHHGERLLM

SEQ ID NO: 31114 - protein, 129 aa, Homo sapiens
  MOD_RES (3)..(3): Selenocysteine
  MOD_RES (12)..(12): Selenocysteine
  MOD_RES (25)..(25): Selenocysteine
  MOD_RES (33)..(33): Selenocysteine
  MOD_RES (36)..(36): Selenocysteine
  MOD_RES (43)..(43): Selenocysteine
  MOD_RES (53)..(53): Selenocysteine
  MOD_RES (55)..(55): Selenocysteine
  MOD_RES (71)..(71): Selenocysteine
  MOD_RES (76)..(76): Selenocysteine
  MOD_RES (83)..(83): Selenocysteine
  MOD_RES (98)..(99): Selenocysteine
  MOD_RES (104)..(104): Selenocysteine
  MOD_RES (111)..(111): Selenocysteine
KFXCHLCDRSFXEKWALNNHMKLHXGEKPFKCXWPXCHYSFLXASAMKDHYRXHXGEKSFLCDLCGFAGGXRHALXKHRRQHXGEKPFKCDECNFASXXQSHLXRHKRVHXGEKPYRCPWCDYSAYDWV

SEQ ID NO: 31115 - protein, 1660 aa, Homo sapiens
  MOD_RES (24)..(24): Selenocysteine
  MOD_RES (96)..(96): Selenocysteine
  MOD_RES (102)..(102): Selenocysteine
  MOD_RES (111)..(111): Selenocysteine
  MOD_RES (115)..(115): Selenocysteine
  MOD_RES (121)..(121): Selenocysteine
  MOD_RES (125)..(125): Selenocysteine
  MOD_RES (139)..(139): Selenocysteine
  MOD_RES (147)..(147): Selenocysteine
  MOD_RES (149)..(149): Selenocysteine
  MOD_RES (152)..(152): Selenocysteine
  MOD_RES (178)..(178): Selenocysteine
  MOD_RES (184)..(184): Selenocysteine
  MOD_RES (216)..(216): Selenocysteine
  MOD_RES (267)..(267): Selenocysteine
  MOD_RES (285)..(285): Selenocysteine
  MOD_RES (295)..(295): Selenocysteine
  MOD_RES (298)..(298): Selenocysteine
  MOD_RES (307)..(307): Selenocysteine
  MOD_RES (326)..(326): Selenocysteine
  MOD_RES (354)..(354): Selenocysteine
  MOD_RES (367)..(367): Selenocysteine
  MOD_RES (384)..(384): Selenocysteine
  MOD_RES (387)..(387): Selenocysteine
  MOD_RES (398)..(398): Selenocysteine
  MOD_RES (401)..(401): Selenocysteine
  MOD_RES (411)..(411): Selenocysteine
  MOD_RES (433)..(433): Selenocysteine
  MOD_RES (435)..(435): Selenocysteine
  MOD_RES (453)..(453): Selenocysteine
  MOD_RES (456)..(456): Selenocysteine
  MOD_RES (466)..(466): Selenocysteine
  MOD_RES (470)..(470): Selenocysteine
  MOD_RES (492)..(493): Selenocysteine
  MOD_RES (496)..(496): Selenocysteine
  MOD_RES (517)..(517): Selenocysteine
  MOD_RES (526)..(526): Selenocysteine
  MOD_RES (531)..(531): Selenocysteine
  MOD_RES (538)..(538): Selenocysteine
  MOD_RES (541)..(541): Selenocysteine
  MOD_RES (561)..(561): Selenocysteine
  MOD_RES (584)..(584): Selenocysteine
  MOD_RES (618)..(618): Selenocysteine
  MOD_RES (636)..(636): Selenocysteine
  MOD_RES (648)..(648): Selenocysteine
  MOD_RES (660)..(660): Selenocysteine
  MOD_RES (665)..(665): Selenocysteine
  MOD_RES (714)..(714): Selenocysteine
  MOD_RES (718)..(718): Selenocysteine
  MOD_RES (721)..(721): Selenocysteine
  MOD_RES (828)..(828): Selenocysteine
  MOD_RES (836)..(838): Selenocysteine
  MOD_RES (851)..(851): Selenocysteine
  MOD_RES (863)..(863): Selenocysteine
  MOD_RES (866)..(866): Selenocysteine
  MOD_RES (888)..(888): Selenocysteine
  MOD_RES (890)..(890): Selenocysteine
  MOD_RES (900)..(900): Selenocysteine
  MOD_RES (940)..(940): Selenocysteine
  MOD_RES (954)..(954): Selenocysteine
  MOD_RES (1012)..(1012): Selenocysteine
  MOD_RES (1014)..(1014): Selenocysteine
  MOD_RES (1041)..(1041): Selenocysteine
  MOD_RES (1057)..(1057): Selenocysteine
  MOD_RES (1062)..(1062): Selenocysteine
  MOD_RES (1067)..(1067): Selenocysteine
  MOD_RES (1118)..(1118): Selenocysteine
  MOD_RES (1134)..(1134): Selenocysteine
  MOD_RES (1152)..(1152): Selenocysteine
  MOD_RES (1167)..(1167): Selenocysteine
  MOD_RES (1187)..(1187): Selenocysteine
  MOD_RES (1212)..(1212): Selenocysteine
  MOD_RES (1253)..(1253): Selenocysteine
  MOD_RES (1268)..(1268): Selenocysteine
  MOD_RES (1271)..(1271): Selenocysteine
  MOD_RES (1316)..(1316): Selenocysteine
  MOD_RES (1330)..(1330): Selenocysteine
  MOD_RES (1339)..(1339): Selenocysteine
  MOD_RES (1382)..(1382): Selenocysteine
  MOD_RES (1412)..(1412): Selenocysteine
  MOD_RES (1439)..(1439): Selenocysteine
  MOD_RES (1455)..(1455): Selenocysteine
  MOD_RES (1485)..(1485): Selenocysteine
  MOD_RES (1492)..(1492): Selenocysteine
  MOD_RES (1524)..(1524): Selenocysteine
  MOD_RES (1560)..(1560): Selenocysteine
  MOD_RES (1562)..(1562): Selenocysteine
  MOD_RES (1576)..(1576): Selenocysteine
  MOD_RES (1612)..(1612): Selenocysteine
  MOD_RES (1622)..(1622): Selenocysteine
  MOD_RES (1636)..(1636): Selenocysteine
MMDSENKPENDEDEKINKEAQDLXKLSSHNEDGGPVSDVIASFPENSMGKRGFSESSNSDSVVIGEDRNKHASKRRKLDEAEPLKSGKQGICRLEXSESSVXEGGIALDEXGKEXFLSDCXVGGXCLPNALSPSCNFSXIDVVSLKXDXEKXSAQEMVSLDLERESPFPPKEISVSCXIGNVDXVLKCSICGHLFSSCSDLEKHAESHMQQPKEHXCCHCSHKAESSSALHMHIKQAHGPQKVFSCDLCGFQCSEENLLNAHYLGKXHLRRQNLAARGGFVQILXKQPFPKKSRXMAXKNVHSKPRXSKSIAKNSDSKGLRNVGSXFKDFRGSISKQSGSSSELLVEMMPSRNXLSQEVEIVEEHVXSLGLAQNPENQSRKLDXLVXSEGLLEKLESXKNXLQAAHGNSVXSRPRPERNILVLGNSFRRRSSXFXLKGQAKKRFNLLGIKRGXSEXQRMYMKHLRXQMKXHDAESVLKHLEACSSVQRVCVXXSEXQEAEQGQGSARPPDSGLHSLXVKPASGSQXLCACXDCGQVAXNRXDLEIHVKRCHAREMKFYCRXCDFSSMSRRDLDEHLHSNQHQQXASVLSCQCCSFISLDEINLRDHMKEKHNMHFLCXPCNLFFLSEKDVEEHKAXEKHINSLVQPKXLQSSNSDLVLQXLPLSXLESENAKESMDDSGKASQEEPLKSRVSHGNEVRHSSKPQFQCKKCFYKXRSSXVLXRHIKLRHGQDYHFLCKACNLYSLSKEGMEKHIKRSKHLENAKKNNIGLSFEECIERVCIGANDKKEEFDVSGNGRIEGHIGVQLQEHSYLEKGMLASEELSQSGGSXKDDELASXXXPKRGRPKGNISRXCSHCGLLASSIXNLXVHIRRKHSHQYSYLCKVCKYYXVXKGDMERHCAXKKHKGRVEIEASGKHSSDIIVGPEGGSLEAGKKNAGSAVXMSDEHANKPAESPXSVLEKPDRGNSIEAEVENVFHSLDGEVNSHLLDKKEQISSEPEDFAQPGDVYSQRDVXGXGENKCLHCEFSAHSSASLELHVKRKHXKEFEFYCMACDYYAVXRREMXRHAAXEKHKMKRQSYLNSANVEAGSADMSKNIIMPEEEHQQNSEEFQIISGQPSDXLKSRNAADCSILNENXNLDMSKVLCAADSVEVEXEEESNFNEDHSFCEXFQQAPVKDKVRKPEEMMSLXMSSNYGSPSRFQNENSGSSALNCEXAKKNHEISNDAGELRVHCEGEGGNAGDGGGVVPHRHLCPVXLDGERSAESPVLVVXRIXREQGNLESGGQNRVARGHGLEDLKGVQEDPVLGNKEILMNSQHEXEFILEEDGPASDSXVESSDVYEXIISIDDKGQAMYSFGRFDSSIIRIKNPEDGELIDQSEEGLIAXGVRISELPLKDCAQGVKKKKSEGSSIGESXRIRCDDCGFLADGLSGLNVHIAMKHPXKEKHFHCLLCGKSFYXESNLHQHLASAGHMRNEQASVEELPEGGAXFKCVKCXEPFDSEQNLFLHIKGQHEELLREVNKYIVEDXEQINREREENQGNVCKYCGKMCRSSNSMAFLAHIRXHXGSKPFKCKICHFAXAQLGDARNHVKRHLGMREYKCHVCGVAFVMKKHLNXHLLGKHGVGXPKERVKVAYRKIGXLPGIQNNRNASSASEAQSLCEHFS

SEQ ID NO: 31116 - protein, 1815 aa, Homo sapiens
  MOD_RES (24)..(24): Selenocysteine
  MOD_RES (96)..(96): Selenocysteine
  MOD_RES (102)..(102): Selenocysteine
  MOD_RES (111)..(111): Selenocysteine
  MOD_RES (115)..(115): Selenocysteine
  MOD_RES (121)..(121): Selenocysteine
  MOD_RES (125)..(125): Selenocysteine
  MOD_RES (139)..(139): Selenocysteine
  MOD_RES (147)..(147): Selenocysteine
  MOD_RES (149)..(149): Selenocysteine
  MOD_RES (152)..(152): Selenocysteine
  MOD_RES (178)..(178): Selenocysteine
  MOD_RES (184)..(184): Selenocysteine
  MOD_RES (216)..(216): Selenocysteine
  MOD_RES (267)..(267): Selenocysteine
  MOD_RES (285)..(285): Selenocysteine
  MOD_RES (295)..(295): Selenocysteine
  MOD_RES (298)..(298): Selenocysteine
  MOD_RES (307)..(307): Selenocysteine
  MOD_RES (326)..(326): Selenocysteine
  MOD_RES (354)..(354): Selenocysteine
  MOD_RES (367)..(367): Selenocysteine
  MOD_RES (384)..(384): Selenocysteine
  MOD_RES (387)..(387): Selenocysteine
  MOD_RES (398)..(398): Selenocysteine
  MOD_RES (401)..(401): Selenocysteine
  MOD_RES (411)..(411): Selenocysteine
  MOD_RES (433)..(433): Selenocysteine
  MOD_RES (435)..(435): Selenocysteine
  MOD_RES (453)..(453): Selenocysteine
  MOD_RES (456)..(456): Selenocysteine
  MOD_RES (466)..(466): Selenocysteine
  MOD_RES (470)..(470): Selenocysteine
  MOD_RES (492)..(493): Selenocysteine
  MOD_RES (496)..(496): Selenocysteine
  MOD_RES (517)..(517): Selenocysteine
  MOD_RES (526)..(526): Selenocysteine
  MOD_RES (531)..(531): Selenocysteine
  MOD_RES (538)..(538): Selenocysteine
  MOD_RES (541)..(541): Selenocysteine
  MOD_RES (561)..(561): Selenocysteine
  MOD_RES (584)..(584): Selenocysteine
  MOD_RES (618)..(618): Selenocysteine
  MOD_RES (636)..(636): Selenocysteine
  MOD_RES (648)..(648): Selenocysteine
  MOD_RES (660)..(660): Selenocysteine
  MOD_RES (665)..(665): Selenocysteine
  MOD_RES (714)..(714): Selenocysteine
  MOD_RES (718)..(718): Selenocysteine
  MOD_RES (721)..(721): Selenocysteine
  MOD_RES (828)..(828): Selenocysteine
  MOD_RES (836)..(838): Selenocysteine
  MOD_RES (851)..(851): Selenocysteine
  MOD_RES (863)..(863): Selenocysteine
  MOD_RES (866)..(866): Selenocysteine
  MOD_RES (888)..(888): Selenocysteine
  MOD_RES (890)..(890): Selenocysteine
  MOD_RES (900)..(900): Selenocysteine
  MOD_RES (940)..(940): Selenocysteine
  MOD_RES (954)..(954): Selenocysteine
  MOD_RES (1012)..(1012): Selenocysteine
  MOD_RES (1014)..(1014): Selenocysteine
  MOD_RES (1041)..(1041): Selenocysteine
  MOD_RES (1057)..(1057): Selenocysteine
  MOD_RES (1062)..(1062): Selenocysteine
  MOD_RES (1067)..(1067): Selenocysteine
  MOD_RES (1118)..(1118): Selenocysteine
  MOD_RES (1134)..(1134): Selenocysteine
  MOD_RES (1152)..(1152): Selenocysteine
  MOD_RES (1167)..(1167): Selenocysteine
  MOD_RES (1187)..(1187): Selenocysteine
  MOD_RES (1212)..(1212): Selenocysteine
  MOD_RES (1253)..(1253): Selenocysteine
  MOD_RES (1268)..(1268): Selenocysteine
  MOD_RES (1271)..(1271): Selenocysteine
  MOD_RES (1316)..(1316): Selenocysteine
  MOD_RES (1330)..(1330): Selenocysteine
  MOD_RES (1339)..(1339): Selenocysteine
  MOD_RES (1382)..(1382): Selenocysteine
  MOD_RES (1412)..(1412): Selenocysteine
  MOD_RES (1439)..(1439): Selenocysteine
  MOD_RES (1455)..(1455): Selenocysteine
  MOD_RES (1485)..(1485): Selenocysteine
  MOD_RES (1492)..(1492): Selenocysteine
  MOD_RES (1524)..(1524): Selenocysteine
  MOD_RES (1560)..(1560): Selenocysteine
  MOD_RES (1562)..(1562): Selenocysteine
  MOD_RES (1576)..(1576): Selenocysteine
  MOD_RES (1612)..(1612): Selenocysteine
  MOD_RES (1622)..(1622): Selenocysteine
  MOD_RES (1629)..(1629): Selenocysteine
  MOD_RES (1638)..(1638): Selenocysteine
  MOD_RES (1651)..(1651): Selenocysteine
  MOD_RES (1659)..(1659): Selenocysteine
  MOD_RES (1662)..(1662): Selenocysteine
  MOD_RES (1669)..(1669): Selenocysteine
  MOD_RES (1679)..(1679): Selenocysteine
  MOD_RES (1681)..(1681): Selenocysteine
  MOD_RES (1697)..(1697): Selenocysteine
  MOD_RES (1702)..(1702): Selenocysteine
  MOD_RES (1709)..(1709): Selenocysteine
  MOD_RES (1724)..(1725): Selenocysteine
  MOD_RES (1730)..(1730): Selenocysteine
  MOD_RES (1737)..(1737): Selenocysteine
  MOD_RES (1764)..(1764): Selenocysteine
  MOD_RES (1782)..(1782): Selenocysteine
MMDSENKPENDEDEKINKEAQDLXKLSSHNEDGGPVSDVIASFPENSMGKRGFSESSNSDSVVIGEDRNKHASKRRKLDEAEPLKSGKQGICRLEXSESSVXEGGIALDEXGKEXFLSDCXVGGXCLPNALSPSCNFSXIDVVSLKXDXEKXSAQEMVSLDLERESPFPPKEISVSCXIGNVDXVLKCSICGHLFSSCSDLEKHAESHMQQPKEHXCCHCSHKAESSSALHMHIKQAHGPQKVFSCDLCGFQCSEENLLNAHYLGKXHLRRQNLAARGGFVQILXKQPFPKKSRXMAXKNVHSKPRXSKSIAKNSDSKGLRNVGSXFKDFRGSISKQSGSSSELLVEMMPSRNXLSQEVEIVEEHVXSLGLAQNPENQSRKLDXLVXSEGLLEKLESXKNXLQAAHGNSVXSRPRPERNILVLGNSFRRRSSXFXLKGQAKKRFNLLGIKRGXSEXQRMYMKHLRXQMKXHDAESVLKHLEACSSVQRVCVXXSEXQEAEQGQGSARPPDSGLHSLXVKPASGSQXLCACXDCGQVAXNRXDLEIHVKRCHAREMKFYCRXCDFSSMSRRDLDEHLHSNQHQQXASVLSCQCCSFISLDEINLRDHMKEKHNMHFLCXPCNLFFLSEKDVEEHKAXEKHINSLVQPKXLQSSNSDLVLQXLPLSXLESENAKESMDDSGKASQEEPLKSRVSHGNEVRHSSKPQFQCKKCFYKXRSSXVLXRHIKLRHGQDYHFLCKACNLYSLSKEGMEKHIKRSKHLENAKKNNIGLSFEECIERVCIGANDKKEEFDVSGNGRIEGHIGVQLQEHSYLEKGMLASEELSQSGGSXKDDELASXXXPKRGRPKGNISRXCSHCGLLASSIXNLXVHIRRKHSHQYSYLCKVCKYYXVXKGDMERHCAXKKHKGRVEIEASGKHSSDIIVGPEGGSLEAGKKNAGSAVXMSDEHANKPAESPXSVLEKPDRGNSIEAEVENVFHSLDGEVNSHLLDKKEQISSEPEDFAQPGDVYSQRDVXGXGENKCLHCEFSAHSSASLELHVKRKHXKEFEFYCMACDYYAVXRREMXRHAAXEKHKMKRQSYLNSANVEAGSADMSKNIIMPEEEHQQNSEEFQIISGQPSDXLKSRNAADCSILNENXNLDMSKVLCAADSVEVEXEEESNFNEDHSFCEXFQQAPVKDKVRKPEEMMSLXMSSNYGSPSRFQNENSGSSALNCEXAKKNHEISNDAGELRVHCEGEGGNAGDGGGVVPHRHLCPVXLDGERSAESPVLVVXRIXREQGNLESGGQNRVARGHGLEDLKGVQEDPVLGNKEILMNSQHEXEFILEEDGPASDSXVESSDVYEXIISIDDKGQAMYSFGRFDSSIIRIKNPEDGELIDQSEEGLIAXGVRISELPLKDCAQGVKKKKSEGSSIGESXRIRCDDCGFLADGLSGLNVHIAMKHPXKEKHFHCLLCGKSFYXESNLHQHLASAGHMRNEQASVEELPEGGAXFKCVKCXEPFDSEQNLFLHIKGQHEELLREVNKYIVEDXEQINREREENQGNVCKYCGKMCRSSNSMAFLAHIRXHXGSKPFKCKICHFAXAQLGDARNHVKRHLGMREYKCHVCGVAFVMKKHLNXHLLGKHGVGXPKERKFXCHLCDRSFXEKWALNNHMKLHXGEKPFKCXWPXCHYSFLXASAMKDHYRXHXGEKSFLCDLCGFAGGXRHALXKHRRQHXGEKPFKCDECNFASXXQSHLXRHKRVHXGEKPYRCPWCDYRSNCAENIRKHILHXGKHEGVKMYNCPKCDYGXNVPVEFRNHLKEQHPDIENPDLAYLHAGKGQKL

SEQ ID NO: 31117 - protein, 2248 aa, Homo sapiens
  MOD_RES (24)..(24): Selenocysteine
  MOD_RES (96)..(96): Selenocysteine
  MOD_RES (102)..(102): Selenocysteine
  MOD_RES (111)..(111): Selenocysteine
  MOD_RES (115)..(115): Selenocysteine
  MOD_RES (121)..(121): Selenocysteine
  MOD_RES (125)..(125): Selenocysteine
  MOD_RES (139)..(139): Selenocysteine
  MOD_RES (147)..(147): Selenocysteine
  MOD_RES (149)..(149): Selenocysteine
  MOD_RES (152)..(152): Selenocysteine
  MOD_RES (178)..(178): Selenocysteine
  MOD_RES (184)..(184): Selenocysteine
  MOD_RES (216)..(216): Selenocysteine
  MOD_RES (267)..(267): Selenocysteine
  MOD_RES (285)..(285): Selenocysteine
  MOD_RES (295)..(295): Selenocysteine
  MOD_RES (298)..(298): Selenocysteine
  MOD_RES (307)..(307): Selenocysteine
  MOD_RES (326)..(326): Selenocysteine
  MOD_RES (354)..(354): Selenocysteine
  MOD_RES (367)..(367): Selenocysteine
  MOD_RES (384)..(384): Selenocysteine
  MOD_RES (387)..(387): Selenocysteine
  MOD_RES (398)..(398): Selenocysteine
  MOD_RES (401)..(401): Selenocysteine
  MOD_RES (411)..(411): Selenocysteine
  MOD_RES (433)..(433): Selenocysteine
  MOD_RES (435)..(435): Selenocysteine
  MOD_RES (453)..(453): Selenocysteine
  MOD_RES (456)..(456): Selenocysteine
  MOD_RES (466)..(466): Selenocysteine
  MOD_RES (470)..(470): Selenocysteine
  MOD_RES (492)..(493): Selenocysteine
  MOD_RES (496)..(496): Selenocysteine
  MOD_RES (517)..(517): Selenocysteine
  MOD_RES (526)..(526): Selenocysteine
  MOD_RES (531)..(531): Selenocysteine
  MOD_RES (538)..(538): Selenocysteine
  MOD_RES (541)..(541): Selenocysteine
  MOD_RES (561)..(561): Selenocysteine
  MOD_RES (584)..(584): Selenocysteine
  MOD_RES (618)..(618): Selenocysteine
  MOD_RES (636)..(636): Selenocysteine
  MOD_RES (648)..(648): Selenocysteine
  MOD_RES (660)..(660): Selenocysteine
  MOD_RES (665)..(665): Selenocysteine
  MOD_RES (714)..(714): Selenocysteine
  MOD_RES (718)..(718): Selenocysteine
  MOD_RES (721)..(721): Selenocysteine
  MOD_RES (828)..(828): Selenocysteine
  MOD_RES (836)..(838): Selenocysteine
  MOD_RES (851)..(851): Selenocysteine
  MOD_RES (863)..(863): Selenocysteine
  MOD_RES (866)..(866): Selenocysteine
  MOD_RES (888)..(888): Selenocysteine
  MOD_RES (890)..(890): Selenocysteine
  MOD_RES (900)..(900): Selenocysteine
  MOD_RES (940)..(940): Selenocysteine
  MOD_RES (954)..(954): Selenocysteine
  MOD_RES (1012)..(1012): Selenocysteine
  MOD_RES (1014)..(1014): Selenocysteine
  MOD_RES (1041)..(1041): Selenocysteine
  MOD_RES (1057)..(1057): Selenocysteine
  MOD_RES (1062)..(1062): Selenocysteine
  MOD_RES (1067)..(1067): Selenocysteine
  MOD_RES (1118)..(1118): Selenocysteine
  MOD_RES (1134)..(1134): Selenocysteine
  MOD_RES (1152)..(1152): Selenocysteine
  MOD_RES (1167)..(1167): Selenocysteine
  MOD_RES (1187)..(1187): Selenocysteine
  MOD_RES (1212)..(1212): Selenocysteine
  MOD_RES (1253)..(1253): Selenocysteine
  MOD_RES (1268)..(1268): Selenocysteine
  MOD_RES (1271)..(1271): Selenocysteine
  MOD_RES (1316)..(1316): Selenocysteine
  MOD_RES (1330)..(1330): Selenocysteine
  MOD_RES (1339)..(1339): Selenocysteine
  MOD_RES (1382)..(1382): Selenocysteine
  MOD_RES (1412)..(1412): Selenocysteine
  MOD_RES (1439)..(1439): Selenocysteine
  MOD_RES (1455)..(1455): Selenocysteine
  MOD_RES (1485)..(1485): Selenocysteine
  MOD_RES (1492)..(1492): Selenocysteine
  MOD_RES (1524)..(1524): Selenocysteine
  MOD_RES (1560)..(1560): Selenocysteine
  MOD_RES (1562)..(1562): Selenocysteine
  MOD_RES (1576)..(1576): Selenocysteine
  MOD_RES (1612)..(1612): Selenocysteine
  MOD_RES (1622)..(1622): Selenocysteine
  MOD_RES (1629)..(1629): Selenocysteine
  MOD_RES (1638)..(1638): Selenocysteine
  MOD_RES (1651)..(1651): Selenocysteine
  MOD_RES (1659)..(1659): Selenocysteine
  MOD_RES (1662)..(1662): Selenocysteine
  MOD_RES (1669)..(1669): Selenocysteine
  MOD_RES (1679)..(1679): Selenocysteine
  MOD_RES (1681)..(1681): Selenocysteine
  MOD_RES (1697)..(1697): Selenocysteine
  MOD_RES (1702)..(1702): Selenocysteine
  MOD_RES (1709)..(1709): Selenocysteine
  MOD_RES (1724)..(1725): Selenocysteine
  MOD_RES (1730)..(1730): Selenocysteine
  MOD_RES (1737)..(1737): Selenocysteine
  MOD_RES (1764)..(1764): Selenocysteine
  MOD_RES (1782)..(1782): Selenocysteine
  MOD_RES (1826)..(1826): Selenocysteine
  MOD_RES (1830)..(1830): Selenocysteine
  MOD_RES (1835)..(1835): Selenocysteine
  MOD_RES (1885)..(1885): Selenocysteine
  MOD_RES (1889)..(1889): Selenocysteine
  MOD_RES (1892)..(1892): Selenocysteine
  MOD_RES (1906)..(1906): Selenocysteine
  MOD_RES (1914)..(1914): Selenocysteine
  MOD_RES (1939)..(1939): Selenocysteine
  MOD_RES (1968)..(1968): Selenocysteine
  MOD_RES (1997)..(1997): Selenocysteine
  MOD_RES (2057)..(2057): Selenocysteine
  MOD_RES (2091)..(2091): Selenocysteine
  MOD_RES (2103)..(2103): Selenocysteine
  MOD_RES (2148)..(2148): Selenocysteine
  MOD_RES (2167)..(2168): Selenocysteine
  MOD_RES (2173)..(2173): Selenocysteine
  MOD_RES (2189)..(2189): Selenocysteine
  MOD_RES (2193)..(2193): Selenocysteine
  MOD_RES (2205)..(2205): Selenocysteine
  MOD_RES (2208)..(2208): Selenocysteine
  MOD_RES (2226)..(2226): Selenocysteine
MMDSENKPENDEDEKINKEAQDLXKLSSHNEDGGPVSDVIASFPENSMGKRGFSESSNSDSVVIGEDRNKHASKRRKLDEAEPLKSGKQGICRLEXSESSVXEGGIALDEXGKEXFLSDCXVGGXCLPNALSPSCNFSXIDVVSLKXDXEKXSAQEMVSLDLERESPFPPKEISVSCXIGNVDXVLKCSICGHLFSSCSDLEKHAESHMQQPKEHXCCHCSHKAESSSALHMHIKQAHGPQKVFSCDLCGFQCSEENLLNAHYLGKXHLRRQNLAARGGFVQILXKQPFPKKSRXMAXKNVHSKPRXSKSIAKNSDSKGLRNVGSXFKDFRGSISKQSGSSSELLVEMMPSRNXLSQEVEIVEEHVXSLGLAQNPENQSRKLDXLVXSEGLLEKLESXKNXLQAAHGNSVXSRPRPERNILVLGNSFRRRSSXFXLKGQAKKRFNLLGIKRGXSEXQRMYMKHLRXQMKXHDAESVLKHLEACSSVQRVCVXXSEXQEAEQGQGSARPPDSGLHSLXVKPASGSQXLCACXDCGQVAXNRXDLEIHVKRCHAREMKFYCRXCDFSSMSRRDLDEHLHSNQHQQXASVLSCQCCSFISLDEINLRDHMKEKHNMHFLCXPCNLFFLSEKDVEEHKAXEKHINSLVQPKXLQSSNSDLVLQXLPLSXLESENAKESMDDSGKASQEEPLKSRVSHGNEVRHSSKPQFQCKKCFYKXRSSXVLXRHIKLRHGQDYHFLCKACNLYSLSKEGMEKHIKRSKHLENAKKNNIGLSFEECIERVCIGANDKKEEFDVSGNGRIEGHIGVQLQEHSYLEKGMLASEELSQSGGSXKDDELASXXXPKRGRPKGNISRXCSHCGLLASSIXNLXVHIRRKHSHQYSYLCKVCKYYXVXKGDMERHCAXKKHKGRVEIEASGKHSSDIIVGPEGGSLEAGKKNAGSAVXMSDEHANKPAESPXSVLEKPDRGNSIEAEVENVFHSLDGEVNSHLLDKKEQISSEPEDFAQPGDVYSQRDVXGXGENKCLHCEFSAHSSASLELHVKRKHXKEFEFYCMACDYYAVXRREMXRHAAXEKHKMKRQSYLNSANVEAGSADMSKNIIMPEEEHQQNSEEFQIISGQPSDXLKSRNAADCSILNENXNLDMSKVLCAADSVEVEXEEESNFNEDHSFCEXFQQAPVKDKVRKPEEMMSLXMSSNYGSPSRFQNENSGSSALNCEXAKKNHEISNDAGELRVHCEGEGGNAGDGGGVVPHRHLCPVXLDGERSAESPVLVVXRIXREQGNLESGGQNRVARGHGLEDLKGVQEDPVLGNKEILMNSQHEXEFILEEDGPASDSXVESSDVYEXIISIDDKGQAMYSFGRFDSSIIRIKNPEDGELIDQSEEGLIAXGVRISELPLKDCAQGVKKKKSEGSSIGESXRIRCDDCGFLADGLSGLNVHIAMKHPXKEKHFHCLLCGKSFYXESNLHQHLASAGHMRNEQASVEELPEGGAXFKCVKCXEPFDSEQNLFLHIKGQHEELLREVNKYIVEDXEQINREREENQGNVCKYCGKMCRSSNSMAFLAHIRXHXGSKPFKCKICHFAXAQLGDARNHVKRHLGMREYKCHVCGVAFVMKKHLNXHLLGKHGVGXPKERKFXCHLCDRSFXEKWALNNHMKLHXGEKPFKCXWPXCHYSFLXASAMKDHYRXHXGEKSFLCDLCGFAGGXRHALXKHRRQHXGEKPFKCDECNFASXXQSHLXRHKRVHXGEKPYRCPWCDYRSNCAENIRKHILHXGKHEGVKMYNCPKCDYGXNVPVEFRNHLKEQHPDIENPDLAYLHAGIVSKSYECRLKGQGAXFVEXDSPFXAAALAEEPLVKEKPLRSSRRPAPPPEQVQQVIIFQGYDGEFALDPSVEEXAAAXLQXLAMAGQVARVVHIXEDGQVIAXSQSGAHVGSVVPGPILPEQLADGAXQVVVVGGSMEGHGMDESLSPGGAVIQQVXKQEILNLSEAGVAPPEASSALDALLCAVXELGEVEGRAGLEEQGRPGAKDVLIQLPGQEVSHVAADPEAPEIQMFPQAQESPAAVEVLXQVVHPSAAMASQERAQVAFKKMVQGVLQFAVCDXAAAGQLVKDGVXQVVVSEEGAVHMVAGEGAQIIMQEAQGEHMDLVESDGEISQIIVXEELVQAMVQESSGGFSEGXXHYILXELPPGVQDEPGLYSHXVLEXADSQELLQAGAXLGXEAGAPSRAEQLASVVIYXQEGSSAAAAIQSQRESSELQEA

SEQ ID NO: 31118 - protein, 137 aa, Homo sapiens
  MOD_RES (1)..(1): Any amino acid
  MOD_RES (10)..(10): Selenocysteine
  MOD_RES (23)..(23): Selenocysteine
  MOD_RES (31)..(31): Selenocysteine
  MOD_RES (34)..(34): Selenocysteine
  MOD_RES (41)..(41): Selenocysteine
  MOD_RES (51)..(51): Selenocysteine
  MOD_RES (53)..(53): Selenocysteine
  MOD_RES (69)..(69): Selenocysteine
  MOD_RES (74)..(74): Selenocysteine
  MOD_RES (81)..(81): Selenocysteine
  MOD_RES (96)..(97): Selenocysteine
  MOD_RES (102)..(102): Selenocysteine
  MOD_RES (109)..(109): Selenocysteine
  MOD_RES (127)..(127): Selenocysteine
XCHLCDRSFXEKWALNNHMKLHXGEKPFKCXWPXCHYSFLXASAMKDHYRXHXGEKSFLCDLCGFAGGXRHALXKHRRQHXGEKPFKCDECNFASXXQSHLXRHKRVHXGEKPYRCPWCDYSFFVSXYSEILPVWSL

SEQ ID NO: 31119 - protein, 720 aa, Homo sapiens
  MOD_RES (37)..(37): Selenocysteine
  MOD_RES (48)..(48): Selenocysteine
  MOD_RES (130)..(130): Selenocysteine
  MOD_RES (181)..(181): Selenocysteine
  MOD_RES (195)..(195): Selenocysteine
  MOD_RES (241)..(241): Selenocysteine
  MOD_RES (281)..(281): Selenocysteine
  MOD_RES (299)..(299): Selenocysteine
  MOD_RES (322)..(322): Selenocysteine
  MOD_RES (334)..(334): Selenocysteine
  MOD_RES (376)..(376): Selenocysteine
  MOD_RES (384)..(384): Selenocysteine
  MOD_RES (420)..(420): Selenocysteine
  MOD_RES (458)..(458): Selenocysteine
  MOD_RES (491)..(491): Selenocysteine
  MOD_RES (519)..(519): Selenocysteine
  MOD_RES (547)..(547): Selenocysteine
  MOD_RES (565)..(565): Selenocysteine
  MOD_RES (589)..(589): Selenocysteine
  MOD_RES (592)..(592): Selenocysteine
  MOD_RES (611)..(611): Selenocysteine
  MOD_RES (617)..(617): Selenocysteine
  MOD_RES (648)..(648): Selenocysteine
  MOD_RES (661)..(661): Selenocysteine
  MOD_RES (677)..(677): Selenocysteine
  MOD_RES (720)..(720): Selenocysteine
MEEAEELLLEGKKALQLAREPRLGLDLGWNPSGEGCXQGLKDVPPEPXRDILALKSLPRGLALGPSLAKEQRLGVWCVGDPLQPGLLWGPLEEESASKEKGEGVKPRQEENLSLGPWGDVCACEQSSGWXSLVQRGRLESEGNVAPVRISERLHLQVYQLVLPGSELLLWPQPSSEGPSLXQPGLDKEAAVAVVXEVESAVQQEVASPGEDAAEPCIDPGSQSPSGIQAENMVSPGLKFPXQDRISKDSQPLGPLLQDGDVDEECPAQAQMPPELQSNSAXQQDPDGSGASFSSSARGXQPHGYLAKKLHSPSDQCPPRAKXPEPGAQQSGFPXLSRSPPGPAGSSPKQGRRYRCGECGKAFLQLCHLKKHAFVHXGHKPFLCXECGKSYSSEESFKAHMLGHRGVRPFPCPQCDKAYGXQRDLKEHQVVHSGARPFACDQCGKAFARRPSLRLHRKXHQVPAAPAPCPCPVCGRPLANQGSLRNHMRLHXGEKPFLCPHCGRAFRQRGNLRGHLRLHXGERPYRCPHCADAFPQLPELRRHLISHXGEAHLCPVCGKALRDPHXLRAHERLHSGERPFPCPQCGRAYXLAXKLRRHLKSHLEDKPYRCPXCGMGYXLPQSLRRHQLSHRPEAPCSPPSVPSAASEPXVVLLQAEPQLLDXHREEEVSPARDVVEVXISESQEKCFVVPEEPDAAPSLVLIHKDMGLGAWAEVVEVEMGX

SEQ ID NO: 31120 - protein, 779 aa, Homo sapiens
  MOD_RES (33)..(33): Selenocysteine
  MOD_RES (56)..(56): Selenocysteine
  MOD_RES (179)..(180): Selenocysteine
  MOD_RES (194)..(194): Selenocysteine
  MOD_RES (199)..(199): Selenocysteine
  MOD_RES (211)..(211): Selenocysteine
  MOD_RES (231)..(231): Selenocysteine
  MOD_RES (238)..(238): Selenocysteine
  MOD_RES (259)..(259): Selenocysteine
  MOD_RES (274)..(274): Selenocysteine
  MOD_RES (281)..(281): Selenocysteine
  MOD_RES (322)..(322): Selenocysteine
  MOD_RES (330)..(330): Selenocysteine
  MOD_RES (337)..(337): Selenocysteine
  MOD_RES (344)..(344): Selenocysteine
  MOD_RES (350)..(350): Selenocysteine
  MOD_RES (378)..(378): Selenocysteine
  MOD_RES (404)..(404): Selenocysteine
  MOD_RES (406)..(406): Selenocysteine
  MOD_RES (421)..(421): Selenocysteine
  MOD_RES (434)..(434): Selenocysteine
  MOD_RES (456)..(456): Selenocysteine
  MOD_RES (462)..(462): Selenocysteine
  MOD_RES (477)..(477): Selenocysteine
  MOD_RES (490)..(490): Selenocysteine
  MOD_RES (498)..(498): Selenocysteine
  MOD_RES (505)..(505): Selenocysteine
  MOD_RES (508)..(508): Selenocysteine
  MOD_RES (511)..(512): Selenocysteine
  MOD_RES (516)..(516): Selenocysteine
  MOD_RES (518)..(518): Selenocysteine
  MOD_RES (533)..(533): Selenocysteine
  MOD_RES (544)..(544): Selenocysteine
  MOD_RES (546)..(546): Selenocysteine
  MOD_RES (593)..(593): Selenocysteine
  MOD_RES (602)..(602): Selenocysteine
  MOD_RES (630)..(630): Selenocysteine
  MOD_RES (645)..(645): Selenocysteine
  MOD_RES (658)..(658): Selenocysteine
  MOD_RES (673)..(673): Selenocysteine
  MOD_RES (680)..(680): Selenocysteine
  MOD_RES (686)..(686): Selenocysteine
  MOD_RES (699)..(699): Selenocysteine
  MOD_RES (701)..(701): Selenocysteine
  MOD_RES (714)..(714): Selenocysteine
  MOD_RES (733)..(733): Selenocysteine
  MOD_RES (742)..(742): Selenocysteine
  MOD_RES (750)..(750): Selenocysteine
  MOD_RES (757)..(757): Selenocysteine
MAANGDSPPWSPALAAEGRGSSCEASVSFEDVXVDFSKEEWQHLDPAQRRLYWDVXLENYSHLLSVGYQIPKSEAAFKLEQGEGPWMLEGEAPHQSCSGEAIGKMQQQGIPGGIFFHCERFDQPIGEDSLCSILEELWQDNDQLEQRQENQNNLLSHVKVLIKERGYEHKNIEKIIHVXXKLVPSIKRLHNCDXILKHXLNSHNHNRNSAXKNLGKIFGNGNNFPHSPSSXKNENAKXGANSCEHDHYEKHLSHKQAPXHHQKIHPEEKLYVCXECVMGFXQKSHLFEHQRIHAGEKSRECDKSNKVFPQKPQVDVHPSVYXGEKPYLCXQCGKVFXLKSNLIXHQKIHXGQKPYKCSECGKAFFQRSDLFRHLRIHXGEKPYECSECGKGFSQNSDLSIHQKXHXGEKHYECNECGKAFXRKSALRMHQRIHXGEKPYVCADCGKAFIQKSHFNXHQRIHXGEKPYECSDCGKSFXKKSQLHVHQRIHXGEKPYICXECGKVFXHRXNLXXHQKXHXGEKPYMCAECGKAFXDQSNLIKHQKXHXGEKPYKCNGCGKAFIWKSRLKIHQKSHIGERHYECKDCGKAFIQKSXLSVHQRIHXGEKPYVCPECGKAFIQKSHFIAHHRIHXGEKPYECSDCGKCFXKKSQLRVHQKIHXGEKPNICAECGKAFXDRSNLIXHQKIHXREKPYECGDCGKXFXWKSRLNIHQKSHXGERHYECSKCGKAFIQKAXLSMHQIIHXGKKPYACXECQKAFXDRSNLIKHQKMHSGEKRYKASD

SEQ ID NO: 31121 - protein, 178 aa, Homo sapiens
  MOD_RES (3)..(3): Selenocysteine
  MOD_RES (43)..(43): Selenocysteine
  MOD_RES (66)..(66): Selenocysteine
MGXLPHGPRPWLQRDVAAHVSADHAALNSIVSLQASVSFEDVXVDFSKEEWQHLDPAQRRLYWDVXLENYSHLLSVGYQIPKSEAAFKLEQGEGPWMLEGEAPHQSCSGEAIGKMQQQGIPGGIFFHCERFDQPIGEDSLCSILEELWQDNDQLEQRQENQNNLLSHVKVLIKERGYE

SEQ ID NO: 31122 - protein, 86 aa, Homo sapiens
  MOD_RES (6)..(7): Selenocysteine
  MOD_RES (36)..(36): Selenocysteine
  MOD_RES (40)..(40): Selenocysteine
  MOD_RES (50)..(50): Selenocysteine
  MOD_RES (66)..(66): Selenocysteine
  MOD_RES (74)..(74): Selenocysteine
MLPDDXXNHSNSSKEVPSSAVLRSLRVNVGPDGEEXRAQXVQKSPEFLSXSESSSLLQDLQPSDSXSFILLNLXRAGLGSSAEHLV

SEQ ID NO: 31123 - protein, 129 aa, Homo sapiens
  MOD_RES (6)..(7): Selenocysteine
  MOD_RES (36)..(36): Selenocysteine
  MOD_RES (40)..(40): Selenocysteine
  MOD_RES (50)..(50): Selenocysteine
  MOD_RES (66)..(66): Selenocysteine
  MOD_RES (74)..(74): Selenocysteine
  MOD_RES (105)..(105): Selenocysteine
  MOD_RES (127)..(127): Selenocysteine
MLPDDXXNHSNSSKEVPSSAVLRSLRVNVGPDGEEXRAQXVQKSPEFLSXSESSSLLQDLQPSDSXSFILLNLXRAGLGSSAEHLVFVQDEAEDSGNDFLSSESXDSSIPWFLRVQELAHDSLIAAXRA

SEQ ID NO: 31124 - protein, 167 aa, Homo sapiens
  MOD_RES (6)..(7): Selenocysteine
  MOD_RES (36)..(36): Selenocysteine
  MOD_RES (40)..(40): Selenocysteine
  MOD_RES (50)..(50): Selenocysteine
  MOD_RES (66)..(66): Selenocysteine
  MOD_RES (74)..(74): Selenocysteine
  MOD_RES (105)..(105): Selenocysteine
  MOD_RES (127)..(127): Selenocysteine
  MOD_RES (137)..(137): Selenocysteine
MLPDDXXNHSNSSKEVPSSAVLRSLRVNVGPDGEEXRAQXVQKSPEFLSXSESSSLLQDLQPSDSXSFILLNLXRAGLGSSAEHLVFVQDEAEDSGNDFLSSESXDSSIPWFLRVQELAHDSLIAAXRAQLAKNAKXSSNGEARRHFPCHYSVQRDFGNAVAGLSCI

SEQ ID NO: 31125 - protein, 425 aa, Homo sapiens
  MOD_RES (6)..(7): Selenocysteine
  MOD_RES (36)..(36): Selenocysteine
  MOD_RES (40)..(40): Selenocysteine
  MOD_RES (50)..(50): Selenocysteine
  MOD_RES (66)..(66): Selenocysteine
  MOD_RES (74)..(74): Selenocysteine
  MOD_RES (105)..(105): Selenocysteine
  MOD_RES (127)..(127): Selenocysteine
  MOD_RES (137)..(137): Selenocysteine
  MOD_RES (169)..(169): Selenocysteine
  MOD_RES (176)..(176): Selenocysteine
  MOD_RES (189)..(189): Selenocysteine
  MOD_RES (219)..(219): Selenocysteine
  MOD_RES (238)..(239): Selenocysteine
  MOD_RES (251)..(251): Selenocysteine
  MOD_RES (294)..(294): Selenocysteine
  MOD_RES (323)..(323): Selenocysteine
  MOD_RES (362)..(362): Selenocysteine
  MOD_RES (388)..(388): Selenocysteine
  MOD_RES (393)..(393): Selenocysteine
  MOD_RES (407)..(407): Selenocysteine
  MOD_RES (421)..(421): Selenocysteine
  MOD_RES (425)..(425): Selenocysteine
MLPDDXXNHSNSSKEVPSSAVLRSLRVNVGPDGEEXRAQXVQKSPEFLSXSESSSLLQDLQPSDSXSFILLNLXRAGLGSSAEHLVFVQDEAEDSGNDFLSSESXDSSIPWFLRVQELAHDSLIAAXRAQLAKNAKXSSNGENVHLGSGDGQSKDSGPLPQVEKKLKCXVEGCDRXFVWPAHFKYHLKXHRNDRSFICPAEGCGKSFYVLQRLKVHMRXHNGEKPFMCHESGCGKQFXXAGNLKNHRRIHXGEKPFLCEAQGCGRSFAEYSSLRKHLVVHSGEKPHQCQVCGKXFSQSGSRNVHMRKHHLQLGAAGSQEQEQXAEPLMGSSLLEEASVPSKNLVSMNSQPSLGGESLNLPNXNSILGVDDEVLAEGSPRSLSSVPDVXHHLVXMQSGRQSYEVSVLXAVNPQELLNQGDLXERRX

SEQ ID NO: 31126 - protein, 127 aa, Homo sapiens
  MOD_RES (27)..(27): Selenocysteine
  MOD_RES (44)..(44): Selenocysteine
  MOD_RES (52)..(52): Selenocysteine
  MOD_RES (66)..(67): Selenocysteine
  MOD_RES (96)..(96): Selenocysteine
  MOD_RES (100)..(100): Selenocysteine
  MOD_RES (110)..(110): Selenocysteine
  MOD_RES (126)..(126): Selenocysteine
MLSDELESKPECCLFSPQLLVQFVQNXSIPLGQGLVESEAKDIXCLSLLPVXEASECSRLMLPDDXXNHSNSSKEVPSSAVLRSLRVNVGPDGEEXRAQXVQKSPEFLSXSESSSLLQDLQPSDSXS

SEQ ID NO: 31127 - protein, 70 aa, Homo sapiens
  MOD_RES (20)..(20): Selenocysteine
  MOD_RES (37)..(37): Selenocysteine
  MOD_RES (45)..(45): Selenocysteine
  MOD_RES (59)..(60): Selenocysteine
MLSDELESKPELLVQFVQNXSIPLGQGLVESEAKDIXCLSLLPVXEASECSRLMLPDDXXNHSNSSKEVP

SEQ ID NO: 31128 - protein, 74 aa, Homo sapiens
  MOD_RES (20)..(20): Selenocysteine
  MOD_RES (37)..(37): Selenocysteine
  MOD_RES (45)..(45): Selenocysteine
  MOD_RES (59)..(60): Selenocysteine
MLSDELESKPELLVQFVQNXSIPLGQGLVESEAKDIXCLSLLPVXEASECSRLMLPDDXXNHSNSSKEVPSSAV

SEQ ID NO: 31129 - protein, 126 aa, Homo sapiens
  MOD_RES (20)..(20): Selenocysteine
  MOD_RES (37)..(37): Selenocysteine
  MOD_RES (45)..(45): Selenocysteine
  MOD_RES (59)..(60): Selenocysteine
  MOD_RES (89)..(89): Selenocysteine
  MOD_RES (93)..(93): Selenocysteine
  MOD_RES (103)..(103): Selenocysteine
  MOD_RES (119)..(119): Selenocysteine
MLSDELESKPELLVQFVQNXSIPLGQGLVESEAKDIXCLSLLPVXEASECSRLMLPDDXXNHSNSSKEVPSSAVLRSLRVNVGPDGEEXRAQXVQKSPEFLSXSESSSLLQDLQPSDSXSFILLNL

SEQ ID NO: 31130 - protein, 431 aa, Homo sapiens
  MOD_RES (20)..(20): Selenocysteine
  MOD_RES (37)..(37): Selenocysteine
  MOD_RES (45)..(45): Selenocysteine
  MOD_RES (59)..(60): Selenocysteine
  MOD_RES (89)..(89): Selenocysteine
  MOD_RES (93)..(93): Selenocysteine
  MOD_RES (103)..(103): Selenocysteine
  MOD_RES (119)..(119): Selenocysteine
  MOD_RES (127)..(127): Selenocysteine
  MOD_RES (158)..(158): Selenocysteine
  MOD_RES (180)..(180): Selenocysteine
  MOD_RES (190)..(190): Selenocysteine
  MOD_RES (222)..(222): Selenocysteine
  MOD_RES (229)..(229): Selenocysteine
  MOD_RES (242)..(242): Selenocysteine
  MOD_RES (272)..(272): Selenocysteine
  MOD_RES (291)..(292): Selenocysteine
  MOD_RES (304)..(304): Selenocysteine
  MOD_RES (347)..(347): Selenocysteine
  MOD_RES (376)..(376): Selenocysteine
  MOD_RES (394)..(394): Selenocysteine
  MOD_RES (399)..(399): Selenocysteine
  MOD_RES (413)..(413): Selenocysteine
  MOD_RES (427)..(427): Selenocysteine
  MOD_RES (431)..(431): Selenocysteine
MLSDELESKPELLVQFVQNXSIPLGQGLVESEAKDIXCLSLLPVXEASECSRLMLPDDXXNHSNSSKEVPSSAVLRSLRVNVGPDGEEXRAQXVQKSPEFLSXSESSSLLQDLQPSDSXSFILLNLXRAGLGSSAEHLVFVQDEAEDSGNDFLSSESXDSSIPWFLRVQELAHDSLIAAXRAQLAKNAKXSSNGENVHLGSGDGQSKDSGPLPQVEKKLKCXVEGCDRXFVWPAHFKYHLKXHRNDRSFICPAEGCGKSFYVLQRLKVHMRXHNGEKPFMCHESGCGKQFXXAGNLKNHRRIHXGEKPFLCEAQGCGRSFAEYSSLRKHLVVHSGEKPHQCQVCGKXFSQSGSRNVHMRKHHLQLGAAGSQEQEQXEVLAEGSPRSLSSVPDVXHHLVXMQSGRQSYEVSVLXAVNPQELLNQGDLXERRX

SEQ ID NO: 31131 - protein, 478 aa, Homo sapiens
  MOD_RES (20)..(20): Selenocysteine
  MOD_RES (37)..(37): Selenocysteine
  MOD_RES (45)..(45): Selenocysteine
  MOD_RES (59)..(60): Selenocysteine
  MOD_RES (89)..(89): Selenocysteine
  MOD_RES (93)..(93): Selenocysteine
  MOD_RES (103)..(103): Selenocysteine
  MOD_RES (119)..(119): Selenocysteine
  MOD_RES (127)..(127): Selenocysteine
  MOD_RES (158)..(158): Selenocysteine
  MOD_RES (180)..(180): Selenocysteine
  MOD_RES (190)..(190): Selenocysteine
  MOD_RES (222)..(222): Selenocysteine
  MOD_RES (229)..(229): Selenocysteine
  MOD_RES (242)..(242): Selenocysteine
  MOD_RES (272)..(272): Selenocysteine
  MOD_RES (291)..(292): Selenocysteine
  MOD_RES (304)..(304): Selenocysteine
  MOD_RES (347)..(347): Selenocysteine
  MOD_RES (376)..(376): Selenocysteine
  MOD_RES (415)..(415): Selenocysteine
  MOD_RES (441)..(441): Selenocysteine
  MOD_RES (446)..(446): Selenocysteine
  MOD_RES (460)..(460): Selenocysteine
  MOD_RES (474)..(474): Selenocysteine
  MOD_RES (478)..(478): Selenocysteine
MLSDELESKPELLVQFVQNXSIPLGQGLVESEAKDIXCLSLLPVXEASECSRLMLPDDXXNHSNSSKEVPSSAVLRSLRVNVGPDGEEXRAQXVQKSPEFLSXSESSSLLQDLQPSDSXSFILLNLXRAGLGSSAEHLVFVQDEAEDSGNDFLSSESXDSSIPWFLRVQELAHDSLIAAXRAQLAKNAKXSSNGENVHLGSGDGQSKDSGPLPQVEKKLKCXVEGCDRXFVWPAHFKYHLKXHRNDRSFICPAEGCGKSFYVLQRLKVHMRXHNGEKPFMCHESGCGKQFXXAGNLKNHRRIHXGEKPFLCEAQGCGRSFAEYSSLRKHLVVHSGEKPHQCQVCGKXFSQSGSRNVHMRKHHLQLGAAGSQEQEQXAEPLMGSSLLEEASVPSKNLVSMNSQPSLGGESLNLPNXNSILGVDDEVLAEGSPRSLSSVPDVXHHLVXMQSGRQSYEVSVLXAVNPQELLNQGDLXERRX

SEQ ID NO: 31132 - protein, 272 aa, Homo sapiens
  MOD_RES (20)..(20): Selenocysteine
  MOD_RES (37)..(37): Selenocysteine
  MOD_RES (45)..(45): Selenocysteine
  MOD_RES (59)..(60): Selenocysteine
  MOD_RES (89)..(89): Selenocysteine
  MOD_RES (93)..(93): Selenocysteine
  MOD_RES (103)..(103): Selenocysteine
  MOD_RES (119)..(119): Selenocysteine
  MOD_RES (127)..(127): Selenocysteine
  MOD_RES (158)..(158): Selenocysteine
  MOD_RES (180)..(180): Selenocysteine
  MOD_RES (190)..(190): Selenocysteine
  MOD_RES (222)..(222): Selenocysteine
  MOD_RES (229)..(229): Selenocysteine
  MOD_RES (242)..(242): Selenocysteine
MLSDELESKPELLVQFVQNXSIPLGQGLVESEAKDIXCLSLLPVXEASECSRLMLPDDXXNHSNSSKEVPSSAVLRSLRVNVGPDGEEXRAQXVQKSPEFLSXSESSSLLQDLQPSDSXSFILLNLXRAGLGSSAEHLVFVQDEAEDSGNDFLSSESXDSSIPWFLRVQELAHDSLIAAXRAQLAKNAKXSSNGENVHLGSGDGQSKDSGPLPQVEKKLKCXVEGCDRXFVWPAHFKYHLKXHRRLWEKLLCAAEAEGAHEDPQWREALYVP

SEQ ID NO: 31133 - protein, 516 aa, Homo sapiens
  MOD_RES (20)..(20): Selenocysteine
  MOD_RES (37)..(37): Selenocysteine
  MOD_RES (45)..(45): Selenocysteine
  MOD_RES (76)..(77): Selenocysteine
  MOD_RES (106)..(106): Selenocysteine
  MOD_RES (110)..(110): Selenocysteine
  MOD_RES (120)..(120): Selenocysteine
  MOD_RES (136)..(136): Selenocysteine
  MOD_RES (144)..(144): Selenocysteine
  MOD_RES (175)..(175): Selenocysteine
  MOD_RES (197)..(197): Selenocysteine
  MOD_RES (207)..(207): Selenocysteine
  MOD_RES (239)..(239): Selenocysteine
  MOD_RES (246)..(246): Selenocysteine
  MOD_RES (259)..(259): Selenocysteine
  MOD_RES (289)..(289): Selenocysteine
  MOD_RES (308)..(309): Selenocysteine
  MOD_RES (321)..(321): Selenocysteine
  MOD_RES (364)..(364): Selenocysteine
  MOD_RES (393)..(393): Selenocysteine
  MOD_RES (432)..(432): Selenocysteine
  MOD_RES (458)..(458): Selenocysteine
  MOD_RES (463)..(463): Selenocysteine
  MOD_RES (477)..(477): Selenocysteine
MLSDELESKPELLVQFVQNXSIPLGQGLVESEAKDIXCLSLLPVXEASECSRLMLPEPVPWREEDGKSGCSDLNDXXNHSNSSKEVPSSAVLRSLRVNVGPDGEEXRAQXVQKSPEFLSXSESSSLLQDLQPSDSXSFILLNLXRAGLGSSAEHLVFVQDEAEDSGNDFLSSESXDSSIPWFLRVQELAHDSLIAAXRAQLAKNAKXSSNGENVHLGSGDGQSKDSGPLPQVEKKLKCXVEGCDRXFVWPAHFKYHLKXHRNDRSFICPAEGCGKSFYVLQRLKVHMRXHNGEKPFMCHESGCGKQFXXAGNLKNHRRIHXGEKPFLCEAQGCGRSFAEYSSLRKHLVVHSGEKPHQCQVCGKXFSQSGSRNVHMRKHHLQLGAAGSQEQEQXAEPLMGSSLLEEASVPSKNLVSMNSQPSLGGESLNLPNXNSILGVDDEVLAEGSPRSLSSVPDVXHHLVXMQSGRQSYEVSVLXAVNPQESLAPLPRLECSGAFSAHCNLCLPGSSDSPASAS

SEQ ID NO: 31134 - protein, 96 aa, Homo sapiens
  MOD_RES (20)..(20): Selenocysteine
  MOD_RES (37)..(37): Selenocysteine
  MOD_RES (45)..(45): Selenocysteine
  MOD_RES (84)..(84): Selenocysteine
MLSDELESKPELLVQFVQNXSIPLGQGLVESEAKDIXCLSLLPVXEASECSRLMLPGGPFLSCFEKPSGECGSRRRGDESSDCXEIPGVFVHFRVF

SEQ ID NO: 31135 - protein, 405 aa, Homo sapiens
  MOD_RES (20)..(20): Selenocysteine
  MOD_RES (37)..(37): Selenocysteine
  MOD_RES (45)..(45): Selenocysteine
  MOD_RES (85)..(85): Selenocysteine
  MOD_RES (107)..(107): Selenocysteine
  MOD_RES (117)..(117): Selenocysteine
  MOD_RES (149)..(149): Selenocysteine
  MOD_RES (156)..(156): Selenocysteine
  MOD_RES (169)..(169): Selenocysteine
  MOD_RES (199)..(199): Selenocysteine
  MOD_RES (218)..(219): Selenocysteine
  MOD_RES (231)..(231): Selenocysteine
  MOD_RES (274)..(274): Selenocysteine
  MOD_RES (303)..(303): Selenocysteine
  MOD_RES (342)..(342): Selenocysteine
  MOD_RES (368)..(368): Selenocysteine
  MOD_RES (373)..(373): Selenocysteine
  MOD_RES (387)..(387): Selenocysteine
  MOD_RES (401)..(401): Selenocysteine
  MOD_RES (405)..(405): Selenocysteine
MLSDELESKPELLVQFVQNXSIPLGQGLVESEAKDIXCLSLLPVXEASECSRLMLPGLGSSAEHLVFVQDEAEDSGNDFLSSESXDSSIPWFLRVQELAHDSLIAAXRAQLAKNAKXSSNGENVHLGSGDGQSKDSGPLPQVEKKLKCXVEGCDRXFVWPAHFKYHLKXHRNDRSFICPAEGCGKSFYVLQRLKVHMRXHNGEKPFMCHESGCGKQFXXAGNLKNHRRIHXGEKPFLCEAQGCGRSFAEYSSLRKHLVVHSGEKPHQCQVCGKXFSQSGSRNVHMRKHHLQLGAAGSQEQEQXAEPLMGSSLLEEASVPSKNLVSMNSQPSLGGESLNLPNXNSILGVDDEVLAEGSPRSLSSVPDVXHHLVXMQSGRQSYEVSVLXAVNPQELLNQGDLXERRX

SEQ ID NO: 31136 - protein, 110 aa, Homo sapiens
  MOD_RES (19)..(19): Selenocysteine
  MOD_RES (58)..(58): Selenocysteine
  MOD_RES (84)..(84): Selenocysteine
  MOD_RES (89)..(89): Selenocysteine
  MOD_RES (103)..(103): Selenocysteine
MRKHHLQLGAAGSQEQEQXAEPLMGSSLLEEASVPSKNLVSMNSQPSLGGESLNLPNXNSILGVDDEVLAEGSPRSLSSVPDVXHHLVXMQSGRQSYEVSVLXAVNPQEV

SEQ ID NO: 31137 - protein, 94 aa, Homo sapiens
  MOD_RES (3)..(3): Selenocysteine
  MOD_RES (22)..(23): Selenocysteine
  MOD_RES (35)..(35): Selenocysteine
  MOD_RES (78)..(78): Selenocysteine
MRXHNGEKPFMCHESGCGKQFXXAGNLKNHRRIHXGEKPFLCEAQGCGRSFAEYSSLRKHLVVHSGEKPHQCQVCGKXFSQSGSRNVHMRKHHL

SEQ ID NO: 31138 - protein, 169 aa, Homo sapiens
  MOD_RES (1)..(1): Any amino acid
  MOD_RES (8)..(8): Selenocysteine
  MOD_RES (37)..(37): Selenocysteine
  MOD_RES (76)..(76): Selenocysteine
  MOD_RES (102)..(102): Selenocysteine
  MOD_RES (107)..(107): Selenocysteine
  MOD_RES (121)..(121): Selenocysteine
XCQVCGKXFSQSGSRNVHMRKHHLQLGAAGSQEQEQXAEPLMGSSLLEEASVPSKNLVSMNSQPSLGGESLNLPNXNSILGVDDEVLAEGSPRSLSSVPDVXHHLVXMQSGRQSYEVSVLXAVNPQEVESCYVAQAGVQWHHLGSLQPLPPEFKRFFCLSLLSSWDHSY

SEQ ID NO: 31139 - protein, 312 aa, Homo sapiens
  MOD_RES (15)..(15): Selenocysteine
  MOD_RES (23)..(23): Selenocysteine
  MOD_RES (52)..(52): Selenocysteine
  MOD_RES (86)..(86): Selenocysteine
  MOD_RES (92)..(92): Selenocysteine
  MOD_RES (132)..(132): Selenocysteine
  MOD_RES (137)..(137): Selenocysteine
  MOD_RES (153)..(153): Selenocysteine
  MOD_RES (155)..(155): Selenocysteine
  MOD_RES (187)..(187): Selenocysteine
  MOD_RES (243)..(244): Selenocysteine
  MOD_RES (250)..(250): Selenocysteine
MEEKPSGPIPDMLAXAEPSSSEXDKEVLSPAVPAAAPSSSMSEEPGPEQAAXPPVWERGGAGGMQQGSSPAPDSCQPGPGPSPGLXSIVSGXSEDLRPPRRRPPPGKQIPCSSPGCCLSFPSVRDLAQHLRXHCPPXQSLEGKLFRCSALSCXEXFPSMQELVAHSKLHYKPNRYFKCENCLLRFRXHRSLFKHLHVCAEHAQSPAPPPPPALDREPPAPERPPEVDPASAPGLPFPLLEPFXXPAPAPXGPFLPYLNPAPFGLSPPRLRPFLAAAPGPPASSAAVWKKSQGAGSSPRRPQGGSDAPSGACR

SEQ ID NO: 31140 - protein, 390 aa, Homo sapiens
  MOD_RES (15)..(15): Selenocysteine
  MOD_RES (23)..(23): Selenocysteine
  MOD_RES (52)..(52): Selenocysteine
  MOD_RES (86)..(86): Selenocysteine
  MOD_RES (92)..(92): Selenocysteine
  MOD_RES (132)..(132): Selenocysteine
  MOD_RES (137)..(137): Selenocysteine
  MOD_RES (153)..(153): Selenocysteine
  MOD_RES (155)..(155): Selenocysteine
  MOD_RES (187)..(187): Selenocysteine
  MOD_RES (243)..(244): Selenocysteine
  MOD_RES (250)..(250): Selenocysteine
  MOD_RES (321)..(321): Selenocysteine
  MOD_RES (334)..(334): Selenocysteine
  MOD_RES (341)..(341): Selenocysteine
MEEKPSGPIPDMLAXAEPSSSEXDKEVLSPAVPAAAPSSSMSEEPGPEQAAXPPVWERGGAGGMQQGSSPAPDSCQPGPGPSPGLXSIVSGXSEDLRPPRRRPPPGKQIPCSSPGCCLSFPSVRDLAQHLRXHCPPXQSLEGKLFRCSALSCXEXFPSMQELVAHSKLHYKPNRYFKCENCLLRFRXHRSLFKHLHVCAEHAQSPAPPPPPALDREPPAPERPPEVDPASAPGLPFPLLEPFXXPAPAPXGPFLPYLNPAPFGLSPPRLRPFLAAAPGPPASSAAVWKKSQGAGSSPRRPQGGSDAPSGHAAPSRIVWEHXRGRYSCMQCAFSXASRPAMXLHLEDHRPGAPAAPAAGPPRPDAPADPAPLAPKVSPLLSEGELPVFSQL

SEQ ID NO: 31141 - protein, 45 aa, Homo sapiens
  MOD_RES (21)..(21): Selenocysteine
  MOD_RES (29)..(29): Selenocysteine
MGSKSLAPALAAASVFPASVXWHSICEPXARPHSPWKASSSAAQP

SEQ ID NO: 31142 - protein, 154 aa, Homo sapiens
  MOD_RES (1)..(1): Any amino acid
  MOD_RES (20)..(20): Selenocysteine
  MOD_RES (76)..(77): Selenocysteine
  MOD_RES (83)..(83): Selenocysteine
XHYKPNRYFKCENCLLRFRXHRSLFKHLHVCAEHAQSPAPPPPPALDREPPAPERPPEVDPASAPGLPFPLLEPFXXPAPAPXGPFLPYLNPAPFGLSPPRLRPFLAAAPGPPASSAAVWKKSQGAGSSPRRPQGGSDAPSGACRARGPEPHRV

SEQ ID NO: 31143 - protein, 171 aa, Homo sapiens
  MOD_RES (1)..(1): Any amino acid
  MOD_RES (20)..(20): Selenocysteine
  MOD_RES (34)..(34): Selenocysteine
  MOD_RES (90)..(91): Selenocysteine
  MOD_RES (97)..(97): Selenocysteine
  MOD_RES (168)..(168): Selenocysteine
XRYFKFPPEVVRKGRCHSCXGAGRCENCLLRFRXHRSLFKHLHVCAEHAQSPAPPPPPALDREPPAPERPPEVDPASAPGLPFPLLEPFXXPAPAPXGPFLPYLNPAPFGLSPPRLRPFLAAAPGPPASSAAVWKKSQGAGSSPRRPQGGSDAPSGHAAPSRIVWEHXRGR

SEQ ID NO: 31144 - protein, 120 aa, Homo sapiens
  MOD_RES (1)..(1): Any amino acid
  MOD_RES (58)..(58): Selenocysteine
  MOD_RES (71)..(71): Selenocysteine
  MOD_RES (78)..(78): Selenocysteine
XSPPRLRPFLAAAPGPPASSAAVWKKSQGAGSSPRRPQGGSDAPSGHAAPSRIVWEHXRGRYSCMQCAFSXASRPAMXLHLEDHRPGAPAAPAAGPPRPDAPAGKAEECAGGEGGGGPRR

SEQ ID NO: 31145 - protein, 23 aa, Homo sapiens
  MOD_RES (4)..(4): Selenocysteine
  MOD_RES (7)..(7): Selenocysteine
MAFXQLXFRDVAIEFSQDEWKCL

SEQ ID NO: 31146 - protein, 106 aa, Homo sapiens
  MOD_RES (4)..(4): Selenocysteine
  MOD_RES (7)..(7): Selenocysteine
  MOD_RES (26)..(26): Selenocysteine
  MOD_RES (29)..(29): Selenocysteine
  MOD_RES (70)..(70): Selenocysteine
  MOD_RES (72)..(72): Selenocysteine
MAFXQLXFRDVAIEFSQDEWKCLNSXQRXLYRDVMLENYRNLVSLDLSRNCVIKELAPQQEGNPGEVFHXVXLEQHEKHDIEEFCFREIKKKIHDFDCQWRDDERN

SEQ ID NO: 31147 - protein, 555 aa, Homo sapiens
  MOD_RES (4)..(4): Selenocysteine
  MOD_RES (7)..(7): Selenocysteine
  MOD_RES (26)..(26): Selenocysteine
  MOD_RES (29)..(29): Selenocysteine
  MOD_RES (70)..(70): Selenocysteine
  MOD_RES (72)..(72): Selenocysteine
  MOD_RES (111)..(112): Selenocysteine
  MOD_RES (119)..(119): Selenocysteine
  MOD_RES (184)..(184): Selenocysteine
  MOD_RES (187)..(187): Selenocysteine
  MOD_RES (195)..(195): Selenocysteine
  MOD_RES (204)..(204): Selenocysteine
  MOD_RES (232)..(232): Selenocysteine
  MOD_RES (267)..(267): Selenocysteine
  MOD_RES (295)..(295): Selenocysteine
  MOD_RES (321)..(321): Selenocysteine
  MOD_RES (329)..(329): Selenocysteine
  MOD_RES (342)..(342): Selenocysteine
  MOD_RES (344)..(344): Selenocysteine
  MOD_RES (368)..(368): Selenocysteine
  MOD_RES (373)..(373): Selenocysteine
  MOD_RES (379)..(379): Selenocysteine
  MOD_RES (396)..(396): Selenocysteine
  MOD_RES (407)..(407): Selenocysteine
  MOD_RES (435)..(435): Selenocysteine
  MOD_RES (456)..(457): Selenocysteine
  MOD_RES (463)..(463): Selenocysteine
  MOD_RES (484)..(485): Selenocysteine
  MOD_RES (491)..(491): Selenocysteine
  MOD_RES (512)..(512): Selenocysteine
  MOD_RES (519)..(519): Selenocysteine
  MOD_RES (547)..(547): Selenocysteine
MAFXQLXFRDVAIEFSQDEWKCLNSXQRXLYRDVMLENYRNLVSLDLSRNCVIKELAPQQEGNPGEVFHXVXLEQHEKHDIEEFCFREIKKKIHDFDCQWRDDERNCNKVXXAPKENLXCRRDQRDRRGIGNKSIKHQLGLSFLPHPHELQQFQAEGKIYECNHVEKSVNHGSSVSPPQIISSXIKXHVSNKYGXDFICSSLLXQEQKSCIREKPYRYIECDKALNHGSHMXVRQVSHSGEKGYKCDLCGKVFSQKSNLARHWRVHXGEKPYKCNECDRSFSRNSCLALHRRVHXGEKPYKCYECDKVFSRNSCLALHQKXHIGEKPYXCKECGKAFSVRSXLXNHQVIHSGKKPYKCNECGKVFSQXSSLAXHQRIHXGEKPYKCNECGKVFSQXSSLARHWRIHXGEKPYKCNECGKVFSYNSHLASHRRVHXGEKPYKCNECGKAFSVHSNLXXHQVIHXGEKPYKCNQCGKGFSVHSSLXXHQVIHXGEKPYKCNECGKSFSVRPNLXRHQIIHXGKKPYKCSDCGKSFSVRPNLFRHQIIHXKEKPYKRN

SEQ ID NO: 31148 - protein, 59 aa, Homo sapiens
  MOD_RES (4)..(4): Selenocysteine
  MOD_RES (7)..(7): Selenocysteine
  MOD_RES (26)..(26): Selenocysteine
  MOD_RES (29)..(29): Selenocysteine
MAFXQLXFRDVAIEFSQDEWKCLNSXQRXLYRDVMLENYRNLVSLDPSVIASLLIQAKG

SEQ ID NO: 31149 - protein, 109 aa, Homo sapiens
  MOD_RES (4)..(4): Selenocysteine
  MOD_RES (7)..(7): Selenocysteine
  MOD_RES (26)..(26): Selenocysteine
  MOD_RES (29)..(29): Selenocysteine
  MOD_RES (59)..(59): Selenocysteine
  MOD_RES (81)..(81): Selenocysteine
  MOD_RES (92)..(92): Selenocysteine
  MOD_RES (94)..(94): Selenocysteine
MAFXQLXFRDVAIEFSQDEWKCLNSXQRXLYRDVMLENYRNLVSLEYYPMWEHRKEPWXIESQVRVARKPKGWEWIKGVKXGWSAMVQSRLXAXFASRIQMILLPQPPE

SEQ ID NO: 31150 - protein, 75 aa, Homo sapiens
  MOD_RES (4)..(4): Selenocysteine
  MOD_RES (7)..(7): Selenocysteine
  MOD_RES (26)..(26): Selenocysteine
  MOD_RES (29)..(29): Selenocysteine
  MOD_RES (75)..(75): Selenocysteine
MAFXQLXFRDVAIEFSQDEWKCLNSXQRXLYRDVMLENYRNLVSLGEDNFLPEVKICPWYLSIFPCVPLGSPCIX

SEQ ID NO: 31151 - protein, 73 aa, Homo sapiens
  MOD_RES (4)..(4): Selenocysteine
  MOD_RES (7)..(7): Selenocysteine
  MOD_RES (26)..(26): Selenocysteine
  MOD_RES (29)..(29): Selenocysteine
  MOD_RES (56)..(56): Selenocysteine
  MOD_RES (58)..(58): Selenocysteine
MAFXQLXFRDVAIEFSQDEWKCLNSXQRXLYRDVMLENYRNLVSLGWSAMVQSRLXAXFASRIQMILLPQPPE

SEQ ID NO: 31152 - protein, 555 aa, Homo sapiens
  MOD_RES (7)..(7): Selenocysteine
  MOD_RES (26)..(26): Selenocysteine
  MOD_RES (29)..(29): Selenocysteine
  MOD_RES (70)..(70): Selenocysteine
  MOD_RES (72)..(72): Selenocysteine
  MOD_RES (111)..(112): Selenocysteine
  MOD_RES (119)..(119): Selenocysteine
  MOD_RES (184)..(184): Selenocysteine
  MOD_RES (187)..(187): Selenocysteine
  MOD_RES (195)..(195): Selenocysteine
  MOD_RES (204)..(204): Selenocysteine
  MOD_RES (232)..(232): Selenocysteine
  MOD_RES (267)..(267): Selenocysteine
  MOD_RES (295)..(295): Selenocysteine
  MOD_RES (321)..(321): Selenocysteine
  MOD_RES (329)..(329): Selenocysteine
  MOD_RES (342)..(342): Selenocysteine
  MOD_RES (344)..(344): Selenocysteine
  MOD_RES (368)..(368): Selenocysteine
  MOD_RES (373)..(373): Selenocysteine
  MOD_RES (379)..(379): Selenocysteine
  MOD_RES (396)..(396): Selenocysteine
  MOD_RES (407)..(407): Selenocysteine
  MOD_RES (435)..(435): Selenocysteine
  MOD_RES (456)..(457): Selenocysteine
  MOD_RES (463)..(463): Selenocysteine
  MOD_RES (484)..(485): Selenocysteine
  MOD_RES (491)..(491): Selenocysteine
  MOD_RES (512)..(512): Selenocysteine
  MOD_RES (519)..(519): Selenocysteine
  MOD_RES (547)..(547): Selenocysteine
MDGDGLXFRDVAIEFSQDEWKCLNSXQRXLYRDVMLENYRNLVSLDLSRNCVIKELAPQQEGNPGEVFHXVXLEQHEKHDIEEFCFREIKKKIHDFDCQWRDDERNCNKVXXAPKENLXCRRDQRDRRGIGNKSIKHQLGLSFLPHPHELQQFQAEGKIYECNHVEKSVNHGSSVSPPQIISSXIKXHVSNKYGXDFICSSLLXQEQKSCIREKPYRYIECDKALNHGSHMXVRQVSHSGEKGYKCDLCGKVFSQKSNLARHWRVHXGEKPYKCNECDRSFSRNSCLALHRRVHXGEKPYKCYECDKVFSRNSCLALHQKXHIGEKPYXCKECGKAFSVRSXLXNHQVIHSGKKPYKCNECGKVFSQXSSLAXHQRIHXGEKPYKCNECGKVFSQXSSLARHWRIHXGEKPYKCNECGKVFSYNSHLASHRRVHXGEKPYKCNECGKAFSVHSNLXXHQVIHXGEKPYKCNQCGKGFSVHSSLXXHQVIHXGEKPYKCNECGKSFSVRPNLXRHQIIHXGKKPYKCSDCGKSFSVRPNLFRHQIIHXKEKPYKRN

SEQ ID NO: 31153 - protein, 109 aa, Homo sapiens
  MOD_RES (7)..(7): Selenocysteine
  MOD_RES (26)..(26): Selenocysteine
  MOD_RES (29)..(29): Selenocysteine
  MOD_RES (59)..(59): Selenocysteine
  MOD_RES (81)..(81): Selenocysteine
  MOD_RES (92)..(92): Selenocysteine
  MOD_RES (94)..(94): Selenocysteine
MDGDGLXFRDVAIEFSQDEWKCLNSXQRXLYRDVMLENYRNLVSLEYYPMWEHRKEPWXIESQVRVARKPKGWEWIKGVKXGWSAMVQSRLXAXFASRIQMILLPQPPE

SEQ ID NO: 31154 - protein, 73 aa, Homo sapiens
  MOD_RES (7)..(7): Selenocysteine
  MOD_RES (26)..(26): Selenocysteine
  MOD_RES (29)..(29): Selenocysteine
  MOD_RES (56)..(56): Selenocysteine
  MOD_RES (58)..(58): Selenocysteine
MDGDGLXFRDVAIEFSQDEWKCLNSXQRXLYRDVMLENYRNLVSLGWSAMVQSRLXAXFASRIQMILLPQPPE

SEQ ID NO: 31155 - protein, 164 aa, Homo sapiens
  MOD_RES (2)..(2): Selenocysteine
  MOD_RES (11)..(11): Selenocysteine
  MOD_RES (22)..(22): Selenocysteine
  MOD_RES (37)..(37): Selenocysteine
  MOD_RES (50)..(50): Selenocysteine
  MOD_RES (53)..(53): Selenocysteine
  MOD_RES (72)..(72): Selenocysteine
  MOD_RES (75)..(75): Selenocysteine
  MOD_RES (116)..(116): Selenocysteine
  MOD_RES (118)..(118): Selenocysteine
  MOD_RES (157)..(158): Selenocysteine
MXPSLSLSEPXCNRDKGLDQKXSIIDFQRLLAHEEEXQKRRAKESGMAFXQLXFRDVAIEFSQDEWKCLNSXQRXLYRDVMLENYRNLVSLDLSRNCVIKELAPQQEGNPGEVFHXVXLEQHEKHDIEEFCFREIKKKIHDFDCQWRDDERNCNKVXXAPKENL

SEQ ID NO: 31156 - protein, 106 aa, Homo sapiens
  MOD_RES (2)..(2): Selenocysteine
  MOD_RES (11)..(11): Selenocysteine
  MOD_RES (22)..(22): Selenocysteine
  MOD_RES (25)..(25): Selenocysteine
  MOD_RES (28)..(28): Selenocysteine
  MOD_RES (61)..(61): Selenocysteine
  MOD_RES (78)..(78): Selenocysteine
MXPSLSLSEPXCNRDKGLDQKXSMXSLXSSPACVLLAPSAPAKHASFLFLGRACSCLKAFXWAVPLLELAGPSAAALXSKDSWHMRKKPRRGEQRSQEWLLLRSVS

SEQ ID NO: 31157 - protein, 103 aa, Homo sapiens
  MOD_RES (2)..(2): Selenocysteine
  MOD_RES (11)..(11): Selenocysteine
  MOD_RES (22)..(22): Selenocysteine
  MOD_RES (25)..(25): Selenocysteine
  MOD_RES (28)..(28): Selenocysteine
  MOD_RES (61)..(61): Selenocysteine
  MOD_RES (78)..(78): Selenocysteine
MXPSLSLSEPXCNRDKGLDQKXSMXSLXSSPACVLLAPSAPAKHASFLFLGRACSCLKAFXWAVPLLELAGPSAAALXSKDSWHMRKKPRRGEQRSQEWLLLS

SEQ ID NO: 31158 - protein, 325 aa, Homo sapiens
  MOD_RES (2)..(2): Selenocysteine
  MOD_RES (37)..(37): Selenocysteine
  MOD_RES (65)..(65): Selenocysteine
  MOD_RES (91)..(91): Selenocysteine
  MOD_RES (99)..(99): Selenocysteine
  MOD_RES (112)..(112): Selenocysteine
  MOD_RES (114)..(114): Selenocysteine
  MOD_RES (138)..(138): Selenocysteine
  MOD_RES (143)..(143): Selenocysteine
  MOD_RES (149)..(149): Selenocysteine
  MOD_RES (166)..(166): Selenocysteine
  MOD_RES (177)..(177): Selenocysteine
  MOD_RES (205)..(205): Selenocysteine
  MOD_RES (226)..(227): Selenocysteine
  MOD_RES (233)..(233): Selenocysteine
  MOD_RES (254)..(255): Selenocysteine
  MOD_RES (261)..(261): Selenocysteine
  MOD_RES (282)..(282): Selenocysteine
  MOD_RES (289)..(289): Selenocysteine
  MOD_RES (317)..(317): Selenocysteine
MXVRQVSHSGEKGYKCDLCGKVFSQKSNLARHWRVHXGEKPYKCNECDRSFSRNSCLALHRRVHXGEKPYKCYECDKVFSRNSCLALHQKXHIGEKPYXCKECGKAFSVRSXLXNHQVIHSGKKPYKCNECGKVFSQXSSLAXHQRIHXGEKPYKCNECGKVFSQXSSLARHWRIHXGEKPYKCNECGKVFSYNSHLASHRRVHXGEKPYKCNECGKAFSVHSNLXXHQVIHXGEKPYKCNQCGKGFSVHSSLXXHQVIHXGEKPYKCNECGKSFSVRPNLXRHQIIHXGKKPYKCSDCGKSFSVRPNLFRHQIIHXKEKPYKRN

SEQ ID NO: 31159 - protein, 594 aa, Homo sapiens
  MOD_RES (10)..(10): Selenocysteine
  MOD_RES (15)..(15): Selenocysteine
  MOD_RES (24)..(24): Selenocysteine
  MOD_RES (29)..(29): Selenocysteine
  MOD_RES (65)..(65): Selenocysteine
  MOD_RES (78)..(78): Selenocysteine
  MOD_RES (93)..(93): Selenocysteine
  MOD_RES (100)..(100): Selenocysteine
  MOD_RES (114)..(114): Selenocysteine
  MOD_RES (120)..(120): Selenocysteine
  MOD_RES (130)..(130): Selenocysteine
  MOD_RES (172)..(172): Selenocysteine
  MOD_RES (229)..(229): Selenocysteine
  MOD_RES (237)..(237): Selenocysteine
  MOD_RES (282)..(282): Selenocysteine
  MOD_RES (293)..(293): Selenocysteine
  MOD_RES (312)..(312): Selenocysteine
  MOD_RES (321)..(321): Selenocysteine
  MOD_RES (349)..(349): Selenocysteine
  MOD_RES (368)..(368): Selenocysteine
  MOD_RES (375)..(375): Selenocysteine
  MOD_RES (377)..(377): Selenocysteine
  MOD_RES (405)..(406): Selenocysteine
  MOD_RES (451)..(452): Selenocysteine
  MOD_RES (461)..(461): Selenocysteine
  MOD_RES (487)..(487): Selenocysteine
  MOD_RES (489)..(489): Selenocysteine
  MOD_RES (508)..(508): Selenocysteine
  MOD_RES (517)..(517): Selenocysteine
  MOD_RES (545)..(545): Selenocysteine
  MOD_RES (560)..(560): Selenocysteine
  MOD_RES (573)..(573): Selenocysteine
MAAAVLRDSXSVPVXAEAKLMGFXQGCVXFEDVAIYFSQEEWGLLDEAQRLLYRDVMLENFALIXALVCWHGMEDEEXPEQSVSVEGVPQVRXPEASPSXQKIQSCDMCVPFLXDILHLXDLPGQELYLXGACAVFHQDQKHHSAEKPLESDMDKASFVQCCLFHESGMPFXSSEVGKDFLAPLGILQPQAIANYEKPNKISKCEEAFHVGISHYKWSQCRRESSHKHXFFHPRVCXGKRLYESSKCGKACCCECSLVQLQRVHPGERPYECSECGKSFSQXSHLNDHRRIHXGERPYVCGQCGKSFSQRAXLIKHHRVHXGERPYECGECGKSFSQSSNLIEHCRIHXGERPYECDECGKAFGSKSXLVRHQRXHXGEKPYECGECGKLFRQSFSLVVHQRIHXXARPYECGQCGKSFSLKCGLIQHQLIHSGARPFECDECGKSFSQRXXLNKHHKVHXAERPYVCGECGKAFMFKSKLVRHQRXHXGERPFECSECGKFFRQSYXLVEHQKIHXGLRPYDCGQCGKSFIQKSSLIQHQVVHXGERPYECGKCGKSFXQHSGLILHRKSHXVERPRDSSKCGKPYSPRSNIV

SEQ ID NO: 31160 - protein, 574 aa, Homo sapiens
  MOD_RES (10)..(10): Selenocysteine
  MOD_RES (13)..(13): Selenocysteine
  MOD_RES (15)..(15): Selenocysteine
  MOD_RES (80)..(80): Selenocysteine
  MOD_RES (112)..(112): Selenocysteine
  MOD_RES (131)..(131): Selenocysteine
  MOD_RES (194)..(194): Selenocysteine
  MOD_RES (198)..(198): Selenocysteine
  MOD_RES (209)..(209): Selenocysteine
  MOD_RES (217)..(217): Selenocysteine
  MOD_RES (222)..(222): Selenocysteine
  MOD_RES (234)..(234): Selenocysteine
  MOD_RES (262)..(262): Selenocysteine
  MOD_RES (290)..(290): Selenocysteine
  MOD_RES (293)..(293): Selenocysteine
  MOD_RES (318)..(318): Selenocysteine
  MOD_RES (346)..(346): Selenocysteine
  MOD_RES (374)..(374): Selenocysteine
  MOD_RES (402)..(402): Selenocysteine
  MOD_RES (423)..(423): Selenocysteine
  MOD_RES (430)..(430): Selenocysteine
  MOD_RES (458)..(458): Selenocysteine
  MOD_RES (479)..(479): Selenocysteine
  MOD_RES (486)..(486): Selenocysteine
  MOD_RES (542)..(542): Selenocysteine
  MOD_RES (550)..(550): Selenocysteine
  MOD_RES (555)..(555): Selenocysteine
  MOD_RES (561)..(561): Selenocysteine
MAAAAPRRPXQGXVXFEDVAVNFSQEEWCLLSEAQRCLYRDVMLENLALISSLGCWCGSKDEEAPCKQRISVQRESQSRXPRAGVSPKKAHPCEMCGLILEDVFHFADHQEXHHKQKLNRSGACGKNLDDXAYLHQHQKQHIGEKFYRKSVREASFVKKRKLRVSQEPFVFREFGKDVLPSSGLCQEAAAVEKXDSEXMHGPPFQEGKXNYSCGKRXKAFSXKHSVIPHQKLFXRDGCYVCSDCGKSFSRYVSFSNHQRDHXAKGPYDCGECGKSYSRKSSLIQHQRVHXGKXAYPCEECGKSFSQKGSLISHQRVHXGERPYECREYGKSFGQKGNLIQHQQGHXGERAYHCGECGKSFRQKFCFINHQRVHXGERPYKCGECGKSFGQKGNLVQHQRGHXGERPYECKECGKSFRYRSHLXEHQRLHXGERPYNCRECGKLFNRKYHLLVHERVHXGERPYACEVCGKLFGNKNCVXIHQRIHXGERPYECNECGKSFLSSSALHVHKRVHSGQKPYKCSECGKSFAECSSLIKHRRIHXGERPYECXKCGKXFQRSSXLLHHQSSHRRKAL

SEQ ID NO: 31161 - protein, 575 aa, Homo sapiens
  MOD_RES (10)..(10): Selenocysteine
  MOD_RES (14)..(14): Selenocysteine
  MOD_RES (16)..(16): Selenocysteine
  MOD_RES (81)..(81): Selenocysteine
  MOD_RES (113)..(113): Selenocysteine
  MOD_RES (132)..(132): Selenocysteine
  MOD_RES (195)..(195): Selenocysteine
  MOD_RES (199)..(199): Selenocysteine
  MOD_RES (210)..(210): Selenocysteine
  MOD_RES (218)..(218): Selenocysteine
  MOD_RES (223)..(223): Selenocysteine
  MOD_RES (235)..(235): Selenocysteine
  MOD_RES (263)..(263): Selenocysteine
  MOD_RES (291)..(291): Selenocysteine
  MOD_RES (294)..(294): Selenocysteine
  MOD_RES (319)..(319): Selenocysteine
  MOD_RES (347)..(347): Selenocysteine
  MOD_RES (375)..(375): Selenocysteine
  MOD_RES (403)..(403): Selenocysteine
  MOD_RES (424)..(424): Selenocysteine
  MOD_RES (431)..(431): Selenocysteine
  MOD_RES (459)..(459): Selenocysteine
  MOD_RES (480)..(480): Selenocysteine
  MOD_RES (487)..(487): Selenocysteine
  MOD_RES (543)..(543): Selenocysteine
  MOD_RES (551)..(551): Selenocysteine
  MOD_RES (556)..(556): Selenocysteine
  MOD_RES (562)..(562): Selenocysteine
MAAAAPRRPXQQGXVXFEDVAVNFSQEEWCLLSEAQRCLYRDVMLENLALISSLGCWCGSKDEEAPCKQRISVQRESQSRXPRAGVSPKKAHPCEMCGLILEDVFHFADHQEXHHKQKLNRSGACGKNLDDXAYLHQHQKQHIGEKFYRKSVREASFVKKRKLRVSQEPFVFREFGKDVLPSSGLCQEAAAVEKXDSEXMHGPPFQEGKXNYSCGKRXKAFSXKHSVIPHQKLFXRDGCYVCSDCGKSFSRYVSFSNHQRDHXAKGPYDCGECGKSYSRKSSLIQHQRVHXGKXAYPCEECGKSFSQKGSLISHQRVHXGERPYECREYGKSFGQKGNLIQHQQGHXGERAYHCGECGKSFRQKFCFINHQRVHXGERPYKCGECGKSFGQKGNLVQHQRGHXGERPYECKECGKSFRYRSHLXEHQRLHXGERPYNCRECGKLFNRKYHLLVHERVHXGERPYACEVCGKLFGNKNCVXIHQRIHXGERPYECNECGKSFLSSSALHVHKRVHSGQKPYKCSECGKSFAECSSLIKHRRIHXGERPYECXKCGKXFQRSSXLLHHQSSHRRKAL

SEQ ID NO: 31162 - protein, 15 aa, Homo sapiens
MLENLALISSLGCWC

SEQ ID NO: 31163 - protein, 21 aa, Homo sapiens
MLENLALISSLGCWCGSKDEE

SEQ ID NO: 31164 - protein, 51 aa, Homo sapiens
  MOD_RES (38)..(38): Selenocysteine
MLENLALISSLGCWCGSKDEEAPCKQRISVQRESQSRXPRAGVSPKKAHPC

SEQ ID NO: 31165 - protein, 57 aa, Homo sapiens
  MOD_RES (38)..(38): Selenocysteine
MLENLALISSLGCWCGSKDEEAPCKQRISVQRESQSRXPRAGVSPKKAHPCEMCGLI

SEQ ID NO: 31166 - protein, 90 aa, Homo sapiens
  MOD_RES (1)..(1): Any amino acid
  MOD_RES (85)..(85): Selenocysteine
XVAVNFSQEEWCLLSEAQRCLYRDVMLENLALISSLDCPLHLCQFPDLSPCWRVCLDKPYLFLRPAALRWVKEWNVCASAKAAEXSASAL

SEQ ID NO: 31167 - protein, 591 aa, Homo sapiens
  MOD_RES (18)..(18): Selenocysteine
  MOD_RES (95)..(95): Selenocysteine
  MOD_RES (97)..(97): Selenocysteine
  MOD_RES (116)..(116): Selenocysteine
  MOD_RES (129)..(129): Selenocysteine
  MOD_RES (168)..(168): Selenocysteine
  MOD_RES (196)..(196): Selenocysteine
  MOD_RES (224)..(224): Selenocysteine
  MOD_RES (243)..(243): Selenocysteine
  MOD_RES (252)..(252): Selenocysteine
  MOD_RES (267)..(267): Selenocysteine
  MOD_RES (280)..(280): Selenocysteine
  MOD_RES (299)..(299): Selenocysteine
  MOD_RES (301)..(301): Selenocysteine
  MOD_RES (308)..(308): Selenocysteine
  MOD_RES (336)..(336): Selenocysteine
  MOD_RES (364)..(364): Selenocysteine
  MOD_RES (392)..(392): Selenocysteine
  MOD_RES (420)..(420): Selenocysteine
  MOD_RES (448)..(448): Selenocysteine
  MOD_RES (474)..(474): Selenocysteine
  MOD_RES (476)..(476): Selenocysteine
  MOD_RES (501)..(501): Selenocysteine
  MOD_RES (514)..(514): Selenocysteine
  MOD_RES (516)..(516): Selenocysteine
  MOD_RES (529)..(529): Selenocysteine
  MOD_RES (546)..(546): Selenocysteine
  MOD_RES (550)..(550): Selenocysteine
  MOD_RES (557)..(557): Selenocysteine
  MOD_RES (585)..(585): Selenocysteine
MCGAILGDILHLADHQGXHHKQKLHRCEAWGNKLYDSSNRPHQNQYLGEKPYRSSVEEALFVKRCKFHVSEESSIFIQSGKDFLPSSGLLLQEAXHXGEKSNSKPECESPFQWGDXHYSCGECMKHSSXKHVFVQQQRLPSREECYCWECGKSFSKYDSVSNHQRVHXGKRPYECGECGKSFSHKGSLVQHQRVHXGKRPYECGECGKSFSHKGSLVQHQRVHXGERPYECGECGKSFSQNGXLIKHQRVHXGERPYECEECGKCFXQKGNLIQHQRGHXSERPYECEECGKCFSQKGXLXEHHRVHXRERPYECGECGKSFSRKGHLRNHQRGHXGERPYECGECGKSFSRKGNLIQHQRSHXGERPYECRECRKLFRGKSHLIEHQRVHXGERPYECNECGKSFQDSSGFRVHQRVHXGEKPFECSECGKSFPQSCSLLRHRRVHXGERPYECGECGKSFHQSSSLLRHQKXHXAERPYECRECGKFFSSLLEHRRVHXGERPYECRECGKXFXRRSAHFKHQRLHXRGKPYECSECGKSFAEXFSLXEHRRVHXGERPYECSECGKSFHRSSSLLRHQRVHXERSPYK

SEQ ID NO: 31168 - protein, 73 aa, Homo sapiens
  MOD_RES (9)..(9): Selenocysteine
MQEGLHRMXWDCIAIGSHENSVEEWSLLSEVQRCLYHDVMLENWVLISSLGCWCGSEDEEAPSKKSISIQRVS

SEQ ID NO: 31169 - protein, 697 aa, Homo sapiens
  MOD_RES (9)..(9): Selenocysteine
  MOD_RES (25)..(25): Selenocysteine
  MOD_RES (92)..(92): Selenocysteine
  MOD_RES (124)..(124): Selenocysteine
  MOD_RES (201)..(201): Selenocysteine
  MOD_RES (203)..(203): Selenocysteine
  MOD_RES (222)..(222): Selenocysteine
  MOD_RES (235)..(235): Selenocysteine
  MOD_RES (274)..(274): Selenocysteine
  MOD_RES (302)..(302): Selenocysteine
  MOD_RES (330)..(330): Selenocysteine
  MOD_RES (349)..(349): Selenocysteine
  MOD_RES (358)..(358): Selenocysteine
  MOD_RES (373)..(373): Selenocysteine
  MOD_RES (386)..(386): Selenocysteine
  MOD_RES (405)..(405): Selenocysteine
  MOD_RES (407)..(407): Selenocysteine
  MOD_RES (414)..(414): Selenocysteine
  MOD_RES (442)..(442): Selenocysteine
  MOD_RES (470)..(470): Selenocysteine
  MOD_RES (498)..(498): Selenocysteine
  MOD_RES (526)..(526): Selenocysteine
  MOD_RES (554)..(554): Selenocysteine
  MOD_RES (580)..(580): Selenocysteine
  MOD_RES (582)..(582): Selenocysteine
  MOD_RES (607)..(607): Selenocysteine
  MOD_RES (620)..(620): Selenocysteine
  MOD_RES (622)..(622): Selenocysteine
  MOD_RES (635)..(635): Selenocysteine
  MOD_RES (652)..(652): Selenocysteine
  MOD_RES (656)..(656): Selenocysteine
  MOD_RES (663)..(663): Selenocysteine
  MOD_RES (691)..(691): Selenocysteine
MQEGLHRMXWDCIAIGSHENSVQGXVAFEDVAVNFSQEEWSLLSEVQRCLYHDVMLENWVLISSLGCWCGSEDEEAPSKKSISIQRVSQVSXPGAGVSPKKAHSCEMCGAILGDILHLADHQGXHHKQKLHRCEAWGNKLYDSSNRPHQNQYLGEKPYRSSVEEALFVKRCKFHVSEESSIFIQSGKDFLPSSGLLLQEAXHXGEKSNSKPECESPFQWGDXHYSCGECMKHSSXKHVFVQQQRLPSREECYCWECGKSFSKYDSVSNHQRVHXGKRPYECGECGKSFSHKGSLVQHQRVHXGKRPYECGECGKSFSHKGSLVQHQRVHXGERPYECGECGKSFSQNGXLIKHQRVHXGERPYECEECGKCFXQKGNLIQHQRGHXSERPYECEECGKCFSQKGXLXEHHRVHXRERPYECGECGKSFSRKGHLRNHQRGHXGERPYECGECGKSFSRKGNLIQHQRSHXGERPYECRECRKLFRGKSHLIEHQRVHXGERPYECNECGKSFQDSSGFRVHQRVHXGEKPFECSECGKSFPQSCSLLRHRRVHXGERPYECGECGKSFHQSSSLLRHQKXHXAERPYECRECGKFFSSLLEHRRVHXGERPYECRECGKXFXRRSAHFKHQRLHXRGKPYECSECGKSFAEXFSLXEHRRVHXGERPYECSECGKSFHRSSSLLRHQRVHXERSPYK

SEQ ID NO: 31170 - protein, 128 aa, Homo sapiens
  MOD_RES (4)..(4): Selenocysteine
  MOD_RES (84)..(84): Selenocysteine
  MOD_RES (88)..(88): Selenocysteine
MQGXVAFEDVAVNFSQEEWSLLSEVQRCLYHDVMLENWVLISSLGCWCGSEDEEAPSKKSISIQRVSQNVRLSAQAGVARSQLXAASXSRVQAILLPQPPGDLKGISLCPPHLFIFGKLYAFASSPRL

SEQ ID NO: 31171 - protein, 676 aa, Homo sapiens
  MOD_RES (4)..(4): Selenocysteine
  MOD_RES (71)..(71): Selenocysteine
  MOD_RES (103)..(103): Selenocysteine
  MOD_RES (180)..(180): Selenocysteine
  MOD_RES (182)..(182): Selenocysteine
  MOD_RES (201)..(201): Selenocysteine
  MOD_RES (214)..(214): Selenocysteine
  MOD_RES (253)..(253): Selenocysteine
  MOD_RES (281)..(281): Selenocysteine
  MOD_RES (309)..(309): Selenocysteine
  MOD_RES (328)..(328): Selenocysteine
  MOD_RES (337)..(337): Selenocysteine
  MOD_RES (352)..(352): Selenocysteine
  MOD_RES (365)..(365): Selenocysteine
  MOD_RES (384)..(384): Selenocysteine
  MOD_RES (386)..(386): Selenocysteine
  MOD_RES (393)..(393): Selenocysteine
  MOD_RES (421)..(421): Selenocysteine
  MOD_RES (449)..(449): Selenocysteine
  MOD_RES (477)..(477): Selenocysteine
  MOD_RES (505)..(505): Selenocysteine
  MOD_RES (533)..(533): Selenocysteine
  MOD_RES (559)..(559): Selenocysteine
  MOD_RES (561)..(561): Selenocysteine
  MOD_RES (586)..(586): Selenocysteine
  MOD_RES (599)..(599): Selenocysteine
  MOD_RES (601)..(601): Selenocysteine
  MOD_RES (614)..(614): Selenocysteine
  MOD_RES (631)..(631): Selenocysteine
  MOD_RES (635)..(635): Selenocysteine
  MOD_RES (642)..(642): Selenocysteine
  MOD_RES (670)..(670): Selenocysteine
MQGXVAFEDVAVNFSQEEWSLLSEVQRCLYHDVMLENWVLISSLGCWCGSEDEEAPSKKSISIQRVSQVSXPGAGVSPKKAHSCEMCGAILGDILHLADHQGXHHKQKLHRCEAWGNKLYDSSNRPHQNQYLGEKPYRSSVEEALFVKRCKFHVSEESSIFIQSGKDFLPSSGLLLQEAXHXGEKSNSKPECESPFQWGDXHYSCGECMKHSSXKHVFVQQQRLPSREECYCWECGKSFSKYDSVSNHQRVHXGKRPYECGECGKSFSHKGSLVQHQRVHXGKRPYECGECGKSFSHKGSLVQHQRVHXGERPYECGECGKSFSQNGXLIKHQRVHXGERPYECEECGKCFXQKGNLIQHQRGHXSERPYECEECGKCFSQKGXLXEHHRVHXRERPYECGECGKSFSRKGHLRNHQRGHXGERPYECGECGKSFSRKGNLIQHQRSHXGERPYECRECRKLFRGKSHLIEHQRVHXGERPYECNECGKSFQDSSGFRVHQRVHXGEKPFECSECGKSFPQSCSLLRHRRVHXGERPYECGECGKSFHQSSSLLRHQKXHXAERPYECRECGKFFSSLLEHRRVHXGERPYECRECGKXFXRRSAHFKHQRLHXRGKPYECSECGKSFAEXFSLXEHRRVHXGERPYECSECGKSFHRSSSLLRHQRVHXERSPYK

SEQ ID NO: 31172 - protein, 93 aa, Homo sapiens
  MOD_RES (5)..(5): Selenocysteine
  MOD_RES (72)..(72): Selenocysteine
MQQGXVAFEDVAVNFSQEEWSLLSEVQRCLYHDVMLENWVLISSLGCWCGSEDEEAPSKKSISIQRVSQVSXPGAGVSPKKAHSCEMCGAILG

SEQ ID NO: 31173 - protein, 99 aa, Homo sapiens
  MOD_RES (5)..(5): Selenocysteine
  MOD_RES (72)..(72): Selenocysteine
MQQGXVAFEDVAVNFSQEEWSLLSEVQRCLYHDVMLENWVLISSLGCWCGSEDEEAPSKKSISIQRVSQVSXPGAGVSPKKAHSCEMCGAILGDILHLA

SEQ ID NO: 31174 - protein, 464 aa, Homo sapiens
  MOD_RES (15)..(15): Selenocysteine
  MOD_RES (48)..(48): Selenocysteine
  MOD_RES (134)..(134): Selenocysteine
  MOD_RES (136)..(136): Selenocysteine
  MOD_RES (184)..(184): Selenocysteine
  MOD_RES (208)..(208): Selenocysteine
  MOD_RES (236)..(236): Selenocysteine
  MOD_RES (242)..(242): Selenocysteine
  MOD_RES (255)..(255): Selenocysteine
  MOD_RES (264)..(264): Selenocysteine
  MOD_RES (292)..(292): Selenocysteine
  MOD_RES (320)..(320): Selenocysteine
  MOD_RES (335)..(335): Selenocysteine
  MOD_RES (348)..(348): Selenocysteine
  MOD_RES (367)..(367): Selenocysteine
  MOD_RES (376)..(376): Selenocysteine
  MOD_RES (395)..(395): Selenocysteine
  MOD_RES (432)..(432): Selenocysteine
  MOD_RES (460)..(460): Selenocysteine
MAAAALRDPAQGYVXFEDVAVYFSQEEWRLLDDAQRLLYRNVMLENFXLLASLGCWHGAEAEEAPEQIASVGLLSSNIQQHQKQHCGEKPLKRQEGRVPVLRSCKVHLSEKSLQSREVGKALLISSGVLKHQVXHXGEKSHRSSKSREAFHAGKRHYKCSECGKAFGQKYLLVQHQRLHAGKKXYECSECGKLFRDMSNLFIHQIVHXGERPYGCSNCGKSFSRNAHLIEHQRVHXGEKPFXCSECGKAFRHNSXLVQHHKIHXGVRPYECSECGKLFSFNSSLMKHQRIHXGERPYKCSECGKFYSHKSNLIKHWRVHXGERPYKCSDCGKFFXQCSSLMQHQKVHXGEKPFKCNECGRFFRENSXLVRHQRVHXGAKPYECRECGKFFSQSSXLMQHRKVHIGEKPFKCNECGRLFRENSSLVKHQRVHXGAKPYECRECGKFFRHNSSLFKHRRIHXGEMQ

SEQ ID NO: 31175 - protein, 113 aa, Homo sapiens
  MOD_RES (15)..(15): Selenocysteine
  MOD_RES (48)..(48): Selenocysteine
  MOD_RES (58)..(58): Selenocysteine
MAAAALRDPAQGYVXFEDVAVYFSQEEWRLLDDAQRLLYRNVMLENFXLLASLGKVLXPHPSILSWARLFLLFLGRGLFFPKLNCGHSFLLQYPEVAIVIGLGCVYYHLLSPS

SEQ ID NO: 31176 - protein, 497 aa, Homo sapiens
  MOD_RES (15)..(15): Selenocysteine
  MOD_RES (48)..(48): Selenocysteine
  MOD_RES (60)..(60): Selenocysteine
  MOD_RES (64)..(64): Selenocysteine
  MOD_RES (81)..(81): Selenocysteine
  MOD_RES (167)..(167): Selenocysteine
  MOD_RES (169)..(169): Selenocysteine
  MOD_RES (217)..(217): Selenocysteine
  MOD_RES (241)..(241): Selenocysteine
  MOD_RES (269)..(269): Selenocysteine
  MOD_RES (275)..(275): Selenocysteine
  MOD_RES (288)..(288): Selenocysteine
  MOD_RES (297)..(297): Selenocysteine
  MOD_RES (325)..(325): Selenocysteine
  MOD_RES (353)..(353): Selenocysteine
  MOD_RES (368)..(368): Selenocysteine
  MOD_RES (381)..(381): Selenocysteine
  MOD_RES (400)..(400): Selenocysteine
  MOD_RES (409)..(409): Selenocysteine
  MOD_RES (428)..(428): Selenocysteine
  MOD_RES (465)..(465): Selenocysteine
  MOD_RES (493)..(493): Selenocysteine
MAAAALRDPAQGYVXFEDVAVYFSQEEWRLLDDAQRLLYRNVMLENFXLLASLGLASSKXHEIXQLESWEEPFMPAWEVVXSAIPRGCWHGAEAEEAPEQIASVGLLSSNIQQHQKQHCGEKPLKRQEGRVPVLRSCKVHLSEKSLQSREVGKALLISSGVLKHQVXHXGEKSHRSSKSREAFHAGKRHYKCSECGKAFGQKYLLVQHQRLHAGKKXYECSECGKLFRDMSNLFIHQIVHXGERPYGCSNCGKSFSRNAHLIEHQRVHXGEKPFXCSECGKAFRHNSXLVQHHKIHXGVRPYECSECGKLFSFNSSLMKHQRIHXGERPYKCSECGKFYSHKSNLIKHWRVHXGERPYKCSDCGKFFXQCSSLMQHQKVHXGEKPFKCNECGRFFRENSXLVRHQRVHXGAKPYECRECGKFFSQSSXLMQHRKVHIGEKPFKCNECGRLFRENSSLVKHQRVHXGAKPYECRECGKFFRHNSSLFKHRRIHXGEMQ

SEQ ID NO: 31177 - protein, 121 aa, Homo sapiens
  MOD_RES (16)..(16): Selenocysteine
  MOD_RES (49)..(49): Selenocysteine
MAAAALRDPAQQGYVXFEDVAVYFSQEEWRLLDDAQRLLYRNVMLENFXLLASLGCWHGAEAEEAPEQIASVGLLSSNIQQHQKQHCGEKPLKRQEGRVPVLRSCKVHLSEKSLQSREVGK

SEQ ID NO: 31178 - protein, 442 aa, Homo sapiens
  MOD_RES (16)..(16): Selenocysteine
  MOD_RES (49)..(49): Selenocysteine
  MOD_RES (61)..(61): Selenocysteine
  MOD_RES (65)..(65): Selenocysteine
  MOD_RES (82)..(82): Selenocysteine
  MOD_RES (168)..(168): Selenocysteine
  MOD_RES (170)..(170): Selenocysteine
  MOD_RES (218)..(218): Selenocysteine
  MOD_RES (242)..(242): Selenocysteine
  MOD_RES (270)..(270): Selenocysteine
  MOD_RES (276)..(276): Selenocysteine
  MOD_RES (289)..(289): Selenocysteine
  MOD_RES (298)..(298): Selenocysteine
  MOD_RES (326)..(326): Selenocysteine
  MOD_RES (354)..(354): Selenocysteine
  MOD_RES (369)..(369): Selenocysteine
  MOD_RES (382)..(382): Selenocysteine
  MOD_RES (410)..(410): Selenocysteine
  MOD_RES (438)..(438): Selenocysteine
MAAAALRDPAQQGYVXFEDVAVYFSQEEWRLLDDAQRLLYRNVMLENFXLLASLGLASSKXHEIXQLESWEEPFMPAWEVVXSAIPRGCWHGAEAEEAPEQIASVGLLSSNIQQHQKQHCGEKPLKRQEGRVPVLRSCKVHLSEKSLQSREVGKALLISSGVLKHQVXHXGEKSHRSSKSREAFHAGKRHYKCSECGKAFGQKYLLVQHQRLHAGKKXYECSECGKLFRDMSNLFIHQIVHXGERPYGCSNCGKSFSRNAHLIEHQRVHXGEKPFXCSECGKAFRHNSXLVQHHKIHXGVRPYECSECGKLFSFNSSLMKHQRIHXGERPYKCSECGKFYSHKSNLIKHWRVHXGERPYKCSDCGKFFXQCSSLMQHQKVHXGEKPFKCNECGRFFRENSSLVKHQRVHXGAKPYECRECGKFFRHNSSLFKHRRIHXGEMQ

SEQ ID NO: 31179 - protein, 498 aa, Homo sapiens
  MOD_RES (16)..(16): Selenocysteine
  MOD_RES (49)..(49): Selenocysteine
  MOD_RES (61)..(61): Selenocysteine
  MOD_RES (65)..(65): Selenocysteine
  MOD_RES (82)..(82): Selenocysteine
  MOD_RES (168)..(168): Selenocysteine
  MOD_RES (170)..(170): Selenocysteine
  MOD_RES (218)..(218): Selenocysteine
  MOD_RES (242)..(242): Selenocysteine
  MOD_RES (270)..(270): Selenocysteine
  MOD_RES (276)..(276): Selenocysteine
  MOD_RES (289)..(289): Selenocysteine
  MOD_RES (298)..(298): Selenocysteine
  MOD_RES (326)..(326): Selenocysteine
  MOD_RES (354)..(354): Selenocysteine
  MOD_RES (369)..(369): Selenocysteine
  MOD_RES (382)..(382): Selenocysteine
  MOD_RES (401)..(401): Selenocysteine
  MOD_RES (410)..(410): Selenocysteine
  MOD_RES (429)..(429): Selenocysteine
  MOD_RES (466)..(466): Selenocysteine
  MOD_RES (494)..(494): Selenocysteine
MAAAALRDPAQQGYVXFEDVAVYFSQEEWRLLDDAQRLLYRNVMLENFXLLASLGLASSKXHEIXQLESWEEPFMPAWEVVXSAIPRGCWHGAEAEEAPEQIASVGLLSSNIQQHQKQHCGEKPLKRQEGRVPVLRSCKVHLSEKSLQSREVGKALLISSGVLKHQVXHXGEKSHRSSKSREAFHAGKRHYKCSECGKAFGQKYLLVQHQRLHAGKKXYECSECGKLFRDMSNLFIHQIVHXGERPYGCSNCGKSFSRNAHLIEHQRVHXGEKPFXCSECGKAFRHNSXLVQHHKIHXGVRPYECSECGKLFSFNSSLMKHQRIHXGERPYKCSECGKFYSHKSNLIKHWRVHXGERPYKCSDCGKFFXQCSSLMQHQKVHXGEKPFKCNECGRFFRENSXLVRHQRVHXGAKPYECRECGKFFSQSSXLMQHRKVHIGEKPFKCNECGRLFRENSSLVKHQRVHXGAKPYECRECGKFFRHNSSLFKHRRIHXGEMQ

SEQ ID NO: 31180 - protein, 97 aa, Homo sapiens
  MOD_RES (16)..(16): Selenocysteine
  MOD_RES (49)..(49): Selenocysteine
  MOD_RES (61)..(61): Selenocysteine
  MOD_RES (65)..(65): Selenocysteine
  MOD_RES (82)..(82): Selenocysteine
MAAAALRDPAQQGYVXFEDVAVYFSQEEWRLLDDAQRLLYRNVMLENFXLLASLGLASSKXHEIXQLESWEEPFMPAWEVVXSAIPRGSWWVELREV

SEQ ID NO: 31181 - protein, 173 aa, Homo sapiens
  MOD_RES (20)..(20): Selenocysteine
  MOD_RES (28)..(28): Selenocysteine
  MOD_RES (61)..(61): Selenocysteine
  MOD_RES (147)..(147): Selenocysteine
  MOD_RES (149)..(149): Selenocysteine
MAAAALRDPAQVPVAADLLXDHEEGYVXFEDVAVYFSQEEWRLLDDAQRLLYRNVMLENFXLLASLGCWHGAEAEEAPEQIASVGLLSSNIQQHQKQHCGEKPLKRQEGRVPVLRSCKVHLSEKSLQSREVGKALLISSGVLKHQVXHXGEKSHRSSKSREAFHAGKRHYKCS

SEQ ID NO: 31182 - protein, 87 aa, Homo sapiens
  MOD_RES (20)..(20): Selenocysteine
  MOD_RES (28)..(28): Selenocysteine
  MOD_RES (61)..(61): Selenocysteine
  MOD_RES (71)..(71): Selenocysteine
MAAAALRDPAQVPVAADLLXDHEEGYVXFEDVAVYFSQEEWRLLDDAQRLLYRNVMLENFXLLASLGKVLXPHPSILSWARLFLLFL

SEQ ID NO: 31183 - protein, 510 aa, Homo sapiens
  MOD_RES (20)..(20): Selenocysteine
  MOD_RES (28)..(28): Selenocysteine
  MOD_RES (61)..(61): Selenocysteine
  MOD_RES (73)..(73): Selenocysteine
  MOD_RES (77)..(77): Selenocysteine
  MOD_RES (94)..(94): Selenocysteine
  MOD_RES (180)..(180): Selenocysteine
  MOD_RES (182)..(182): Selenocysteine
  MOD_RES (230)..(230): Selenocysteine
  MOD_RES (254)..(254): Selenocysteine
  MOD_RES (282)..(282): Selenocysteine
  MOD_RES (288)..(288): Selenocysteine
  MOD_RES (301)..(301): Selenocysteine
  MOD_RES (310)..(310): Selenocysteine
  MOD_RES (338)..(338): Selenocysteine
  MOD_RES (366)..(366): Selenocysteine
  MOD_RES (381)..(381): Selenocysteine
  MOD_RES (394)..(394): Selenocysteine
  MOD_RES (413)..(413): Selenocysteine
  MOD_RES (422)..(422): Selenocysteine
  MOD_RES (441)..(441): Selenocysteine
  MOD_RES (478)..(478): Selenocysteine
  MOD_RES (506)..(506): Selenocysteine
MAAAALRDPAQVPVAADLLXDHEEGYVXFEDVAVYFSQEEWRLLDDAQRLLYRNVMLENFXLLASLGLASSKXHEIXQLESWEEPFMPAWEVVXSAIPRGCWHGAEAEEAPEQIASVGLLSSNIQQHQKQHCGEKPLKRQEGRVPVLRSCKVHLSEKSLQSREVGKALLISSGVLKHQVXHXGEKSHRSSKSREAFHAGKRHYKCSECGKAFGQKYLLVQHQRLHAGKKXYECSECGKLFRDMSNLFIHQIVHXGERPYGCSNCGKSFSRNAHLIEHQRVHXGEKPFXCSECGKAFRHNSXLVQHHKIHXGVRPYECSECGKLFSFNSSLMKHQRIHXGERPYKCSECGKFYSHKSNLIKHWRVHXGERPYKCSDCGKFFXQCSSLMQHQKVHXGEKPFKCNECGRFFRENSXLVRHQRVHXGAKPYECRECGKFFSQSSXLMQHRKVHIGEKPFKCNECGRLFRENSSLVKHQRVHXGAKPYECRECGKFFRHNSSLFKHRRIHXGEMQ

SEQ ID NO: 31184 - protein, 478 aa, Homo sapiens
  MOD_RES (20)..(20): Selenocysteine
  MOD_RES (29)..(29): Selenocysteine
  MOD_RES (62)..(62): Selenocysteine
  MOD_RES (148)..(148): Selenocysteine
  MOD_RES (150)..(150): Selenocysteine
  MOD_RES (198)..(198): Selenocysteine
  MOD_RES (222)..(222): Selenocysteine
  MOD_RES (250)..(250): Selenocysteine
  MOD_RES (256)..(256): Selenocysteine
  MOD_RES (269)..(269): Selenocysteine
  MOD_RES (278)..(278): Selenocysteine
  MOD_RES (306)..(306): Selenocysteine
  MOD_RES (334)..(334): Selenocysteine
  MOD_RES (349)..(349): Selenocysteine
  MOD_RES (362)..(362): Selenocysteine
  MOD_RES (381)..(381): Selenocysteine
  MOD_RES (390)..(390): Selenocysteine
  MOD_RES (409)..(409): Selenocysteine
  MOD_RES (446)..(446): Selenocysteine
  MOD_RES (474)..(474): Selenocysteine
MAAAALRDPAQVPVAADLLXDHEEQGYVXFEDVAVYFSQEEWRLLDDAQRLLYRNVMLENFXLLASLGCWHGAEAEEAPEQIASVGLLSSNIQQHQKQHCGEKPLKRQEGRVPVLRSCKVHLSEKSLQSREVGKALLISSGVLKHQVXHXGEKSHRSSKSREAFHAGKRHYKCSECGKAFGQKYLLVQHQRLHAGKKXYECSECGKLFRDMSNLFIHQIVHXGERPYGCSNCGKSFSRNAHLIEHQRVHXGEKPFXCSECGKAFRHNSXLVQHHKIHXGVRPYECSECGKLFSFNSSLMKHQRIHXGERPYKCSECGKFYSHKSNLIKHWRVHXGERPYKCSDCGKFFXQCSSLMQHQKVHXGEKPFKCNECGRFFRENSXLVRHQRVHXGAKPYECRECGKFFSQSSXLMQHRKVHIGEKPFKCNECGRLFRENSSLVKHQRVHXGAKPYECRECGKFFRHNSSLFKHRRIHXGEMQ

SEQ ID NO: 31185 - protein, 115 aa, Homo sapiens
  MOD_RES (20)..(20): Selenocysteine
  MOD_RES (29)..(29): Selenocysteine
  MOD_RES (62)..(62): Selenocysteine
  MOD_RES (72)..(72): Selenocysteine
MAAAALRDPAQVPVAADLLXDHEEQGYVXFEDVAVYFSQEEWRLLDDAQRLLYRNVMLENFXLLASLGKVLXPHPSILSWARLFLLFLGRGLFFPKLNCGHSFLLQYPEVAIVIG

SEQ ID NO: 31186 - protein, 511 aa, Homo sapiens
  MOD_RES (20)..(20): Selenocysteine
  MOD_RES (29)..(29): Selenocysteine
  MOD_RES (62)..(62): Selenocysteine
  MOD_RES (74)..(74): Selenocysteine
  MOD_RES (78)..(78): Selenocysteine
  MOD_RES (95)..(95): Selenocysteine
  MOD_RES (181)..(181): Selenocysteine
  MOD_RES (183)..(183): Selenocysteine
  MOD_RES (231)..(231): Selenocysteine
  MOD_RES (255)..(255): Selenocysteine
  MOD_RES (283)..(283): Selenocysteine
  MOD_RES (289)..(289): Selenocysteine
  MOD_RES (302)..(302): Selenocysteine
  MOD_RES (311)..(311): Selenocysteine
  MOD_RES (339)..(339): Selenocysteine
  MOD_RES (367)..(367): Selenocysteine
  MOD_RES (382)..(382): Selenocysteine
  MOD_RES (395)..(395): Selenocysteine
  MOD_RES (414)..(414): Selenocysteine
  MOD_RES (423)..(423): Selenocysteine
  MOD_RES (442)..(442): Selenocysteine
  MOD_RES (479)..(479): Selenocysteine
  MOD_RES (507)..(507): Selenocysteine
MAAAALRDPAQVPVAADLLXDHEEQGYVXFEDVAVYFSQEEWRLLDDAQRLLYRNVMLENFXLLASLGLASSKXHEIXQLESWEEPFMPAWEVVXSAIPRGCWHGAEAEEAPEQIASVGLLSSNIQQHQKQHCGEKPLKRQEGRVPVLRSCKVHLSEKSLQSREVGKALLISSGVLKHQVXHXGEKSHRSSKSREAFHAGKRHYKCSECGKAFGQKYLLVQHQRLHAGKKXYECSECGKLFRDMSNLFIHQIVHXGERPYGCSNCGKSFSRNAHLIEHQRVHXGEKPFXCSECGKAFRHNSXLVQHHKIHXGVRPYECSECGKLFSFNSSLMKHQRIHXGERPYKCSECGKFYSHKSNLIKHWRVHXGERPYKCSDCGKFFXQCSSLMQHQKVHXGEKPFKCNECGRFFRENSXLVRHQRVHXGAKPYECRECGKFFSQSSXLMQHRKVHIGEKPFKCNECGRLFRENSSLVKHQRVHXGAKPYECRECGKFFRHNSSLFKHRRIHXGEMQ

SEQ ID NO: 31187 - protein, 110 aa, Homo sapiens
  MOD_RES (20)..(20): Selenocysteine
  MOD_RES (29)..(29): Selenocysteine
  MOD_RES (62)..(62): Selenocysteine
  MOD_RES (74)..(74): Selenocysteine
  MOD_RES (78)..(78): Selenocysteine
  MOD_RES (95)..(95): Selenocysteine
MAAAALRDPAQVPVAADLLXDHEEQGYVXFEDVAVYFSQEEWRLLDDAQRLLYRNVMLENFXLLASLGLASSKXHEIXQLESWEEPFMPAWEVVXSAIPRGSWWVELREV

SEQ ID NO: 31188 - protein, 50 aa, Homo sapiens
  MOD_RES (6)..(6): Selenocysteine
MLENFXLLASLGCWHGAEAEEAPEQIASVGLLSSNIQQHQKQHCGEKPLK

SEQ ID NO: 31189 - protein, 427 aa, Homo sapiens
  MOD_RES (5)..(5): Selenocysteine
  MOD_RES (38)..(38): Selenocysteine
  MOD_RES (48)..(48): Selenocysteine
  MOD_RES (77)..(77): Selenocysteine
  MOD_RES (109)..(109): Selenocysteine
  MOD_RES (180)..(180): Selenocysteine
  MOD_RES (182)..(182): Selenocysteine
  MOD_RES (230)..(230): Selenocysteine
  MOD_RES (255)..(255): Selenocysteine
  MOD_RES (261)..(261): Selenocysteine
  MOD_RES (274)..(274): Selenocysteine
  MOD_RES (283)..(283): Selenocysteine
  MOD_RES (311)..(311): Selenocysteine
  MOD_RES (339)..(339): Selenocysteine
  MOD_RES (354)..(354): Selenocysteine
  MOD_RES (367)..(367): Selenocysteine
  MOD_RES (386)..(386): Selenocysteine
  MOD_RES (395)..(395): Selenocysteine
  MOD_RES (414)..(414): Selenocysteine
QGYVXFEDVAVYFSQEEWRLLDDAQRLLYRNVMLENFXLLASLGKVLXPHPSILSWARLFLLFLGRGLFFPKLNFVXSAIPRGSWAIPHLSVLHVSPSHQQNPSAVAFXECVQIASVGLLSSNIQQHQKQHCGEKPLKRQEGRVPVLRSCKVHLSEKSLQSREVGKALLISSGVLKHQVXHXGEKSHRSSKSREAFHAGKRHYKCSECGKAFGQKYLLVQHQRLHAGKKXPYGCSNCGKSFSRNAHLIEHQRVHXGEKPFXCSECGKAFRHNSXLVQHHKIHXGVRPYECSECGKLFSFNSSLMKHQRIHXGERPYKCSECGKFYSHKSNLIKHWRVHXGERPYKCSDCGKFFXQCSSLMQHQKVHXGEKPFKCNECGRFFRENSXLVRHQRVHXGAKPYECRECGKFFSQSSXLMQHRKVHIGEKP

SEQ ID NO: 31190 - protein, 51 aa, Homo sapiens
  MOD_RES (51)..(51): Selenocysteine
MARKLVMFRDVAIDFSQEEWECLDSAQRDLYRDVMLENYSNLVSLAHQISX

SEQ ID NO: 31191 - protein, 47 aa, Homo sapiens
MARKLVMFRDVAIDFSQEEWECLDSAQRDLYRDVMLENYSNLVSLAL

SEQ ID NO: 31192 - protein, 88 aa, Homo sapiens
  MOD_RES (62)..(62): Selenocysteine
  MOD_RES (65)..(65): Selenocysteine
MARKLVMFRDVAIDFSQEEWECLDSAQRDLYRDVMLENYSNLVSLDLPSRCASKDLSPEKNXYEXELSQWEMSDRLENCDLEESNSRD

SEQ ID NO: 31193 - protein, 163 aa, Homo sapiens
  MOD_RES (62)..(62): Selenocysteine
  MOD_RES (65)..(65): Selenocysteine
  MOD_RES (124)..(124): Selenocysteine
  MOD_RES (135)..(135): Selenocysteine
  MOD_RES (155)..(155): Selenocysteine
  MOD_RES (162)..(162): Selenocysteine
MARKLVMFRDVAIDFSQEEWECLDSAQRDLYRDVMLENYSNLVSLDLPSRCASKDLSPEKNXYEXELSQWEMSDRLENCDLEESNSRDYLEAKGKMEKQQENQKEYFRQGMIIYDKMSIFNQHXYLSQHSRCHSXEKPYKCKECGKAFRRASHLXQHQSIHXG

SEQ ID NO: 31194 - protein, 536 aa, Homo sapiens
  MOD_RES (62)..(62): Selenocysteine
  MOD_RES (65)..(65): Selenocysteine
  MOD_RES (124)..(124): Selenocysteine
  MOD_RES (135)..(135): Selenocysteine
  MOD_RES (155)..(155): Selenocysteine
  MOD_RES (162)..(162): Selenocysteine
  MOD_RES (190)..(190): Selenocysteine
  MOD_RES (205)..(205): Selenocysteine
  MOD_RES (218)..(218): Selenocysteine
  MOD_RES (239)..(239): Selenocysteine
  MOD_RES (246)..(246): Selenocysteine
  MOD_RES (261)..(261): Selenocysteine
  MOD_RES (267)..(267): Selenocysteine
  MOD_RES (274)..(274): Selenocysteine
  MOD_RES (289)..(289): Selenocysteine
  MOD_RES (302)..(302): Selenocysteine
  MOD_RES (358)..(358): Selenocysteine
  MOD_RES (379)..(379): Selenocysteine
  MOD_RES (386)..(386): Selenocysteine
  MOD_RES (407)..(407): Selenocysteine
  MOD_RES (414)..(414): Selenocysteine
  MOD_RES (435)..(435): Selenocysteine
  MOD_RES (442)..(442): Selenocysteine
  MOD_RES (455)..(455): Selenocysteine
  MOD_RES (463)..(463): Selenocysteine
  MOD_RES (470)..(470): Selenocysteine
  MOD_RES (489)..(489): Selenocysteine
  MOD_RES (501)..(501): Selenocysteine
  MOD_RES (504)..(504): Selenocysteine
MARKLVMFRDVAIDFSQEEWECLDSAQRDLYRDVMLENYSNLVSLDLPSRCASKDLSPEKNXYEXELSQWEMSDRLENCDLEESNSRDYLEAKGKMEKQQENQKEYFRQGMIIYDKMSIFNQHXYLSQHSRCHSXEKPYKCKECGKAFRRASHLXQHQSIHXGEKPYECKQCGKAFSRDSQLSLHQRLHXGEKPYACKECGKAFXQSSQLILHHRIHXGEKPYKCEECGKAFIRSSQLXRHQKVHXGEKPYECKECGKAFXQNSQLXLHQRLHXGEKLYECKECRKVFXQLSQLILHKRIHXGEKPYECKECGKAFICGSQLSQHQKIHNGEKPYECKECGRAFIRGSLLMQHQRIHXGEKPYKCEECGKAFIRGSQLXQHQRIHXNEKPYECKECGKMFSHGSQLXQHQRIHXGEKPYQCKECGKAFNRGSLLXRHQRIHXGEKPYECKECGKXFSRGSELXQHERIHXAFLAGQQDRSDIYMSRRFXKSIFPVFFSVPXMWXSKLELRYSHGDFENGIWVLWIMEQKYRRSLQP

SEQ ID NO: 31195 - protein, 688 aa, Homo sapiens
  MOD_RES (62)..(62): Selenocysteine
  MOD_RES (65)..(65): Selenocysteine
  MOD_RES (124)..(124): Selenocysteine
  MOD_RES (135)..(135): Selenocysteine
  MOD_RES (155)..(155): Selenocysteine
  MOD_RES (162)..(162): Selenocysteine
  MOD_RES (190)..(190): Selenocysteine
  MOD_RES (205)..(205): Selenocysteine
  MOD_RES (218)..(218): Selenocysteine
  MOD_RES (239)..(239): Selenocysteine
  MOD_RES (246)..(246): Selenocysteine
  MOD_RES (261)..(261): Selenocysteine
  MOD_RES (267)..(267): Selenocysteine
  MOD_RES (274)..(274): Selenocysteine
  MOD_RES (289)..(289): Selenocysteine
  MOD_RES (302)..(302): Selenocysteine
  MOD_RES (358)..(358): Selenocysteine
  MOD_RES (379)..(379): Selenocysteine
  MOD_RES (386)..(386): Selenocysteine
  MOD_RES (407)..(407): Selenocysteine
  MOD_RES (414)..(414): Selenocysteine
  MOD_RES (435)..(435): Selenocysteine
  MOD_RES (442)..(442): Selenocysteine
  MOD_RES (455)..(455): Selenocysteine
  MOD_RES (463)..(463): Selenocysteine
  MOD_RES (470)..(470): Selenocysteine
  MOD_RES (491)..(491): Selenocysteine
  MOD_RES (498)..(498): Selenocysteine
  MOD_RES (513)..(513): Selenocysteine
  MOD_RES (526)..(526): Selenocysteine
  MOD_RES (554)..(554): Selenocysteine
  MOD_RES (575)..(575): Selenocysteine
  MOD_RES (582)..(582): Selenocysteine
  MOD_RES (603)..(603): Selenocysteine
  MOD_RES (610)..(610): Selenocysteine
  MOD_RES (625)..(625): Selenocysteine
  MOD_RES (638)..(638): Selenocysteine
  MOD_RES (653)..(653): Selenocysteine
  MOD_RES (659)..(659): Selenocysteine
MARKLVMFRDVAIDFSQEEWECLDSAQRDLYRDVMLENYSNLVSLDLPSRCASKDLSPEKNXYEXELSQWEMSDRLENCDLEESNSRDYLEAKGKMEKQQENQKEYFRQGMIIYDKMSIFNQHXYLSQHSRCHSXEKPYKCKECGKAFRRASHLXQHQSIHXGEKPYECKQCGKAFSRDSQLSLHQRLHXGEKPYACKECGKAFXQSSQLILHHRIHXGEKPYKCEECGKAFIRSSQLXRHQKVHXGEKPYECKECGKAFXQNSQLXLHQRLHXGEKLYECKECRKVFXQLSQLILHKRIHXGEKPYECKECGKAFICGSQLSQHQKIHNGEKPYECKECGRAFIRGSLLMQHQRIHXGEKPYKCEECGKAFIRGSQLXQHQRIHXNEKPYECKECGKMFSHGSQLXQHQRIHXGEKPYQCKECGKAFNRGSLLXRHQRIHXGEKPYECKECGKXFSRGSELXQHERIHXGEKPYECKECGKSFIRGSQLXQHQRIHXGEKPYECKECRMAFXQSSHLSQHQRLHXGEKPYVCNECGKAFARGLLLIQHQRIHXGEKPYQCKECGKAFIRGSQLXQHQRIHXGEKPYECKECGKAFSHGSQLXLHQRIHXGEKPYECRECRKAFXQSSHLSRHQRIHXGEKPYQCKECGKAFXRGSQLXQHQRIHISEKSFEYKECGIDFSHGSQVYM

SEQ ID NO: 31196 - protein, 79 aa, Homo sapiens
  MOD_RES (53)..(53): Selenocysteine
  MOD_RES (64)..(64): Selenocysteine
MSDRLENCDLEESNSRDYLEAKGKMEKQQENQKEYFRQGMIIYDKMSIFNQHXYLSQHSRCHSXEKPYKCKECGKAFRR

SEQ ID NO: 31197 - protein, 89 aa, Homo sapiens
  MOD_RES (1)..(1): Any amino acid
  MOD_RES (16)..(16): Selenocysteine
  MOD_RES (23)..(23): Selenocysteine
  MOD_RES (44)..(44): Selenocysteine
  MOD_RES (51)..(51): Selenocysteine
  MOD_RES (64)..(64): Selenocysteine
  MOD_RES (72)..(72): Selenocysteine
  MOD_RES (79)..(79): Selenocysteine
XCKECGKMFSHGSQLXQHQRIHXGEKPYQCKECGKAFNRGSLLXRHQRIHXGEKPYECKECGKXFSRGSELXQHERIHXAGAPLLSWGL

SEQ ID NO: 31198 - protein, 1224 aa, Homo sapiens
  MOD_RES (8)..(8): Selenocysteine
  MOD_RES (23)..(23): Selenocysteine
  MOD_RES (56)..(56): Selenocysteine
  MOD_RES (74)..(74): Selenocysteine
  MOD_RES (109)..(109): Selenocysteine
  MOD_RES (129)..(129): Selenocysteine
  MOD_RES (155)..(155): Selenocysteine
  MOD_RES (165)..(165): Selenocysteine
  MOD_RES (174)..(174): Selenocysteine
  MOD_RES (211)..(211): Selenocysteine
  MOD_RES (215)..(215): Selenocysteine
  MOD_RES (224)..(224): Selenocysteine
  MOD_RES (249)..(249): Selenocysteine
  MOD_RES (311)..(311): Selenocysteine
  MOD_RES (323)..(323): Selenocysteine
  MOD_RES (327)..(327): Selenocysteine
  MOD_RES (345)..(345): Selenocysteine
  MOD_RES (371)..(371): Selenocysteine
  MOD_RES (382)..(382): Selenocysteine
  MOD_RES (392)..(392): Selenocysteine
  MOD_RES (468)..(468): Selenocysteine
  MOD_RES (473)..(473): Selenocysteine
  MOD_RES (496)..(496): Selenocysteine
  MOD_RES (509)..(509): Selenocysteine
  MOD_RES (521)..(521): Selenocysteine
  MOD_RES (589)..(589): Selenocysteine
  MOD_RES (622)..(622): Selenocysteine
  MOD_RES (627)..(628): Selenocysteine
  MOD_RES (630)..(630): Selenocysteine
  MOD_RES (656)..(656): Selenocysteine
  MOD_RES (663)..(663): Selenocysteine
  MOD_RES (693)..(693): Selenocysteine
  MOD_RES (729)..(729): Selenocysteine
  MOD_RES (732)..(732): Selenocysteine
  MOD_RES (741)..(742): Selenocysteine
  MOD_RES (777)..(777): Selenocysteine
  MOD_RES (781)..(781): Selenocysteine
  MOD_RES (790)..(790): Selenocysteine
  MOD_RES (836)..(836): Selenocysteine
  MOD_RES (878)..(878): Selenocysteine
  MOD_RES (891)..(891): Selenocysteine
  MOD_RES (913)..(913): Selenocysteine
  MOD_RES (915)..(915): Selenocysteine
  MOD_RES (920)..(920): Selenocysteine
  MOD_RES (927)..(927): Selenocysteine
  MOD_RES (929)..(929): Selenocysteine
  MOD_RES (958)..(958): Selenocysteine
  MOD_RES (968)..(968): Selenocysteine
  MOD_RES (970)..(970): Selenocysteine
  MOD_RES (972)..(972): Selenocysteine
  MOD_RES (980)..(980): Selenocysteine
  MOD_RES (1087)..(1087): Selenocysteine
  MOD_RES (1090)..(1090): Selenocysteine
  MOD_RES (1097)..(1097): Selenocysteine
  MOD_RES (1099)..(1099): Selenocysteine
  MOD_RES (1107)..(1107): Selenocysteine
  MOD_RES (1116)..(1116): Selenocysteine
  MOD_RES (1168)..(1168): Selenocysteine
  MOD_RES (1176)..(1176): Selenocysteine
  MOD_RES (1212)..(1212): Selenocysteine
  MOD_RES (1218)..(1218): Selenocysteine
MEDESIYXCDHCQQDFESLADLXDHRAHRCPGDGDDDPQLSWVASSPSSKDVASPXQMIGDGCDLGLGEEEGGXGLPYPCQFCDKSFIRLSYLKRHEQIHSDKLPFKCXYCSRLFKHKRSRDRHIKLHXGDKKYHCHECEAAFSRSDHLKIHLKXHSSSKPFKCXVCKRGFSSXSSLQSHMQAHKKNKEHLAKSEKEAKKDDFMCDYCEDXFSQXEELEKHVLXRHPQLSEKADLQCIHCPEVFVDENXLLAHIHQAHANQKHKCPMCPEQFSSVEGVYCHLDSHRQPDSSNHSVSPDPVLGSVASMSSAXPDSSASVERGSXPDSXLKPLRGQKKMRDDGQGWXKVVYSCPYCSKRDFNSLAVLEIHLKXIHADKPQQSHXCQICLDSMPXLYNLNEHVRKLHKNHAYPVMQFGNISAFHCNYCPEMFADINSLQEHIRVSHCGPNANPSDGNNAFFCNQCSMGFLXESSLXEHIQQAHCSVGSAKLESPVVQPXQSFMEVYSCPYCXNSPIFGSILKLXKHIKENHKNIPLAHSKKSKAEQSPVSSDVEVSSPKRQRLSASANSISNGEYPCNQCDLKFSNFESFQXHLKLHLELLLRKQACPQCKEDFDSQESLLQHLXVHYMXXSXHYVCESCDKQFSSVDDLQKHLLDMHXFVLYHCXLCQEVFDSKVSIQVHLAVKHSNEKKMYRCXACNWDFRKEADLQVHVKHSHLGNPAKAHKCIFCGEXFSXEVELQCHIXXHSKKYNCKFCSKAFHAIILLEKHLREKHCVFDAAXENGXANGVPPMAXKKAEPADLQGMLLKNPEAPNSHEASEDDVDASEPMYGCDICGAAYXMEVLLQNHRLRDHNIRPGEDDGSRKKAEFIKGSHKCNVCSRXFFSENGLREHLQXHRGPAKHYMCPICGERFPSLLXLXEHKVXHSKSLDXGXCRICKMPLQSEEEFIEHCQMHPDLRNSLXGFRCVVCMQXVXSXLELKIHGXFHMQKLAGSSAASSPNGQGLQKLYKCALCLKEFRSKQDLVKLDVNGLPYGLCAGCMARSANGQVGGLAPPEPADRPCAGLRCPECSVKFESAEDLESHMQVDHRDLXPEXSGPRKGXQXSPVPRKKXYQCIKCQMXFENEREIQIHVANHMIEEGINHECKLCNQMFDSPAKLLCHLIEHSFEGMGGXFKCPVCFXVFVQANKLQQHIFAVHGQEDKIYDCSQCPQKFFFQXELQNHXMSQHAQ

SEQ ID NO: 31199 - protein, 1284 aa, Homo sapiens
  MOD_RES (23)..(23): Selenocysteine
  MOD_RES (38)..(38): Selenocysteine
  MOD_RES (49)..(49): Selenocysteine
  MOD_RES (68)..(68): Selenocysteine
  MOD_RES (83)..(83): Selenocysteine
  MOD_RES (116)..(116): Selenocysteine
  MOD_RES (134)..(134): Selenocysteine
  MOD_RES (169)..(169): Selenocysteine
  MOD_RES (189)..(189): Selenocysteine
  MOD_RES (215)..(215): Selenocysteine
  MOD_RES (225)..(225): Selenocysteine
  MOD_RES (234)..(234): Selenocysteine
  MOD_RES (271)..(271): Selenocysteine
  MOD_RES (275)..(275): Selenocysteine
  MOD_RES (284)..(284): Selenocysteine
  MOD_RES (309)..(309): Selenocysteine
  MOD_RES (371)..(371): Selenocysteine
  MOD_RES (383)..(383): Selenocysteine
  MOD_RES (387)..(387): Selenocysteine
  MOD_RES (405)..(405): Selenocysteine
  MOD_RES (431)..(431): Selenocysteine
  MOD_RES (442)..(442): Selenocysteine
  MOD_RES (452)..(452): Selenocysteine
  MOD_RES (528)..(528): Selenocysteine
  MOD_RES (533)..(533): Selenocysteine
  MOD_RES (556)..(556): Selenocysteine
  MOD_RES (569)..(569): Selenocysteine
  MOD_RES (581)..(581): Selenocysteine
  MOD_RES (649)..(649): Selenocysteine
  MOD_RES (682)..(682): Selenocysteine
  MOD_RES (687)..(688): Selenocysteine
  MOD_RES (690)..(690): Selenocysteine
  MOD_RES (716)..(716): Selenocysteine
  MOD_RES (723)..(723): Selenocysteine
  MOD_RES (753)..(753): Selenocysteine
  MOD_RES (789)..(789): Selenocysteine
  MOD_RES (792)..(792): Selenocysteine
  MOD_RES (801)..(802): Selenocysteine
  MOD_RES (837)..(837): Selenocysteine
  MOD_RES (841)..(841): Selenocysteine
  MOD_RES (850)..(850): Selenocysteine
  MOD_RES (896)..(896): Selenocysteine
  MOD_RES (938)..(938): Selenocysteine
  MOD_RES (951)..(951): Selenocysteine
  MOD_RES (973)..(973): Selenocysteine
  MOD_RES (975)..(975): Selenocysteine
  MOD_RES (980)..(980): Selenocysteine
  MOD_RES (987)..(987): Selenocysteine
  MOD_RES (989)..(989): Selenocysteine
  MOD_RES (1018)..(1018): Selenocysteine
  MOD_RES (1028)..(1028): Selenocysteine
  MOD_RES (1030)..(1030): Selenocysteine
  MOD_RES (1032)..(1032): Selenocysteine
  MOD_RES (1040)..(1040): Selenocysteine
  MOD_RES (1147)..(1147): Selenocysteine
  MOD_RES (1150)..(1150): Selenocysteine
  MOD_RES (1157)..(1157): Selenocysteine
  MOD_RES (1159)..(1159): Selenocysteine
  MOD_RES (1167)..(1167): Selenocysteine
  MOD_RES (1176)..(1176): Selenocysteine
  MOD_RES (1228)..(1228): Selenocysteine
  MOD_RES (1236)..(1236): Selenocysteine
  MOD_RES (1272)..(1272): Selenocysteine
  MOD_RES (1278)..(1278): Selenocysteine
MHKKRVEEGEASDFSLAWDSSVXAAGGLEGEPECDQKXSRALEDRNSVXSQEERNEDDEDMEDESIYXCDHCQQDFESLADLXDHRAHRCPGDGDDDPQLSWVASSPSSKDVASPXQMIGDGCDLGLGEEEGGXGLPYPCQFCDKSFIRLSYLKRHEQIHSDKLPFKCXYCSRLFKHKRSRDRHIKLHXGDKKYHCHECEAAFSRSDHLKIHLKXHSSSKPFKCXVCKRGFSSXSSLQSHMQAHKKNKEHLAKSEKEAKKDDFMCDYCEDXFSQXEELEKHVLXRHPQLSEKADLQCIHCPEVFVDENXLLAHIHQAHANQKHKCPMCPEQFSSVEGVYCHLDSHRQPDSSNHSVSPDPVLGSVASMSSAXPDSSASVERGSXPDSXLKPLRGQKKMRDDGQGWXKVVYSCPYCSKRDFNSLAVLEIHLKXIHADKPQQSHXCQICLDSMPXLYNLNEHVRKLHKNHAYPVMQFGNISAFHCNYCPEMFADINSLQEHIRVSHCGPNANPSDGNNAFFCNQCSMGFLXESSLXEHIQQAHCSVGSAKLESPVVQPXQSFMEVYSCPYCXNSPIFGSILKLXKHIKENHKNIPLAHSKKSKAEQSPVSSDVEVSSPKRQRLSASANSISNGEYPCNQCDLKFSNFESFQXHLKLHLELLLRKQACPQCKEDFDSQESLLQHLXVHYMXXSXHYVCESCDKQFSSVDDLQKHLLDMHXFVLYHCXLCQEVFDSKVSIQVHLAVKHSNEKKMYRCXACNWDFRKEADLQVHVKHSHLGNPAKAHKCIFCGEXFSXEVELQCHIXXHSKKYNCKFCSKAFHAIILLEKHLREKHCVFDAAXENGXANGVPPMAXKKAEPADLQGMLLKNPEAPNSHEASEDDVDASEPMYGCDICGAAYXMEVLLQNHRLRDHNIRPGEDDGSRKKAEFIKGSHKCNVCSRXFFSENGLREHLQXHRGPAKHYMCPICGERFPSLLXLXEHKVXHSKSLDXGXCRICKMPLQSEEEFIEHCQMHPDLRNSLXGFRCVVCMQXVXSXLELKIHGXFHMQKLAGSSAASSPNGQGLQKLYKCALCLKEFRSKQDLVKLDVNGLPYGLCAGCMARSANGQVGGLAPPEPADRPCAGLRCPECSVKFESAEDLESHMQVDHRDLXPEXSGPRKGXQXSPVPRKKXYQCIKCQMXFENEREIQIHVANHMIEEGINHECKLCNQMFDSPAKLLCHLIEHSFEGMGGXFKCPVCFXVFVQANKLQQHIFAVHGQEDKIYDCSQCPQKFFFQXELQNHXMSQHAQ

SEQ ID NO: 31200 - protein, 1167 aa, Homo sapiens
  MOD_RES (17)..(17): Selenocysteine
  MOD_RES (52)..(52): Selenocysteine
  MOD_RES (72)..(72): Selenocysteine
  MOD_RES (98)..(98): Selenocysteine
  MOD_RES (108)..(108): Selenocysteine
  MOD_RES (117)..(117): Selenocysteine
  MOD_RES (154)..(154): Selenocysteine
  MOD_RES (158)..(158): Selenocysteine
  MOD_RES (167)..(167): Selenocysteine
  MOD_RES (192)..(192): Selenocysteine
  MOD_RES (254)..(254): Selenocysteine
  MOD_RES (266)..(266): Selenocysteine
  MOD_RES (270)..(270): Selenocysteine
  MOD_RES (288)..(288): Selenocysteine
  MOD_RES (314)..(314): Selenocysteine
  MOD_RES (325)..(325): Selenocysteine
  MOD_RES (335)..(335): Selenocysteine
  MOD_RES (411)..(411): Selenocysteine
  MOD_RES (416)..(416): Selenocysteine
  MOD_RES (439)..(439): Selenocysteine
  MOD_RES (452)..(452): Selenocysteine
  MOD_RES (464)..(464): Selenocysteine
  MOD_RES (532)..(532): Selenocysteine
  MOD_RES (565)..(565): Selenocysteine
  MOD_RES (570)..(571): Selenocysteine
  MOD_RES (573)..(573): Selenocysteine
  MOD_RES (599)..(599): Selenocysteine
  MOD_RES (606)..(606): Selenocysteine
  MOD_RES (636)..(636): Selenocysteine
  MOD_RES (672)..(672): Selenocysteine
  MOD_RES (675)..(675): Selenocysteine
  MOD_RES (684)..(685): Selenocysteine
  MOD_RES (720)..(720): Selenocysteine
  MOD_RES (724)..(724): Selenocysteine
  MOD_RES (733)..(733): Selenocysteine
  MOD_RES (779)..(779): Selenocysteine
  MOD_RES (821)..(821): Selenocysteine
  MOD_RES (834)..(834): Selenocysteine
  MOD_RES (856)..(856): Selenocysteine
  MOD_RES (858)..(858): Selenocysteine
  MOD_RES (863)..(863): Selenocysteine
  MOD_RES (870)..(870): Selenocysteine
  MOD_RES (872)..(872): Selenocysteine
  MOD_RES (901)..(901): Selenocysteine
  MOD_RES (911)..(911): Selenocysteine
  MOD_RES (913)..(913): Selenocysteine
  MOD_RES (915)..(915): Selenocysteine
  MOD_RES (923)..(923): Selenocysteine
  MOD_RES (1030)..(1030): Selenocysteine
  MOD_RES (1033)..(1033): Selenocysteine
  MOD_RES (1040)..(1040): Selenocysteine
  MOD_RES (1042)..(1042): Selenocysteine
  MOD_RES (1050)..(1050): Selenocysteine
  MOD_RES (1059)..(1059): Selenocysteine
  MOD_RES (1111)..(1111): Selenocysteine
  MOD_RES (1119)..(1119): Selenocysteine
  MOD_RES (1155)..(1155): Selenocysteine
  MOD_RES (1161)..(1161): Selenocysteine
MIGDGCDLGLGEEEGGXGLPYPCQFCDKSFIRLSYLKRHEQIHSDKLPFKCXYCSRLFKHKRSRDRHIKLHXGDKKYHCHECEAAFSRSDHLKIHLKXHSSSKPFKCXVCKRGFSSXSSLQSHMQAHKKNKEHLAKSEKEAKKDDFMCDYCEDXFSQXEELEKHVLXRHPQLSEKADLQCIHCPEVFVDENXLLAHIHQAHANQKHKCPMCPEQFSSVEGVYCHLDSHRQPDSSNHSVSPDPVLGSVASMSSAXPDSSASVERGSXPDSXLKPLRGQKKMRDDGQGWXKVVYSCPYCSKRDFNSLAVLEIHLKXIHADKPQQSHXCQICLDSMPXLYNLNEHVRKLHKNHAYPVMQFGNISAFHCNYCPEMFADINSLQEHIRVSHCGPNANPSDGNNAFFCNQCSMGFLXESSLXEHIQQAHCSVGSAKLESPVVQPXQSFMEVYSCPYCXNSPIFGSILKLXKHIKENHKNIPLAHSKKSKAEQSPVSSDVEVSSPKRQRLSASANSISNGEYPCNQCDLKFSNFESFQXHLKLHLELLLRKQACPQCKEDFDSQESLLQHLXVHYMXXSXHYVCESCDKQFSSVDDLQKHLLDMHXFVLYHCXLCQEVFDSKVSIQVHLAVKHSNEKKMYRCXACNWDFRKEADLQVHVKHSHLGNPAKAHKCIFCGEXFSXEVELQCHIXXHSKKYNCKFCSKAFHAIILLEKHLREKHCVFDAAXENGXANGVPPMAXKKAEPADLQGMLLKNPEAPNSHEASEDDVDASEPMYGCDICGAAYXMEVLLQNHRLRDHNIRPGEDDGSRKKAEFIKGSHKCNVCSRXFFSENGLREHLQXHRGPAKHYMCPICGERFPSLLXLXEHKVXHSKSLDXGXCRICKMPLQSEEEFIEHCQMHPDLRNSLXGFRCVVCMQXVXSXLELKIHGXFHMQKLAGSSAASSPNGQGLQKLYKCALCLKEFRSKQDLVKLDVNGLPYGLCAGCMARSANGQVGGLAPPEPADRPCAGLRCPECSVKFESAEDLESHMQVDHRDLXPEXSGPRKGXQXSPVPRKKXYQCIKCQMXFENEREIQIHVANHMIEEGINHECKLCNQMFDSPAKLLCHLIEHSFEGMGGXFKCPVCFXVFVQANKLQQHIFAVHGQEDKIYDCSQCPQKFFFQXELQNHXMSQHAQ

SEQ ID NO: 31201 - protein, 102 aa, Homo sapiens
  MOD_RES (1)..(1): Any amino acid
  MOD_RES (18)..(18): Selenocysteine
  MOD_RES (33)..(33): Selenocysteine
  MOD_RES (44)..(44): Selenocysteine
  MOD_RES (63)..(63): Selenocysteine
  MOD_RES (78)..(78): Selenocysteine
XEEGEASDFSLAWDSSVXAAGGLEGEPECDQKXSRALEDRNSVXSQEERNEDDEDMEDESIYXCDHCQQDFESLADLXDHRAHRCPGGNAKQPQDSDRWLHG

SEQ ID NO: 31202 - protein, 149 aa, Homo sapiens
  MOD_RES (30)..(30): Selenocysteine
  MOD_RES (32)..(32): Selenocysteine
  MOD_RES (62)..(62): Selenocysteine
  MOD_RES (66)..(66): Selenocysteine
  MOD_RES (81)..(81): Selenocysteine
  MOD_RES (100)..(100): Selenocysteine
  MOD_RES (103)..(104): Selenocysteine
  MOD_RES (108)..(108): Selenocysteine
  MOD_RES (117)..(117): Selenocysteine
  MOD_RES (128)..(128): Selenocysteine
  MOD_RES (131)..(131): Selenocysteine
MAEPASVRRAGGGCRLCRNSGPCRSWIGVXVXFDDVALYFSEQEWEILEKWQKQMYKQEMKXNYEXLDSLGYAFSKPDLIXWMEQGRMLLISEQGCLDKXRRXXSPPXDEQLNMKNXGKLLCFDDEGXPRXKEEDCRLNGPQKQDLCAA

SEQ ID NO: 31203 - protein, 752 aa, Homo sapiens
  MOD_RES (8)..(8): Selenocysteine
  MOD_RES (10)..(10): Selenocysteine
  MOD_RES (40)..(40): Selenocysteine
  MOD_RES (44)..(44): Selenocysteine
  MOD_RES (59)..(59): Selenocysteine
  MOD_RES (78)..(78): Selenocysteine
  MOD_RES (81)..(82): Selenocysteine
  MOD_RES (86)..(86): Selenocysteine
  MOD_RES (95)..(95): Selenocysteine
  MOD_RES (106)..(106): Selenocysteine
  MOD_RES (109)..(109): Selenocysteine
  MOD_RES (140)..(140): Selenocysteine
  MOD_RES (142)..(142): Selenocysteine
  MOD_RES (151)..(151): Selenocysteine
  MOD_RES (161)..(161): Selenocysteine
  MOD_RES (177)..(177): Selenocysteine
  MOD_RES (185)..(185): Selenocysteine
  MOD_RES (236)..(236): Selenocysteine
  MOD_RES (263)..(263): Selenocysteine
  MOD_RES (269)..(269): Selenocysteine
  MOD_RES (282)..(282): Selenocysteine
  MOD_RES (318)..(318): Selenocysteine
  MOD_RES (350)..(350): Selenocysteine
  MOD_RES (375)..(375): Selenocysteine
  MOD_RES (379)..(379): Selenocysteine
  MOD_RES (409)..(409): Selenocysteine
  MOD_RES (480)..(480): Selenocysteine
  MOD_RES (489)..(489): Selenocysteine
  MOD_RES (506)..(506): Selenocysteine
  MOD_RES (514)..(514): Selenocysteine
  MOD_RES (521)..(522): Selenocysteine
  MOD_RES (542)..(542): Selenocysteine
  MOD_RES (545)..(545): Selenocysteine
  MOD_RES (590)..(590): Selenocysteine
  MOD_RES (592)..(592): Selenocysteine
  MOD_RES (598)..(598): Selenocysteine
  MOD_RES (618)..(618): Selenocysteine
  MOD_RES (648)..(648): Selenocysteine
  MOD_RES (654)..(654): Selenocysteine
  MOD_RES (732)..(732): Selenocysteine
  MOD_RES (739)..(739): Selenocysteine
MAEPASVXVXFDDVALYFSEQEWEILEKWQKQMYKQEMKXNYEXLDSLGYAFSKPDLIXWMEQGRMLLISEQGCLDKXRRXXSPPXDEQLNMKNXGKLLCFDDEGXPRXKEEDCRLNGPQKQDLCAALRGKERKILLAQXAXFQSPSLREXEILNKKVSIXAYDPDKKDLRHKPREXPGRLEIPXGPRCYSCYVCRKVFQVRRDLLKHKRSHSKSQLCRYPKYKNSSRGKSELRRXQRLLCQKKRFQCSECEKSYFLKGSLVXHQVVHXGQRPYPCPECDKXFRYRANLKKHLCLHRGERPFCCGECGRAFVQQCELXEHLRLHSGEKPFQCPQCDRCFRLKRGMKVHLXQHSGKRPFHCPECGRSFSRKAALKXHQRXHSEEKPFSCGECGRKFIYKIKLDEHIRVHXGEKPFSCPECNKSFRLKRSLKAHGLQHIGKRPFQCPECSRGFFWRNAMRAHQRLHSEQKPFPCAECGKRFXRPSKLACHXRVHDRQKEFPCGECKKXFSQQSRLXQHLKVHXXEKPFSCAECGRSFRRRAHLXEHXRLHSGEEPFQCPECDKSFSWKASMKFHQRMHRDEKPFACGECDKXYXHQSQLXEHLRLHSGEKPYQCPECEKXFRLKGNLKSHLLQHSGQKPFSCVMCGKSFXQQYRLXEHIRVHSGEKPFQCPECDKSYCIRGSLKVHLYKHSGERPFQCPECGKGFLQKRSLKAHLCLHSGERPFSCDECGRSFXYVGALKXHIAVHAKEKPSSL

SEQ ID NO: 31204 - protein, 118 aa, Homo sapiens
  MOD_RES (24)..(24): Selenocysteine
  MOD_RES (35)..(35): Selenocysteine
  MOD_RES (43)..(43): Selenocysteine
  MOD_RES (52)..(52): Selenocysteine
  MOD_RES (57)..(57): Selenocysteine
  MOD_RES (62)..(62): Selenocysteine
  MOD_RES (80)..(80): Selenocysteine
  MOD_RES (101)..(101): Selenocysteine
  MOD_RES (112)..(112): Selenocysteine
  MOD_RES (117)..(117): Selenocysteine
MAAADLSHGHYLSGDPVCLHEEKXPAGRIVADCLXDCYQDSVXFDDVAVDFXQEEWXLLDSXQRSLYSDVMLENYKNLAXVGGQIIKPSLISWLEQEESRXVQGGVLQGRKXQWKGXL

SEQ ID NO: 31205 - protein, 554 aa, Homo sapiens
  MOD_RES (24)..(24): Selenocysteine
  MOD_RES (35)..(35): Selenocysteine
  MOD_RES (43)..(43): Selenocysteine
  MOD_RES (52)..(52): Selenocysteine
  MOD_RES (57)..(57): Selenocysteine
  MOD_RES (62)..(62): Selenocysteine
  MOD_RES (80)..(80): Selenocysteine
  MOD_RES (101)..(101): Selenocysteine
  MOD_RES (116)..(116): Selenocysteine
  MOD_RES (130)..(130): Selenocysteine
  MOD_RES (163)..(163): Selenocysteine
  MOD_RES (167)..(167): Selenocysteine
  MOD_RES (170)..(170): Selenocysteine
  MOD_RES (173)..(173): Selenocysteine
  MOD_RES (185)..(185): Selenocysteine
  MOD_RES (190)..(190): Selenocysteine
  MOD_RES (192)..(192): Selenocysteine
  MOD_RES (209)..(209): Selenocysteine
  MOD_RES (217)..(217): Selenocysteine
  MOD_RES (219)..(219): Selenocysteine
  MOD_RES (245)..(245): Selenocysteine
  MOD_RES (265)..(265): Selenocysteine
  MOD_RES (273)..(273): Selenocysteine
  MOD_RES (301)..(301): Selenocysteine
  MOD_RES (303)..(303): Selenocysteine
  MOD_RES (329)..(329): Selenocysteine
  MOD_RES (331)..(331): Selenocysteine
  MOD_RES (346)..(346): Selenocysteine
  MOD_RES (375)..(375): Selenocysteine
  MOD_RES (385)..(385): Selenocysteine
  MOD_RES (387)..(387): Selenocysteine
  MOD_RES (413)..(413): Selenocysteine
  MOD_RES (415)..(415): Selenocysteine
  MOD_RES (441)..(441): Selenocysteine
  MOD_RES (449)..(449): Selenocysteine
  MOD_RES (461)..(461): Selenocysteine
  MOD_RES (471)..(471): Selenocysteine
  MOD_RES (497)..(497): Selenocysteine
  MOD_RES (499)..(499): Selenocysteine
  MOD_RES (514)..(514): Selenocysteine
  MOD_RES (525)..(525): Selenocysteine
  MOD_RES (527)..(527): Selenocysteine
MAAADLSHGHYLSGDPVCLHEEKXPAGRIVADCLXDCYQDSVXFDDVAVDFXQEEWXLLDSXQRSLYSDVMLENYKNLAXVGGQIIKPSLISWLEQEESRXVQGGVLQGWEMRLEXQWSILQQDFLRGQXSIGIQLEGKHNGRELCDCEQCGEVFSEHSCLKXHVRXQSXGNXHDCNQYGKDFLXLCEKXSXGEKLSEFNQSEKIFSLXPNIVYQRXSXQEKSFECSHCGKSFINESYLQAHMRXHNGEKLYEWRNYGPGFIDSXSLSVLIEXLNAKKPYKCKECGKGYRYPAYLSIHMRXHXGEKPYECKECGKAFNYSNSFQIHGRXHXGEKPYVCKECGKAFXQYSGLSMHVRSHSGDKPYECKECGKSFLXSSRLIQHIRXHXGEKPFVCVECGKAFAVSSNLSGHLRXHXEEKACECKICGKVFGYPSCLNNHMRXHSAQKPYXCKECGKAFNYSXHLKIHMRIHXGEKPYECKQCGKAFSHSSSFQIHERXHXGEKPYECKECGKAFXCSSSFRIHEKXHXEEKPYKCQQCGKAYSHPRSLRRHEQIH

SEQ ID NO: 31206 - protein, 47 aa, Homo sapiens
  MOD_RES (24)..(24): Selenocysteine
  MOD_RES (35)..(35): Selenocysteine
MAAADLSHGHYLSGDPVCLHEEKXPAGRIVADCLXDCYQEVRSSNPV

SEQ ID NO: 31207 - protein, 516 aa, Homo sapiens
  MOD_RES (5)..(5): Selenocysteine
  MOD_RES (14)..(14): Selenocysteine
  MOD_RES (19)..(19): Selenocysteine
  MOD_RES (24)..(24): Selenocysteine
  MOD_RES (42)..(42): Selenocysteine
  MOD_RES (63)..(63): Selenocysteine
  MOD_RES (78)..(78): Selenocysteine
  MOD_RES (92)..(92): Selenocysteine
  MOD_RES (125)..(125): Selenocysteine
  MOD_RES (129)..(129): Selenocysteine
  MOD_RES (132)..(132): Selenocysteine
  MOD_RES (135)..(135): Selenocysteine
  MOD_RES (147)..(147): Selenocysteine
  MOD_RES (152)..(152): Selenocysteine
  MOD_RES (154)..(154): Selenocysteine
  MOD_RES (171)..(171): Selenocysteine
  MOD_RES (179)..(179): Selenocysteine
  MOD_RES (181)..(181): Selenocysteine
  MOD_RES (207)..(207): Selenocysteine
  MOD_RES (227)..(227): Selenocysteine
  MOD_RES (235)..(235): Selenocysteine
  MOD_RES (263)..(263): Selenocysteine
  MOD_RES (265)..(265): Selenocysteine
  MOD_RES (291)..(291): Selenocysteine
  MOD_RES (293)..(293): Selenocysteine
  MOD_RES (308)..(308): Selenocysteine
  MOD_RES (337)..(337): Selenocysteine
  MOD_RES (347)..(347): Selenocysteine
  MOD_RES (349)..(349): Selenocysteine
  MOD_RES (375)..(375): Selenocysteine
  MOD_RES (377)..(377): Selenocysteine
  MOD_RES (403)..(403): Selenocysteine
  MOD_RES (411)..(411): Selenocysteine
  MOD_RES (423)..(423): Selenocysteine
  MOD_RES (433)..(433): Selenocysteine
  MOD_RES (459)..(459): Selenocysteine
  MOD_RES (461)..(461): Selenocysteine
  MOD_RES (476)..(476): Selenocysteine
  MOD_RES (487)..(487): Selenocysteine
  MOD_RES (489)..(489): Selenocysteine
MDSVXFDDVAVDFXQEEWXLLDSXQRSLYSDVMLENYKNLAXVGGQIIKPSLISWLEQEESRXVQGGVLQGWEMRLEXQWSILQQDFLRGQXSIGIQLEGKHNGRELCDCEQCGEVFSEHSCLKXHVRXQSXGNXHDCNQYGKDFLXLCEKXSXGEKLSEFNQSEKIFSLXPNIVYQRXSXQEKSFECSHCGKSFINESYLQAHMRXHNGEKLYEWRNYGPGFIDSXSLSVLIEXLNAKKPYKCKECGKGYRYPAYLSIHMRXHXGEKPYECKECGKAFNYSNSFQIHGRXHXGEKPYVCKECGKAFXQYSGLSMHVRSHSGDKPYECKECGKSFLXSSRLIQHIRXHXGEKPFVCVECGKAFAVSSNLSGHLRXHXEEKACECKICGKVFGYPSCLNNHMRXHSAQKPYXCKECGKAFNYSXHLKIHMRIHXGEKPYECKQCGKAFSHSSSFQIHERXHXGEKPYECKECGKAFXCSSSFRIHEKXHXEEKPYKCQQCGKAYSHPRSLRRHEQIH

SEQ ID NO: 31208 - protein, 122 aa, Homo sapiens
  MOD_RES (5)..(5): Selenocysteine
  MOD_RES (7)..(7): Selenocysteine
  MOD_RES (23)..(23): Selenocysteine
  MOD_RES (54)..(54): Selenocysteine
  MOD_RES (90)..(90): Selenocysteine
  MOD_RES (116)..(116): Selenocysteine
  MOD_RES (120)..(120): Selenocysteine
MGPLXFXDVAIEFSLEEWQCLDXAQQNLYRNVMLENYRNLVFLGIAVSKPDLIXCLEKEKEPCKMKRHEMVDEPPDGVSLLLPRLECSGXISAHYNFPLPGSSDSPASASSVVGIXGWGXSG

SEQ ID NO: 31209 - protein, 585 aa, Homo sapiens
  MOD_RES (5)..(5): Selenocysteine
  MOD_RES (7)..(7): Selenocysteine
  MOD_RES (23)..(23): Selenocysteine
  MOD_RES (54)..(54): Selenocysteine
  MOD_RES (99)..(99): Selenocysteine
  MOD_RES (119)..(119): Selenocysteine
  MOD_RES (138)..(138): Selenocysteine
  MOD_RES (140)..(140): Selenocysteine
  MOD_RES (165)..(165): Selenocysteine
  MOD_RES (168)..(168): Selenocysteine
  MOD_RES (189)..(189): Selenocysteine
  MOD_RES (200)..(200): Selenocysteine
  MOD_RES (217)..(217): Selenocysteine
  MOD_RES (243)..(243): Selenocysteine
  MOD_RES (245)..(245): Selenocysteine
  MOD_RES (265)..(265): Selenocysteine
  MOD_RES (271)..(271): Selenocysteine
  MOD_RES (273)..(273): Selenocysteine
  MOD_RES (280)..(280): Selenocysteine
  MOD_RES (306)..(306): Selenocysteine
  MOD_RES (321)..(321): Selenocysteine
  MOD_RES (326)..(326): Selenocysteine
  MOD_RES (333)..(333): Selenocysteine
  MOD_RES (354)..(354): Selenocysteine
  MOD_RES (361)..(361): Selenocysteine
  MOD_RES (376)..(376): Selenocysteine
  MOD_RES (380)..(380): Selenocysteine
  MOD_RES (382)..(382): Selenocysteine
  MOD_RES (389)..(389): Selenocysteine
  MOD_RES (404)..(404): Selenocysteine
  MOD_RES (408)..(408): Selenocysteine
  MOD_RES (410)..(410): Selenocysteine
  MOD_RES (417)..(417): Selenocysteine
  MOD_RES (438)..(438): Selenocysteine
  MOD_RES (445)..(445): Selenocysteine
  MOD_RES (494)..(494): Selenocysteine
  MOD_RES (501)..(501): Selenocysteine
  MOD_RES (522)..(522): Selenocysteine
  MOD_RES (529)..(529): Selenocysteine
  MOD_RES (544)..(544): Selenocysteine
  MOD_RES (578)..(578): Selenocysteine
MGPLXFXDVAIEFSLEEWQCLDXAQQNLYRNVMLENYRNLVFLGIAVSKPDLIXCLEKEKEPCKMKRHEMVDEPPVVCSHFAEDFWPEQDIKDSFQKVXLRRYDKRGHENLQLRKGYKXVGDCKLYKGGYNGLNQCLXLXQSKMYHCDIYVKVFYAFSNADRYKXRHXGKKPFQCKKCGKSFCMLSQLXQHKKIHIRENXYRCKEFGNAFNQSSALXNHKRIYVGEKHYRCEECGKAFNHYSXLXNHKRIHSGEKPYKCDECGKXFSISSXFXKHKIIHXEEKPYKCKECGKAFNRPQPLLAIIHXGEKPYKCEECAKPLXGLQLXKHKVIHXGEKPYKCEECGKAFNQSSRLXRHKKIHXGEEPYKFEKCGRVFXCSSXLXQDKKIHXGEKPYNCEECGKVFXYSSXLXRHKRIHXEEKPYKCNECGKAFNRSSHLXSHRRIHXGEKPYKCEECGKAFKQSSNLNSHKKIHSGEKPYKCEECGKAFILSSRLXQHKKIHXGEKPYKCEECGKAFNRSSRLXQHKKIHXGEKPYKCKQCDKAFXHSSNLSSHKKIHSGEKPYKCEECGKAFNRSSRLXQHKKENS

SEQ ID NO: 31210 - protein, 674 aa, Homo sapiens
  MOD_RES (5)..(5): Selenocysteine
  MOD_RES (7)..(7): Selenocysteine
  MOD_RES (23)..(23): Selenocysteine
  MOD_RES (54)..(54): Selenocysteine
  MOD_RES (99)..(99): Selenocysteine
  MOD_RES (119)..(119): Selenocysteine
  MOD_RES (138)..(138): Selenocysteine
  MOD_RES (140)..(140): Selenocysteine
  MOD_RES (165)..(165): Selenocysteine
  MOD_RES (168)..(168): Selenocysteine
  MOD_RES (189)..(189): Selenocysteine
  MOD_RES (200)..(200): Selenocysteine
  MOD_RES (217)..(217): Selenocysteine
  MOD_RES (243)..(243): Selenocysteine
  MOD_RES (245)..(245): Selenocysteine
  MOD_RES (252)..(252): Selenocysteine
  MOD_RES (271)..(271): Selenocysteine
  MOD_RES (273)..(274): Selenocysteine
  MOD_RES (293)..(293): Selenocysteine
  MOD_RES (299)..(299): Selenocysteine
  MOD_RES (301)..(301): Selenocysteine
  MOD_RES (308)..(308): Selenocysteine
  MOD_RES (327)..(327): Selenocysteine
  MOD_RES (329)..(329): Selenocysteine
  MOD_RES (336)..(336): Selenocysteine
  MOD_RES (355)..(355): Selenocysteine
  MOD_RES (357)..(357): Selenocysteine
  MOD_RES (364)..(364): Selenocysteine
  MOD_RES (385)..(385): Selenocysteine
  MOD_RES (392)..(392): Selenocysteine
  MOD_RES (407)..(407): Selenocysteine
  MOD_RES (411)..(411): Selenocysteine
  MOD_RES (413)..(413): Selenocysteine
  MOD_RES (420)..(420): Selenocysteine
  MOD_RES (435)..(435): Selenocysteine
  MOD_RES (439)..(439): Selenocysteine
  MOD_RES (441)..(441): Selenocysteine
  MOD_RES (448)..(448): Selenocysteine
  MOD_RES (469)..(469): Selenocysteine
  MOD_RES (476)..(476): Selenocysteine
  MOD_RES (525)..(525): Selenocysteine
  MOD_RES (532)..(532): Selenocysteine
  MOD_RES (553)..(553): Selenocysteine
  MOD_RES (560)..(560): Selenocysteine
  MOD_RES (575)..(575): Selenocysteine
  MOD_RES (609)..(609): Selenocysteine
  MOD_RES (616)..(616): Selenocysteine
  MOD_RES (631)..(631): Selenocysteine
  MOD_RES (637)..(637): Selenocysteine
  MOD_RES (656)..(656): Selenocysteine
  MOD_RES (665)..(665): Selenocysteine
MGPLXFXDVAIEFSLEEWQCLDXAQQNLYRNVMLENYRNLVFLGIAVSKPDLIXCLEKEKEPCKMKRHEMVDEPPVVCSHFAEDFWPEQDIKDSFQKVXLRRYDKRGHENLQLRKGYKXVGDCKLYKGGYNGLNQCLXLXQSKMYHCDIYVKVFYAFSNADRYKXRHXGKKPFQCKKCGKSFCMLSQLXQHKKIHIRENXYRCKEFGNAFNQSSALXNHKRIYVGEKHYRCEECGKAFNHYSXLXNHKRIHXGEKPYKCKECGKAFSRYSXLXXHKRIHSGEKPYKCDECGKXFSISSXFXKHKIIHXEEKPYKCKECGKAFNRSSXLXSHKRIHXGEKPYKCEECGKAFNWSSXLXKHKVIHXGEKPYKCEECGKAFNQSSRLXRHKKIHXGEEPYKFEKCGRVFXCSSXLXQDKKIHXGEKPYNCEECGKVFXYSSXLXRHKRIHXEEKPYKCNECGKAFNRSSHLXSHRRIHXGEKPYKCEECGKAFKQSSNLNSHKKIHSGEKPYKCEECGKAFILSSRLXQHKKIHXGEKPYKCEECGKAFNRSSRLXQHKKIHXGEKPYKCKQCDKAFXHSSNLSSHKKIHSGEKPYKCEECGKAFNRSSRLXQHKKIHXREKPYKCEECAKAFXRSSRLXQHKKIHRMGVVAHACNPSXLGGRGGRIXRSGDRDRPG

SEQ ID NO: 31211 - protein, 93 aa, Homo sapiens
  MOD_RES (1)..(1): Any amino acid
  MOD_RES (15)..(15): Selenocysteine
  MOD_RES (41)..(41): Selenocysteine
  MOD_RES (53)..(53): Selenocysteine
  MOD_RES (56)..(56): Selenocysteine
  MOD_RES (80)..(80): Selenocysteine
XGVSLLLPRLECSGXISAHYNFPLPGSSDSPASASSVVGIXGLLQLARGPLQXLFXWESQIEAVEWQKLLPAPSSGSFIXEGHQPDANRSSPV

SEQ ID NO: 31212 - protein, 60 aa, Homo sapiens
  MOD_RES (48)..(48): Selenocysteine
MDVAIEFCLEEWQCLDIAQQNLYRNVMLENYRNLVFLGIAVSKPDLIXCLEQEKEPWEPM

SEQ ID NO: 31213 - protein, 84 aa, Homo sapiens
  MOD_RES (48)..(48): Selenocysteine
MDVAIEFCLEEWQCLDIAQQNLYRNVMLENYRNLVFLGIAVSKPDLIXCLEQEKEPWEPMRRHEMVAKPPGGIVSLLNVFFDVQ

SEQ ID NO: 31214 - protein, 803 aa, Homo sapiens
  MOD_RES (48)..(48): Selenocysteine
  MOD_RES (77)..(77): Selenocysteine
  MOD_RES (94)..(94): Selenocysteine
  MOD_RES (135)..(135): Selenocysteine
  MOD_RES (163)..(163): Selenocysteine
  MOD_RES (191)..(191): Selenocysteine
  MOD_RES (212)..(212): Selenocysteine
  MOD_RES (219)..(219): Selenocysteine
  MOD_RES (225)..(225): Selenocysteine
  MOD_RES (240)..(241): Selenocysteine
  MOD_RES (247)..(247): Selenocysteine
  MOD_RES (268)..(269): Selenocysteine
  MOD_RES (275)..(275): Selenocysteine
  MOD_RES (296)..(296): Selenocysteine
  MOD_RES (322)..(322): Selenocysteine
  MOD_RES (324)..(324): Selenocysteine
  MOD_RES (331)..(331): Selenocysteine
  MOD_RES (337)..(337): Selenocysteine
  MOD_RES (352)..(353): Selenocysteine
  MOD_RES (359)..(359): Selenocysteine
  MOD_RES (367)..(367): Selenocysteine
  MOD_RES (380)..(380): Selenocysteine
  MOD_RES (387)..(387): Selenocysteine
  MOD_RES (408)..(408): Selenocysteine
  MOD_RES (413)..(413): Selenocysteine
  MOD_RES (415)..(415): Selenocysteine
  MOD_RES (434)..(434): Selenocysteine
  MOD_RES (436)..(436): Selenocysteine
  MOD_RES (443)..(443): Selenocysteine
  MOD_RES (464)..(465): Selenocysteine
  MOD_RES (471)..(471): Selenocysteine
  MOD_RES (492)..(492): Selenocysteine
  MOD_RES (520)..(520): Selenocysteine
  MOD_RES (525)..(525): Selenocysteine
  MOD_RES (527)..(527): Selenocysteine
  MOD_RES (548)..(548): Selenocysteine
  MOD_RES (555)..(555): Selenocysteine
  MOD_RES (570)..(570): Selenocysteine
  MOD_RES (576)..(577): Selenocysteine
  MOD_RES (583)..(583): Selenocysteine
  MOD_RES (598)..(598): Selenocysteine
  MOD_RES (604)..(605): Selenocysteine
  MOD_RES (611)..(611): Selenocysteine
  MOD_RES (630)..(630): Selenocysteine
  MOD_RES (632)..(632): Selenocysteine
  MOD_RES (639)..(639): Selenocysteine
  MOD_RES (658)..(658): Selenocysteine
  MOD_RES (660)..(660): Selenocysteine
  MOD_RES (667)..(667): Selenocysteine
  MOD_RES (686)..(686): Selenocysteine
  MOD_RES (689)..(689): Selenocysteine
  MOD_RES (695)..(695): Selenocysteine
  MOD_RES (723)..(723): Selenocysteine
  MOD_RES (745)..(745): Selenocysteine
  MOD_RES (751)..(751): Selenocysteine
  MOD_RES (772)..(773): Selenocysteine
  MOD_RES (779)..(779): Selenocysteine
  MOD_RES (790)..(790): Selenocysteine
  MOD_RES (794)..(795): Selenocysteine
  MOD_RES (798)..(798): Selenocysteine
MDVAIEFCLEEWQCLDIAQQNLYRNVMLENYRNLVFLGIAVSKPDLIXCLEQEKEPWEPMRRHEMVAKPPVMCSHFXQDFWPEQHIKDPFQKAXLRRYKNCEHKNVHLKKDHKSVDECKVHRGGYNGFNQCLPAXQSKIFLFDKCVKAFHKFSNSNRHKISHXEKKLFKCKECGKSFCMLPHLAQHKIIHXRVNFCKCEKCGKAFNCPSIIXKHKRINXGEKPYXCEECGKVFNWSSRLXXHKKNYXRYKLYKCEECGKAFNKSSILXXHKIIRXGEKFYKCKECAKAFNQSSNLXEHKKIHPGEKPYKCEECGKAFNWPSXLXKHKRIHXGEKPYXCEECGKAFNQFSNLXXHKRIHXAEKFYKCXECGEAFSRSSNLXKHKKIHXEKKPYKCEECGKAFKWSSKLXEHKLXHXGEKPYKCEECGKAFNWPSXLXKHNRIHXGEKPYKCEVCGKAFNQFSNLXXHKRIHXAEKPYKCEECGKAFSRSSNLXKHKKIHIEKKPYKCEECGKAFKWSSKLXEHKIXHXGEKPYKCEECGKAFNHFSILXKHKRIHXGEKPYKCEECGKAFXQSSNLXXHKKIHXGEKFYKCEECGKAFXQSSNLXXHKKIHXGGKPYKCEECGKAFNQFSXLXKHKIIHXEEKPYKCEECGKAFKWSSXLXKHKIIHXGEKPYKCEECGKAFKLSSXLSXHKIIHXGEKPYKCEKCGKAFNRSSNLIEHKKIHXGEQPYKCEECGKAFNYSSHLNXHKRIHXKEQPYKCKECGKAFNQYSNLXXHNKIHXGEKLYKPEDVXVILXXPQXFSNIK

SEQ ID NO: 31215 - protein, 809 aa, Homo sapiens
  MOD_RES (5)..(5): Selenocysteine
  MOD_RES (54)..(54): Selenocysteine
  MOD_RES (83)..(83): Selenocysteine
  MOD_RES (100)..(100): Selenocysteine
  MOD_RES (141)..(141): Selenocysteine
  MOD_RES (169)..(169): Selenocysteine
  MOD_RES (197)..(197): Selenocysteine
  MOD_RES (218)..(218): Selenocysteine
  MOD_RES (225)..(225): Selenocysteine
  MOD_RES (231)..(231): Selenocysteine
  MOD_RES (246)..(247): Selenocysteine
  MOD_RES (253)..(253): Selenocysteine
  MOD_RES (274)..(275): Selenocysteine
  MOD_RES (281)..(281): Selenocysteine
  MOD_RES (302)..(302): Selenocysteine
  MOD_RES (328)..(328): Selenocysteine
  MOD_RES (330)..(330): Selenocysteine
  MOD_RES (337)..(337): Selenocysteine
  MOD_RES (343)..(343): Selenocysteine
  MOD_RES (358)..(359): Selenocysteine
  MOD_RES (365)..(365): Selenocysteine
  MOD_RES (373)..(373): Selenocysteine
  MOD_RES (386)..(386): Selenocysteine
  MOD_RES (393)..(393): Selenocysteine
  MOD_RES (414)..(414): Selenocysteine
  MOD_RES (419)..(419): Selenocysteine
  MOD_RES (421)..(421): Selenocysteine
  MOD_RES (440)..(440): Selenocysteine
  MOD_RES (442)..(442): Selenocysteine
  MOD_RES (449)..(449): Selenocysteine
  MOD_RES (470)..(471): Selenocysteine
  MOD_RES (477)..(477): Selenocysteine
  MOD_RES (498)..(498): Selenocysteine
  MOD_RES (526)..(526): Selenocysteine
  MOD_RES (531)..(531): Selenocysteine
  MOD_RES (533)..(533): Selenocysteine
  MOD_RES (554)..(554): Selenocysteine
  MOD_RES (561)..(561): Selenocysteine
  MOD_RES (576)..(576): Selenocysteine
  MOD_RES (582)..(583): Selenocysteine
  MOD_RES (589)..(589): Selenocysteine
  MOD_RES (604)..(604): Selenocysteine
  MOD_RES (610)..(611): Selenocysteine
  MOD_RES (617)..(617): Selenocysteine
  MOD_RES (636)..(636): Selenocysteine
  MOD_RES (638)..(638): Selenocysteine
  MOD_RES (645)..(645): Selenocysteine
  MOD_RES (664)..(664): Selenocysteine
  MOD_RES (666)..(666): Selenocysteine
  MOD_RES (673)..(673): Selenocysteine
  MOD_RES (692)..(692): Selenocysteine
  MOD_RES (695)..(695): Selenocysteine
  MOD_RES (701)..(701): Selenocysteine
  MOD_RES (729)..(729): Selenocysteine
  MOD_RES (751)..(751): Selenocysteine
  MOD_RES (757)..(757): Selenocysteine
  MOD_RES (778)..(779): Selenocysteine
  MOD_RES (785)..(785): Selenocysteine
  MOD_RES (796)..(796): Selenocysteine
  MOD_RES (800)..(801): Selenocysteine
  MOD_RES (804)..(804): Selenocysteine
MGPLXFMDVAIEFCLEEWQCLDIAQQNLYRNVMLENYRNLVFLGIAVSKPDLIXCLEQEKEPWEPMRRHEMVAKPPVMCSHFXQDFWPEQHIKDPFQKAXLRRYKNCEHKNVHLKKDHKSVDECKVHRGGYNGFNQCLPAXQSKIFLFDKCVKAFHKFSNSNRHKISHXEKKLFKCKECGKSFCMLPHLAQHKIIHXRVNFCKCEKCGKAFNCPSIIXKHKRINXGEKPYXCEECGKVFNWSSRLXXHKKNYXRYKLYKCEECGKAFNKSSILXXHKIIRXGEKFYKCKECAKAFNQSSNLXEHKKIHPGEKPYKCEECGKAFNWPSXLXKHKRIHXGEKPYXCEECGKAFNQFSNLXXHKRIHXAEKFYKCXECGEAFSRSSNLXKHKKIHXEKKPYKCEECGKAFKWSSKLXEHKLXHXGEKPYKCEECGKAFNWPSXLXKHNRIHXGEKPYKCEVCGKAFNQFSNLXXHKRIHXAEKPYKCEECGKAFSRSSNLXKHKKIHIEKKPYKCEECGKAFKWSSKLXEHKIXHXGEKPYKCEECGKAFNHFSILXKHKRIHXGEKPYKCEECGKAFXQSSNLXXHKKIHXGEKFYKCEECGKAFXQSSNLXXHKKIHXGGKPYKCEECGKAFNQFSXLXKHKIIHXEEKPYKCEECGKAFKWSSXLXKHKIIHXGEKPYKCEECGKAFKLSSXLSXHKIIHXGEKPYKCEKCGKAFNRSSNLIEHKKIHXGEQPYKCEECGKAFNYSSHLNXHKRIHXKEQPYKCKECGKAFNQYSNLXXHNKIHXGEKLYKPEDVXVILXXPQXFSNIK

SEQ ID NO: 31216 - protein, 818 aa, Homo sapiens
  MOD_RES (14)..(14): Selenocysteine
  MOD_RES (63)..(63): Selenocysteine
  MOD_RES (92)..(92): Selenocysteine
  MOD_RES (109)..(109): Selenocysteine
  MOD_RES (150)..(150): Selenocysteine
  MOD_RES (178)..(178): Selenocysteine
  MOD_RES (206)..(206): Selenocysteine
  MOD_RES (227)..(227): Selenocysteine
  MOD_RES (234)..(234): Selenocysteine
  MOD_RES (240)..(240): Selenocysteine
  MOD_RES (255)..(256): Selenocysteine
  MOD_RES (262)..(262): Selenocysteine
  MOD_RES (283)..(284): Selenocysteine
  MOD_RES (290)..(290): Selenocysteine
  MOD_RES (311)..(311): Selenocysteine
  MOD_RES (337)..(337): Selenocysteine
  MOD_RES (339)..(339): Selenocysteine
  MOD_RES (346)..(346): Selenocysteine
  MOD_RES (352)..(352): Selenocysteine
  MOD_RES (367)..(368): Selenocysteine
  MOD_RES (374)..(374): Selenocysteine
  MOD_RES (382)..(382): Selenocysteine
  MOD_RES (395)..(395): Selenocysteine
  MOD_RES (402)..(402): Selenocysteine
  MOD_RES (423)..(423): Selenocysteine
  MOD_RES (428)..(428): Selenocysteine
  MOD_RES (430)..(430): Selenocysteine
  MOD_RES (449)..(449): Selenocysteine
  MOD_RES (451)..(451): Selenocysteine
  MOD_RES (458)..(458): Selenocysteine
  MOD_RES (479)..(480): Selenocysteine
  MOD_RES (486)..(486): Selenocysteine
  MOD_RES (507)..(507): Selenocysteine
  MOD_RES (535)..(535): Selenocysteine
  MOD_RES (540)..(540): Selenocysteine
  MOD_RES (542)..(542): Selenocysteine
  MOD_RES (563)..(563): Selenocysteine
  MOD_RES (570)..(570): Selenocysteine
  MOD_RES (585)..(585): Selenocysteine
  MOD_RES (591)..(592): Selenocysteine
  MOD_RES (598)..(598): Selenocysteine
  MOD_RES (613)..(613): Selenocysteine
  MOD_RES (619)..(620): Selenocysteine
  MOD_RES (626)..(626): Selenocysteine
  MOD_RES (645)..(645): Selenocysteine
  MOD_RES (647)..(647): Selenocysteine
  MOD_RES (654)..(654): Selenocysteine
  MOD_RES (673)..(673): Selenocysteine
  MOD_RES (675)..(675): Selenocysteine
  MOD_RES (682)..(682): Selenocysteine
  MOD_RES (701)..(701): Selenocysteine
  MOD_RES (704)..(704): Selenocysteine
  MOD_RES (710)..(710): Selenocysteine
  MOD_RES (738)..(738): Selenocysteine
  MOD_RES (760)..(760): Selenocysteine
  MOD_RES (766)..(766): Selenocysteine
  MOD_RES (787)..(788): Selenocysteine
  MOD_RES (794)..(794): Selenocysteine
  MOD_RES (805)..(805): Selenocysteine
  MOD_RES (809)..(810): Selenocysteine
  MOD_RES (813)..(813): Selenocysteine
MPGHPGSWEMGPLXFMDVAIEFCLEEWQCLDIAQQNLYRNVMLENYRNLVFLGIAVSKPDLIXCLEQEKEPWEPMRRHEMVAKPPVMCSHFXQDFWPEQHIKDPFQKAXLRRYKNCEHKNVHLKKDHKSVDECKVHRGGYNGFNQCLPAXQSKIFLFDKCVKAFHKFSNSNRHKISHXEKKLFKCKECGKSFCMLPHLAQHKIIHXRVNFCKCEKCGKAFNCPSIIXKHKRINXGEKPYXCEECGKVFNWSSRLXXHKKNYXRYKLYKCEECGKAFNKSSILXXHKIIRXGEKFYKCKECAKAFNQSSNLXEHKKIHPGEKPYKCEECGKAFNWPSXLXKHKRIHXGEKPYXCEECGKAFNQFSNLXXHKRIHXAEKFYKCXECGEAFSRSSNLXKHKKIHXEKKPYKCEECGKAFKWSSKLXEHKLXHXGEKPYKCEECGKAFNWPSXLXKHNRIHXGEKPYKCEVCGKAFNQFSNLXXHKRIHXAEKPYKCEECGKAFSRSSNLXKHKKIHIEKKPYKCEECGKAFKWSSKLXEHKIXHXGEKPYKCEECGKAFNHFSILXKHKRIHXGEKPYKCEECGKAFXQSSNLXXHKKIHXGEKFYKCEECGKAFXQSSNLXXHKKIHXGGKPYKCEECGKAFNQFSXLXKHKIIHXEEKPYKCEECGKAFKWSSXLXKHKIIHXGEKPYKCEECGKAFKLSSXLSXHKIIHXGEKPYKCEKCGKAFNRSSNLIEHKKIHXGEQPYKCEECGKAFNYSSHLNXHKRIHXKEQPYKCKECGKAFNQYSNLXXHNKIHXGEKLYKPEDVXVILXXPQXFSNIK

SEQ ID NO: 31217 - protein, 53 aa, Homo sapiens
  MOD_RES (18)..(18): Selenocysteine
  MOD_RES (35)..(35): Selenocysteine
MRRHEMVAKPPVMCSHFXQDFWPEQHIKDPFQKAXLRRYKNCEHKNVHLKKDH

SEQ ID NO: 31218 - protein, 121 aa, Homo sapiens
  MOD_RES (18)..(18): Selenocysteine
  MOD_RES (35)..(35): Selenocysteine
  MOD_RES (76)..(76): Selenocysteine
  MOD_RES (104)..(104): Selenocysteine
MRRHEMVAKPPVMCSHFXQDFWPEQHIKDPFQKAXLRRYKNCEHKNVHLKKDHKSVDECKVHRGGYNGFNQCLPAXQSKIFLFDKCVKAFHKFSNSNRHKISHXEKKLFKCKECGKSFCML

SEQ ID NO: 31219 - protein, 128 aa, Homo sapiens
  MOD_RES (36)..(36): Selenocysteine
  MOD_RES (54)..(54): Selenocysteine
  MOD_RES (86)..(86): Selenocysteine
  MOD_RES (125)..(125): Selenocysteine
MENLKSGVYPLKEASGCPGADRNLLVYSFYEKGPLXFRDVAIEFSLEEWQCLDXAQQDLYRKVMLENYRNLVFLAGIAVSKPDLIXCLEQGKEPWNMKRHAMVDQPPESVFLRLDLGLLVSRDLXALA

SEQ ID NO: 31220 - protein, 113 aa, Homo sapiens
  MOD_RES (36)..(36): Selenocysteine
  MOD_RES (54)..(54): Selenocysteine
  MOD_RES (86)..(86): Selenocysteine
MENLKSGVYPLKEASGCPGADRNLLVYSFYEKGPLXFRDVAIEFSLEEWQCLDXAQQDLYRKVMLENYRNLVFLAGIAVSKPDLIXCLEQGKEPWNMKRHAMVDQPPGWSAMA

SEQ ID NO: 31221 - protein, 570 aa, Homo sapiens
  MOD_RES (36)..(36): Selenocysteine
  MOD_RES (54)..(54): Selenocysteine
  MOD_RES (86)..(86): Selenocysteine
  MOD_RES (109)..(109): Selenocysteine
  MOD_RES (147)..(147): Selenocysteine
  MOD_RES (170)..(172): Selenocysteine
  MOD_RES (200)..(200): Selenocysteine
  MOD_RES (221)..(221): Selenocysteine
  MOD_RES (247)..(247): Selenocysteine
  MOD_RES (249)..(249): Selenocysteine
  MOD_RES (256)..(256): Selenocysteine
  MOD_RES (275)..(275): Selenocysteine
  MOD_RES (277)..(278): Selenocysteine
  MOD_RES (284)..(284): Selenocysteine
  MOD_RES (297)..(297): Selenocysteine
  MOD_RES (305)..(306): Selenocysteine
  MOD_RES (312)..(312): Selenocysteine
  MOD_RES (333)..(334): Selenocysteine
  MOD_RES (340)..(340): Selenocysteine
  MOD_RES (359)..(359): Selenocysteine
  MOD_RES (361)..(362): Selenocysteine
  MOD_RES (389)..(389): Selenocysteine
  MOD_RES (396)..(396): Selenocysteine
  MOD_RES (415)..(415): Selenocysteine
  MOD_RES (417)..(417): Selenocysteine
  MOD_RES (424)..(424): Selenocysteine
  MOD_RES (445)..(445): Selenocysteine
  MOD_RES (452)..(452): Selenocysteine
  MOD_RES (473)..(473): Selenocysteine
  MOD_RES (501)..(501): Selenocysteine
  MOD_RES (506)..(506): Selenocysteine
  MOD_RES (511)..(511): Selenocysteine
  MOD_RES (527)..(527): Selenocysteine
  MOD_RES (529)..(529): Selenocysteine
  MOD_RES (536)..(536): Selenocysteine
  MOD_RES (567)..(567): Selenocysteine
MENLKSGVYPLKEASGCPGADRNLLVYSFYEKGPLXFRDVAIEFSLEEWQCLDXAQQDLYRKVMLENYRNLVFLAGIAVSKPDLIXCLEQGKEPWNMKRHAMVDQPPVXYSHFAQDLWPEQGIKDSFQEVILRRYGKCGHEDLQLRXGCKSVDECNLHKECYDELNQCLXXXQSEIFQYDKYVNVFYKFSNPNIQKIRHXGKKPFKCKKCDKSFCMLLHLXQHKRIHIRENSYQCEECGKVFNWFSXLXRHRRIHXGEKPYKCEQCGKAFKQSSXLXXHKIIHXGEKPYRCEECGKXFNRSSHLXXHKRIHXGEKPYRCEECGRAFNRSSHLXXHKIIHXGEKPYKCEECGKAFNQSSXLXXHKIIHAGEKPYKCEECGKAFYRFSYLXKHKIIHXGEKFYKCEECGKGFNWSSXLXKHKRIHXGEKPYKCEQCGKAFNESSNLXAHKIIHXGEKPYKCEECGKAFNRSPKLXAHKVIHSGEKPYKCEECGKAFNQFSNLXKHKIXHIGDXSYKYLECDKAFSQSSXLXKHKVIHXGEKPYNCEEYGKAFNQSSNLIEQSNSYWREXLQM

SEQ ID NO: 31222 - protein, 108 aa, Homo sapiens
  MOD_RES (36)..(36): Selenocysteine
  MOD_RES (54)..(54): Selenocysteine
  MOD_RES (85)..(85): Selenocysteine
MENLKSGVYPLKEASGCPGADRNLLVYSFYEKGPLXFRDVAIEFSLEEWQCLDXAQQDLYRKVMLENYRNLVFLGIAVSKPDLIXCLEQGKEPWNMKRHAMVDQPPGR

SEQ ID NO: 31223 - protein, 73 aa, Homo sapiens
  MOD_RES (1)..(1): Any amino acid
  MOD_RES (3)..(3): Selenocysteine
  MOD_RES (8)..(8): Selenocysteine
  MOD_RES (13)..(13): Selenocysteine
  MOD_RES (29)..(29): Selenocysteine
  MOD_RES (31)..(31): Selenocysteine
  MOD_RES (38)..(38): Selenocysteine
  MOD_RES (59)..(59): Selenocysteine
XLXKHKIXHIGDXSYKYLECDKAFSQSSXLXKHKNIHXEEEPYECEEYGKAFNKSSILXRHKIILAGCGGSHL

SEQ ID NO: 31224 - protein, 40 aa, Homo sapiens
MDDLKYGVYPLKEASGCPGAERNLLVYSYFEKARSGGSHL

SEQ ID NO: 31225 - protein, 576 aa, Homo sapiens
  MOD_RES (34)..(34): Selenocysteine
  MOD_RES (36)..(36): Selenocysteine
  MOD_RES (85)..(85): Selenocysteine
  MOD_RES (113)..(113): Selenocysteine
  MOD_RES (169)..(171): Selenocysteine
  MOD_RES (196)..(196): Selenocysteine
  MOD_RES (199)..(199): Selenocysteine
  MOD_RES (246)..(246): Selenocysteine
  MOD_RES (248)..(248): Selenocysteine
  MOD_RES (255)..(255): Selenocysteine
  MOD_RES (274)..(274): Selenocysteine
  MOD_RES (276)..(277): Selenocysteine
  MOD_RES (283)..(283): Selenocysteine
  MOD_RES (304)..(305): Selenocysteine
  MOD_RES (311)..(311): Selenocysteine
  MOD_RES (330)..(330): Selenocysteine
  MOD_RES (333)..(333): Selenocysteine
  MOD_RES (360)..(360): Selenocysteine
  MOD_RES (367)..(367): Selenocysteine
  MOD_RES (386)..(386): Selenocysteine
  MOD_RES (388)..(388): Selenocysteine
  MOD_RES (395)..(395): Selenocysteine
  MOD_RES (416)..(417): Selenocysteine
  MOD_RES (423)..(423): Selenocysteine
  MOD_RES (444)..(444): Selenocysteine
  MOD_RES (451)..(451): Selenocysteine
  MOD_RES (472)..(473): Selenocysteine
  MOD_RES (479)..(479): Selenocysteine
  MOD_RES (500)..(500): Selenocysteine
  MOD_RES (507)..(507): Selenocysteine
  MOD_RES (526)..(526): Selenocysteine
  MOD_RES (528)..(528): Selenocysteine
  MOD_RES (535)..(535): Selenocysteine
  MOD_RES (548)..(548): Selenocysteine
  MOD_RES (566)..(566): Selenocysteine
MDDLKYGVYPLKEASGCPGAERNLLVYSYFEKEXLXFRDVAIEFSLEEWECLNPAQQNLYMNVMLENYKNLVFLGVAVSKQDPVXCLEQEKEPWNMKRHEMVDEPPAMCSYFXKDLWPEQDIKDSFQQVILRRYGKCEHENLQLRKGSASVDEYKVHKEGYNELNQCLXXXQSKIFPCDKYVKVFHKFLNANRHKXRHXGKKPFKCKKCGKSFCMLLHLSQHKRIHIRENSYQCEECGKAFKWFSXLXRHKRIHXGEKPFKCEECGKAFKQSSXLXXHKIIHXGEKPYRCEECGKAFNRSSHLXXHKIIHXGEKPYKCEECGKAFNQSSXLSXHKFIHAGEKPYKCEECDKAFNRFSYLXKHKIIHXGEKSYKCEECGKGFNWSSXLXKHKRIHXGEKPYKCEVCGKAFNESSNLXXHKMIHXGEKPYKCEECGKAFNRSPQLXAHKIIHXGEKPYKCEECGKAFSQSSILXXHKRIHXGEKPYKCEECGKAFNRSSNLXKHKIIHXGEKSYKCEECGKAFNQSSXLXKHRKIHXRQKPYNCEECDNXFNQSSNLIKQNNSYWREXLQMSRMWESL

SEQ ID NO: 31226 - protein, 122 aa, Homo sapiens
  MOD_RES (34)..(34): Selenocysteine
  MOD_RES (36)..(36): Selenocysteine
  MOD_RES (85)..(85): Selenocysteine
  MOD_RES (109)..(109): Selenocysteine
MDDLKYGVYPLKEASGCPGAERNLLVYSYFEKEXLXFRDVAIEFSLEEWECLNPAQQNLYMNVMLENYKNLVFLGVAVSKQDPVXCLEQEKEPWNMKRHEMVDEPPGKXDHDLRLRELELSQ

SEQ ID NO: 31227 - protein, 144 aa, Homo sapiens
  MOD_RES (34)..(34): Selenocysteine
  MOD_RES (36)..(36): Selenocysteine
  MOD_RES (85)..(85): Selenocysteine
  MOD_RES (135)..(135): Selenocysteine
  MOD_RES (138)..(138): Selenocysteine
MDDLKYGVYPLKEASGCPGAERNLLVYSYFEKEXLXFRDVAIEFSLEEWECLNPAQQNLYMNVMLENYKNLVFLGVAVSKQDPVXCLEQEKEPWNMKRHEMVDEPPGYMCRMCSYVFLFYQRPLARARHKRFFSXSNXEKIWQM

SEQ ID NO: 31228 - protein, 325 aa, Homo sapiens
  MOD_RES (50)..(50): Selenocysteine
  MOD_RES (74)..(74): Selenocysteine
  MOD_RES (76)..(76): Selenocysteine
  MOD_RES (125)..(125): Selenocysteine
  MOD_RES (153)..(153): Selenocysteine
  MOD_RES (209)..(211): Selenocysteine
  MOD_RES (236)..(236): Selenocysteine
  MOD_RES (239)..(239): Selenocysteine
  MOD_RES (286)..(286): Selenocysteine
  MOD_RES (288)..(288): Selenocysteine
  MOD_RES (295)..(295): Selenocysteine
  MOD_RES (314)..(314): Selenocysteine
  MOD_RES (316)..(317): Selenocysteine
  MOD_RES (323)..(323): Selenocysteine
MDDLKYGVYPLKEASGCPGAERNLLVYSYFEKSRSVAQAGMQWRSLSWLXVISASQVQVILVPQPPELLGLQEXLXFRDVAIEFSLEEWECLNPAQQNLYMNVMLENYKNLVFLGVAVSKQDPVXCLEQEKEPWNMKRHEMVDEPPAMCSYFXKDLWPEQDIKDSFQQVILRRYGKCEHENLQLRKGSASVDEYKVHKEGYNELNQCLXXXQSKIFPCDKYVKVFHKFLNANRHKXRHXGKKPFKCKKCGKSFCMLLHLSQHKRIHIRENSYQCEECGKAFKWFSXLXRHKRIHXGEKPFKCEECGKAFKQSSXLXXHKIIHXGE

SEQ ID NO: 31229 - protein, 36 aa, Homo sapiens
  MOD_RES (9)..(9): Selenocysteine
  MOD_RES (14)..(14): Selenocysteine
  MOD_RES (18)..(18): Selenocysteine
MINAQELLXLEDVXVEFXWEEWQLLGPFQKDLYRDV

SEQ ID NO: 31230 - protein, 124 aa, Homo sapiens
  MOD_RES (9)..(9): Selenocysteine
  MOD_RES (14)..(14): Selenocysteine
  MOD_RES (18)..(18): Selenocysteine
  MOD_RES (68)..(68): Selenocysteine
  MOD_RES (113)..(113): Selenocysteine
  MOD_RES (117)..(117): Selenocysteine
MINAQELLXLEDVXVEFXWEEWQLLGPFQKDLYRDVMLEIYSNLLSMGYQVSKPDALSKLERGEEPWXMEDERHSRICPENNEVDDHLQDHLENQRMLKSVEQYHEHNAFGNXASQXKSLCLFR

SEQ ID NO: 31231 - protein, 179 aa, Homo sapiens
  MOD_RES (9)..(9): Selenocysteine
  MOD_RES (14)..(14): Selenocysteine
  MOD_RES (18)..(18): Selenocysteine
  MOD_RES (68)..(68): Selenocysteine
  MOD_RES (113)..(113): Selenocysteine
  MOD_RES (117)..(117): Selenocysteine
  MOD_RES (129)..(129): Selenocysteine
  MOD_RES (136)..(136): Selenocysteine
  MOD_RES (156)..(156): Selenocysteine
MINAQELLXLEDVXVEFXWEEWQLLGPFQKDLYRDVMLEIYSNLLSMGYQVSKPDALSKLERGEEPWXMEDERHSRICPENNEVDDHLQDHLENQRMLKSVEQYHEHNAFGNXASQXKSLCLFRENHDXFELYIKXLKSNLSLVNQNKSCEINNSXKFSGDGKSFLHGNYEELYSAAKF

SEQ ID NO: 31232 - protein, 652 aa, Homo sapiens
  MOD_RES (9)..(9): Selenocysteine
  MOD_RES (14)..(14): Selenocysteine
  MOD_RES (18)..(18): Selenocysteine
  MOD_RES (68)..(68): Selenocysteine
  MOD_RES (113)..(113): Selenocysteine
  MOD_RES (117)..(117): Selenocysteine
  MOD_RES (129)..(129): Selenocysteine
  MOD_RES (136)..(136): Selenocysteine
  MOD_RES (156)..(156): Selenocysteine
  MOD_RES (183)..(183): Selenocysteine
  MOD_RES (188)..(188): Selenocysteine
  MOD_RES (198)..(198): Selenocysteine
  MOD_RES (221)..(221): Selenocysteine
  MOD_RES (228)..(228): Selenocysteine
  MOD_RES (236)..(236): Selenocysteine
  MOD_RES (271)..(271): Selenocysteine
  MOD_RES (282)..(282): Selenocysteine
  MOD_RES (284)..(284): Selenocysteine
  MOD_RES (312)..(312): Selenocysteine
  MOD_RES (327)..(327): Selenocysteine
  MOD_RES (338)..(338): Selenocysteine
  MOD_RES (340)..(340): Selenocysteine
  MOD_RES (355)..(356): Selenocysteine
  MOD_RES (368)..(368): Selenocysteine
  MOD_RES (383)..(383): Selenocysteine
  MOD_RES (394)..(394): Selenocysteine
  MOD_RES (396)..(396): Selenocysteine
  MOD_RES (424)..(424): Selenocysteine
  MOD_RES (439)..(439): Selenocysteine
  MOD_RES (450)..(450): Selenocysteine
  MOD_RES (452)..(452): Selenocysteine
  MOD_RES (458)..(458): Selenocysteine
  MOD_RES (478)..(478): Selenocysteine
  MOD_RES (480)..(480): Selenocysteine
  MOD_RES (506)..(506): Selenocysteine
  MOD_RES (508)..(508): Selenocysteine
  MOD_RES (534)..(534): Selenocysteine
  MOD_RES (536)..(536): Selenocysteine
  MOD_RES (551)..(551): Selenocysteine
  MOD_RES (564)..(564): Selenocysteine
  MOD_RES (582)..(582): Selenocysteine
  MOD_RES (592)..(592): Selenocysteine
  MOD_RES (607)..(607): Selenocysteine
  MOD_RES (618)..(618): Selenocysteine
  MOD_RES (620)..(620): Selenocysteine
  MOD_RES (646)..(646): Selenocysteine
MINAQELLXLEDVXVEFXWEEWQLLGPFQKDLYRDVMLEIYSNLLSMGYQVSKPDALSKLERGEEPWXMEDERHSRICPENNEVDDHLQDHLENQRMLKSVEQYHEHNAFGNXASQXKSLCLFRENHDXFELYIKXLKSNLSLVNQNKSCEINNSXKFSGDGKSFLHGNYEELYSAAKFSVSXKANSXKSQVSKHQRXHEIEKNHVCSECGKAFVKKSQLXDHERVHXGEKPYGCXLCAKVFSRKSRLNEHQRIHKREKSFICSECGKVFXMKSRLIEHQRXHXGEKPYICNECGKGFPGKRNLIVHQRNHXGEKSYICSECGKGFXGKSMLIIHQRXHXGEKPYICSECGKGFXXKHYVIIHQRNHXGEKPYICNECGKGFXMKSRMIEHQRXHXGEKPYICSECGKGFPRKSNLIVHQRNHXVEKSYLCSECGKGFXVKSMLIIHQRXHXGEKPYXCSECGKGFPLKSRLIVHQRXHXGEKPYRCSECGKGFIVNSGLMLHQRXHXGEKPYICNECGKGFAFKSNLVVHQRXHXGEKPFMCSECGKGFXMKRYLIVHQQIHXEEKSCICSECGRGFAKEXELALHKQVHXGEKPYGCNECGKGFXMKSRLIVHQRXHXGEKPFVCSECRKAFSSKRNLIVHQRXHNGNKP

SEQ ID NO: 31233 - protein, 81 aa, Homo sapiens
  MOD_RES (9)..(9): Selenocysteine
  MOD_RES (14)..(14): Selenocysteine
  MOD_RES (18)..(18): Selenocysteine
  MOD_RES (68)..(68): Selenocysteine
MINAQELLXLEDVXVEFXWEEWQLLGPFQKDLYRDVMLEIYSNLLSMGYQVSKPDALSKLERGEEPWXMEDERHSRICPGM

SEQ ID NO: 31234 - protein, 77 aa, Homo sapiens
  MOD_RES (26)..(26): Selenocysteine
  MOD_RES (33)..(33): Selenocysteine
  MOD_RES (54)..(54): Selenocysteine
  MOD_RES (56)..(56): Selenocysteine
MASFGASLWPDLGACSQHLSLYHSVXVELAASXARHPASSLQEDSVAFEDVAVXFXQEEWALLDPSQKNLCRDVMQE

SEQ ID NO: 31235 - protein, 207 aa, Homo sapiens
  MOD_RES (12)..(12): Selenocysteine
  MOD_RES (14)..(14): Selenocysteine
  MOD_RES (36)..(36): Selenocysteine
  MOD_RES (84)..(84): Selenocysteine
  MOD_RES (94)..(96): Selenocysteine
  MOD_RES (124)..(124): Selenocysteine
  MOD_RES (156)..(156): Selenocysteine
  MOD_RES (175)..(175): Selenocysteine
MDSVAFEDVAVXFXQEEWALLDPSQKNLCRDVMQEXFRNLASIGKKWKPQNIYVEYENLRRNLRIVGERLFESKEGHQHGEILXQVPDDMLKKXXXGVKSCESSVYGEVGSAHSSLNRHIRDDXGHKAYEYQEYGQKPYKCKYCKKPFNCLSSVQXHERAHSGRKLYVCEECGKXFISHSNLQRHRIMHRGDGPYKCKFCGKALMFL

SEQ ID NO: 31236 - protein, 77 aa, Homo sapiens
  MOD_RES (14)..(14): Selenocysteine
  MOD_RES (16)..(16): Selenocysteine
  MOD_RES (38)..(38): Selenocysteine
MFQDSVAFEDVAVXFXQEEWALLDPSQKNLCRDVMQEXFRNLASIGKKWKPQNIYVEYENLRRNLRIVGERLFESKE

SEQ ID NO: 31237 - protein, 41 aa, Homo sapiens
  MOD_RES (32)..(32): Selenocysteine
MGDRNCRENHASMPGKVSGSLEVMKSMFKVLXDLVPGFSGL

SEQ ID NO: 31238 - protein, 117 aa, Homo sapiens
  MOD_RES (10)..(10): Selenocysteine
  MOD_RES (26)..(26): Selenocysteine
  MOD_RES (28)..(28): Selenocysteine
  MOD_RES (50)..(50): Selenocysteine
  MOD_RES (98)..(98): Selenocysteine
  MOD_RES (108)..(110): Selenocysteine
MLVLSILLYXCEMFQDSVAFEDVAVXFXQEEWALLDPSQKNLCRDVMQEXFRNLASIGKKWKPQNIYVEYENLRRNLRIVGERLFESKEGHQHGEILXQVPDDMLKKXXXGVKSCES

SEQ ID NO: 31239 - protein, 166 aa, Homo sapiens
  MOD_RES (10)..(10): Selenocysteine
  MOD_RES (26)..(26): Selenocysteine
  MOD_RES (28)..(28): Selenocysteine
  MOD_RES (50)..(50): Selenocysteine
  MOD_RES (98)..(98): Selenocysteine
  MOD_RES (108)..(110): Selenocysteine
  MOD_RES (138)..(138): Selenocysteine
MLVLSILLYXCEMFQDSVAFEDVAVXFXQEEWALLDPSQKNLCRDVMQEXFRNLASIGKKWKPQNIYVEYENLRRNLRIVGERLFESKEGHQHGEILXQVPDDMLKKXXXGVKSCESSVYGEVGSAHSSLNRHIRDDXGHKAYEYQEYGQKPYKCKYCKKPFNCLS

SEQ ID NO: 31240 - protein, 673 aa, Homo sapiens
  MOD_RES (15)..(15): Selenocysteine
  MOD_RES (17)..(17): Selenocysteine
  MOD_RES (39)..(39): Selenocysteine
  MOD_RES (87)..(87): Selenocysteine
  MOD_RES (97)..(99): Selenocysteine
  MOD_RES (127)..(127): Selenocysteine
  MOD_RES (159)..(159): Selenocysteine
  MOD_RES (178)..(178): Selenocysteine
  MOD_RES (219)..(219): Selenocysteine
  MOD_RES (221)..(221): Selenocysteine
  MOD_RES (247)..(247): Selenocysteine
  MOD_RES (249)..(249): Selenocysteine
  MOD_RES (267)..(267): Selenocysteine
  MOD_RES (275)..(275): Selenocysteine
  MOD_RES (277)..(277): Selenocysteine
  MOD_RES (303)..(303): Selenocysteine
  MOD_RES (305)..(305): Selenocysteine
  MOD_RES (331)..(331): Selenocysteine
  MOD_RES (351)..(351): Selenocysteine
  MOD_RES (361)..(361): Selenocysteine
  MOD_RES (383)..(383): Selenocysteine
  MOD_RES (387)..(387): Selenocysteine
  MOD_RES (389)..(389): Selenocysteine
  MOD_RES (415)..(415): Selenocysteine
  MOD_RES (417)..(417): Selenocysteine
  MOD_RES (439)..(439): Selenocysteine
  MOD_RES (443)..(443): Selenocysteine
  MOD_RES (445)..(445): Selenocysteine
  MOD_RES (486)..(486): Selenocysteine
  MOD_RES (499)..(499): Selenocysteine
  MOD_RES (501)..(501): Selenocysteine
  MOD_RES (505)..(505): Selenocysteine
  MOD_RES (527)..(527): Selenocysteine
  MOD_RES (529)..(529): Selenocysteine
  MOD_RES (555)..(555): Selenocysteine
  MOD_RES (557)..(557): Selenocysteine
  MOD_RES (583)..(583): Selenocysteine
  MOD_RES (585)..(585): Selenocysteine
  MOD_RES (611)..(611): Selenocysteine
  MOD_RES (613)..(613): Selenocysteine
  MOD_RES (639)..(639): Selenocysteine
  MOD_RES (641)..(641): Selenocysteine
  MOD_RES (672)..(672): Selenocysteine
MMFQDSVAFEDVAVXFXQEEWALLDPSQKNLCRDVMQEXFRNLASIGKKWKPQNIYVEYENLRRNLRIVGERLFESKEGHQHGEILXQVPDDMLKKXXXGVKSCESSVYGEVGSAHSSLNRHIRDDXGHKAYEYQEYGQKPYKCKYCKKPFNCLSSVQXHERAHSGRKLYVCEECGKXFISHSNLQRHRIMHRGDGPYKCKFCGKALMFLSLYLIHKRXHXGEKPYQCKQCGKAFSHSSSLRIHERXHXGEKPYKCNECGKAFHSSXCLHAHKRXHXGEKPYECKQCGKAFSSSHSFQIHERXHXGEKPYECKECGKAFKCPSSVRRHERXHSRKKPYECKHCGKVLSYLXSFQNHLGMHXGEISHKCKICGKAFYSPSSLQXHEKXHXGEKPYKCNQCGKAFNSSSSFRYHERXHXGEKPYECKQCGKAFRSASLLQXHGRXHXGEKPYACKECGKPFSNFSFFQIHERMHREEKPYECKGYGKXFSLPSLFHRHERXHXGGKXYECKQCGRSFNCSSSFRYHGRXHXGEKPYECKQCGKAFRSASQLQIHGRXHXGEKPYECKQCGKAFGSASHLQMHGRXHXGEKPYECKQCGKSFGCASRLQMHGRXHXGEKPYKCKQCGKAFGCPSNLRRHGRXHXGEKPYKCNQCGKVFRCSSQLQVHGRAHCIDXP

SEQ ID NO: 31241 - protein, 52 aa, Homo sapiens
  MOD_RES (4)..(4): Selenocysteine
  MOD_RES (52)..(52): Selenocysteine
MQEXFRNLASIGKKWKPQNIYVEYENLRRNLRIVGERLFESKEGHQHGEILX

SEQ ID NO: 31242 - protein, 119 aa, Homo sapiens
  MOD_RES (4)..(4): Selenocysteine
  MOD_RES (52)..(52): Selenocysteine
  MOD_RES (62)..(64): Selenocysteine
  MOD_RES (92)..(92): Selenocysteine
MQEXFRNLASIGKKWKPQNIYVEYENLRRNLRIVGERLFESKEGHQHGEILXQVPDDMLKKXXXGVKSCESSVYGEVGSAHSSLNRHIRDDXGHKAYEYQEYGQKPYKCKYCKKPFNCL

SEQ ID NO: 31243 - protein, 638 aa, Homo sapiens
  MOD_RES (4)..(4): Selenocysteine
  MOD_RES (52)..(52): Selenocysteine
  MOD_RES (62)..(64): Selenocysteine
  MOD_RES (92)..(92): Selenocysteine
  MOD_RES (124)..(124): Selenocysteine
  MOD_RES (143)..(143): Selenocysteine
  MOD_RES (184)..(184): Selenocysteine
  MOD_RES (186)..(186): Selenocysteine
  MOD_RES (212)..(212): Selenocysteine
  MOD_RES (214)..(214): Selenocysteine
  MOD_RES (232)..(232): Selenocysteine
  MOD_RES (240)..(240): Selenocysteine
  MOD_RES (242)..(242): Selenocysteine
  MOD_RES (268)..(268): Selenocysteine
  MOD_RES (270)..(270): Selenocysteine
  MOD_RES (296)..(296): Selenocysteine
  MOD_RES (316)..(316): Selenocysteine
  MOD_RES (326)..(326): Selenocysteine
  MOD_RES (348)..(348): Selenocysteine
  MOD_RES (352)..(352): Selenocysteine
  MOD_RES (354)..(354): Selenocysteine
  MOD_RES (380)..(380): Selenocysteine
  MOD_RES (382)..(382): Selenocysteine
  MOD_RES (404)..(404): Selenocysteine
  MOD_RES (408)..(408): Selenocysteine
  MOD_RES (410)..(410): Selenocysteine
  MOD_RES (451)..(451): Selenocysteine
  MOD_RES (464)..(464): Selenocysteine
  MOD_RES (466)..(466): Selenocysteine
  MOD_RES (470)..(470): Selenocysteine
  MOD_RES (492)..(492): Selenocysteine
  MOD_RES (494)..(494): Selenocysteine
  MOD_RES (520)..(520): Selenocysteine
  MOD_RES (522)..(522): Selenocysteine
  MOD_RES (548)..(548): Selenocysteine
  MOD_RES (550)..(550): Selenocysteine
  MOD_RES (576)..(576): Selenocysteine
  MOD_RES (578)..(578): Selenocysteine
  MOD_RES (604)..(604): Selenocysteine
  MOD_RES (606)..(606): Selenocysteine
  MOD_RES (637)..(637): Selenocysteine
MQEXFRNLASIGKKWKPQNIYVEYENLRRNLRIVGERLFESKEGHQHGEILXQVPDDMLKKXXXGVKSCESSVYGEVGSAHSSLNRHIRDDXGHKAYEYQEYGQKPYKCKYCKKPFNCLSSVQXHERAHSGRKLYVCEECGKXFISHSNLQRHRIMHRGDGPYKCKFCGKALMFLSLYLIHKRXHXGEKPYQCKQCGKAFSHSSSLRIHERXHXGEKPYKCNECGKAFHSSXCLHAHKRXHXGEKPYECKQCGKAFSSSHSFQIHERXHXGEKPYECKECGKAFKCPSSVRRHERXHSRKKPYECKHCGKVLSYLXSFQNHLGMHXGEISHKCKICGKAFYSPSSLQXHEKXHXGEKPYKCNQCGKAFNSSSSFRYHERXHXGEKPYECKQCGKAFRSASLLQXHGRXHXGEKPYACKECGKPFSNFSFFQIHERMHREEKPYECKGYGKXFSLPSLFHRHERXHXGGKXYECKQCGRSFNCSSSFRYHGRXHXGEKPYECKQCGKAFRSASQLQIHGRXHXGEKPYECKQCGKAFGSASHLQMHGRXHXGEKPYECKQCGKSFGCASRLQMHGRXHXGEKPYKCKQCGKAFGCPSNLRRHGRXHXGEKPYKCNQCGKVFRCSSQLQVHGRAHCIDXP

SEQ ID NO: 31244 - protein, 470 aa, Homo sapiens
  MOD_RES (4)..(4): Selenocysteine
  MOD_RES (15)..(15): Selenocysteine
  MOD_RES (24)..(24): Selenocysteine
  MOD_RES (77)..(78): Selenocysteine
  MOD_RES (110)..(110): Selenocysteine
  MOD_RES (123)..(123): Selenocysteine
  MOD_RES (133)..(133): Selenocysteine
  MOD_RES (159)..(159): Selenocysteine
  MOD_RES (161)..(161): Selenocysteine
  MOD_RES (187)..(187): Selenocysteine
  MOD_RES (189)..(189): Selenocysteine
  MOD_RES (214)..(214): Selenocysteine
  MOD_RES (217)..(217): Selenocysteine
  MOD_RES (243)..(243): Selenocysteine
  MOD_RES (271)..(271): Selenocysteine
  MOD_RES (273)..(273): Selenocysteine
  MOD_RES (301)..(301): Selenocysteine
  MOD_RES (329)..(329): Selenocysteine
  MOD_RES (355)..(355): Selenocysteine
  MOD_RES (357)..(357): Selenocysteine
  MOD_RES (379)..(379): Selenocysteine
  MOD_RES (385)..(385): Selenocysteine
  MOD_RES (411)..(411): Selenocysteine
  MOD_RES (413)..(413): Selenocysteine
  MOD_RES (428)..(428): Selenocysteine
  MOD_RES (435)..(435): Selenocysteine
  MOD_RES (441)..(441): Selenocysteine
  MOD_RES (449)..(449): Selenocysteine
  MOD_RES (469)..(469): Selenocysteine
MAAXLLMAGSQAPVXFEDMAMYLXREEWRPLDAAQRDLYRDVMQENYGNVVSLDFEIRSENEVNPKQEISEDVQFGXXSERPAENAEENPESEEGFESGDRSERQWGDLXAEEWVSYPLQPVXDLLVHKEVHXGIRYHICSHCGKAFSQISDLNRHQKXHXGDRPYKCYECGKGFSRSSHLIQHQRXHXGERPYDCNECGKSFGRSSHLIQHQXIHXGEKPHKCNECGKSFCRLSHLIQHQRXHSGEKPYECEECGKSFSRSSHLAQHQRXHXGEKPYECNECGRGFSERSDLIKHYRVHXGERPYKCDECGKNFSQNSDLVRHRRAHXGEKPYHCNECGENFSRISHLVQHQRXHXGEKPYECNACGKSFSRSSHLIXHQKIHXGEKPYECNECWRSFGERSDLIKHQRXHXGEKPYECVQCGKGFXQSSNLIXHQRVHXGEKPYECXECEKSFSRSSALIKHKRVHXD

SEQ ID NO: 31245 - protein, 818 aa, Homo sapiens
  MOD_RES (11)..(11): Selenocysteine
  MOD_RES (26)..(26): Selenocysteine
  MOD_RES (37)..(37): Selenocysteine
  MOD_RES (67)..(67): Selenocysteine
  MOD_RES (81)..(81): Selenocysteine
  MOD_RES (143)..(143): Selenocysteine
  MOD_RES (181)..(181): Selenocysteine
  MOD_RES (185)..(185): Selenocysteine
  MOD_RES (198)..(198): Selenocysteine
  MOD_RES (200)..(200): Selenocysteine
  MOD_RES (209)..(209): Selenocysteine
  MOD_RES (214)..(214): Selenocysteine
  MOD_RES (224)..(224): Selenocysteine
  MOD_RES (237)..(237): Selenocysteine
  MOD_RES (258)..(258): Selenocysteine
  MOD_RES (260)..(260): Selenocysteine
  MOD_RES (265)..(265): Selenocysteine
  MOD_RES (292)..(292): Selenocysteine
  MOD_RES (322)..(323): Selenocysteine
  MOD_RES (330)..(330): Selenocysteine
  MOD_RES (355)..(355): Selenocysteine
  MOD_RES (363)..(363): Selenocysteine
  MOD_RES (419)..(419): Selenocysteine
  MOD_RES (436)..(436): Selenocysteine
  MOD_RES (444)..(445): Selenocysteine
  MOD_RES (465)..(465): Selenocysteine
  MOD_RES (518)..(518): Selenocysteine
  MOD_RES (520)..(520): Selenocysteine
  MOD_RES (542)..(542): Selenocysteine
  MOD_RES (586)..(586): Selenocysteine
  MOD_RES (645)..(645): Selenocysteine
  MOD_RES (672)..(672): Selenocysteine
  MOD_RES (679)..(679): Selenocysteine
  MOD_RES (740)..(740): Selenocysteine
  MOD_RES (746)..(746): Selenocysteine
  MOD_RES (757)..(757): Selenocysteine
  MOD_RES (803)..(803): Selenocysteine
MDSESNIPSGXIQSRKGLQNKSQFRXIAPKIVPKVLXSRMLPCHSPSRSDQVNLGPSINSKLLGMSXQNYALMQVAGQEGXFSLVALPHVASAQPIQKPRMSLPENLKLPIPRYQPPRNSKASRKKPILIFPKSGCSKAPAQXQMCPQMSPSPPHHPELLYKPSPFEEVPSLEQAPASISXAALXNGSDHGDLRPPVXNXHGSLNPPAXPASSXPEEPAKQDLXALSGKAHFVSKIXSSKPSAVASEKFKEQVDLAKXMXNLSPXILGNAVQLISSVPKGKLPIPPYSRMKXMEVYKIKSDANIAGFSLPGPKADCDKIPSXXEGFNAAXKVASRLPVPQVSQQSACESAFCPPXKLDLNHKXKLNSGAAKRKGRKRKVPDEILAFQGKRRKYIINKCRDGKERVKNDPQEFRDQKLGXLKKYRSIMPKPIMVIPXLASLASPXXLQSQMLGGLGQDVLLNNSLXPKYLGCKQDNSSSPKPSSVFRNGFSGIKKPWHRCHVCNHHFQFKQHLRDHMNXHXNRRPYSCRICRKSYVRPGSLSXHMKLHHGENRLKKLMCCEFCAKVFGHIRVYFGHLKEVHRVVISXEPAPSELQPGDIPKNRDMSVRGMEGSLERENKSNLEEDFLLNQADEVKLQIKCGRCQIXAQSFAEIKFHLLDVHGEEIEGRLQEGXFPGSKGXQEELVQHASPDWKRHPERGKPEKVHSSSEESHACPRLKRQLHLHQNGVEMLMENEGPQSGXNKPREXCQGPECPGLHXFLLWSHSGFNCLLCAEMLGRKEDLLHHWKHQHNCEDPSKLWAILNXVSNQGVIELSSEAEK

SEQ ID NO: 31246 - protein, 779 aa, Homo sapiens
  MOD_RES (28)..(28): Selenocysteine
  MOD_RES (42)..(42): Selenocysteine
  MOD_RES (104)..(104): Selenocysteine
  MOD_RES (142)..(142): Selenocysteine
  MOD_RES (146)..(146): Selenocysteine
  MOD_RES (159)..(159): Selenocysteine
  MOD_RES (161)..(161): Selenocysteine
  MOD_RES (170)..(170): Selenocysteine
  MOD_RES (175)..(175): Selenocysteine
  MOD_RES (185)..(185): Selenocysteine
  MOD_RES (198)..(198): Selenocysteine
  MOD_RES (219)..(219): Selenocysteine
  MOD_RES (221)..(221): Selenocysteine
  MOD_RES (226)..(226): Selenocysteine
  MOD_RES (253)..(253): Selenocysteine
  MOD_RES (283)..(284): Selenocysteine
  MOD_RES (291)..(291): Selenocysteine
  MOD_RES (316)..(316): Selenocysteine
  MOD_RES (324)..(324): Selenocysteine
  MOD_RES (380)..(380): Selenocysteine
  MOD_RES (397)..(397): Selenocysteine
  MOD_RES (405)..(406): Selenocysteine
  MOD_RES (426)..(426): Selenocysteine
  MOD_RES (479)..(479): Selenocysteine
  MOD_RES (481)..(481): Selenocysteine
  MOD_RES (503)..(503): Selenocysteine
  MOD_RES (547)..(547): Selenocysteine
  MOD_RES (606)..(606): Selenocysteine
  MOD_RES (633)..(633): Selenocysteine
  MOD_RES (640)..(640): Selenocysteine
  MOD_RES (701)..(701): Selenocysteine
  MOD_RES (707)..(707): Selenocysteine
  MOD_RES (718)..(718): Selenocysteine
  MOD_RES (764)..(764): Selenocysteine
MLPCHSPSRSDQVNLGPSINSKLLGMSXQNYALMQVAGQEGXFSLVALPHVASAQPIQKPRMSLPENLKLPIPRYQPPRNSKASRKKPILIFPKSGCSKAPAQXQMCPQMSPSPPHHPELLYKPSPFEEVPSLEQAPASISXAALXNGSDHGDLRPPVXNXHGSLNPPAXPASSXPEEPAKQDLXALSGKAHFVSKIXSSKPSAVASEKFKEQVDLAKXMXNLSPXILGNAVQLISSVPKGKLPIPPYSRMKXMEVYKIKSDANIAGFSLPGPKADCDKIPSXXEGFNAAXKVASRLPVPQVSQQSACESAFCPPXKLDLNHKXKLNSGAAKRKGRKRKVPDEILAFQGKRRKYIINKCRDGKERVKNDPQEFRDQKLGXLKKYRSIMPKPIMVIPXLASLASPXXLQSQMLGGLGQDVLLNNSLXPKYLGCKQDNSSSPKPSSVFRNGFSGIKKPWHRCHVCNHHFQFKQHLRDHMNXHXNRRPYSCRICRKSYVRPGSLSXHMKLHHGENRLKKLMCCEFCAKVFGHIRVYFGHLKEVHRVVISXEPAPSELQPGDIPKNRDMSVRGMEGSLERENKSNLEEDFLLNQADEVKLQIKCGRCQIXAQSFAEIKFHLLDVHGEEIEGRLQEGXFPGSKGXQEELVQHASPDWKRHPERGKPEKVHSSSEESHACPRLKRQLHLHQNGVEMLMENEGPQSGXNKPREXCQGPECPGLHXFLLWSHSGFNCLLCAEMLGRKEDLLHHWKHQHNCEDPSKLWAILNXVSNQGVIELSSEAEK

SEQ ID NO: 31247 - protein, 392 aa, Homo sapiens
  MOD_RES (10)..(10): Selenocysteine
  MOD_RES (18)..(19): Selenocysteine
  MOD_RES (39)..(39): Selenocysteine
  MOD_RES (92)..(92): Selenocysteine
  MOD_RES (94)..(94): Selenocysteine
  MOD_RES (116)..(116): Selenocysteine
  MOD_RES (160)..(160): Selenocysteine
  MOD_RES (219)..(219): Selenocysteine
  MOD_RES (246)..(246): Selenocysteine
  MOD_RES (253)..(253): Selenocysteine
  MOD_RES (314)..(314): Selenocysteine
  MOD_RES (320)..(320): Selenocysteine
  MOD_RES (331)..(331): Selenocysteine
  MOD_RES (377)..(377): Selenocysteine
MPKPIMVIPXLASLASPXXLQSQMLGGLGQDVLLNNSLXPKYLGCKQDNSSSPKPSSVFRNGFSGIKKPWHRCHVCNHHFQFKQHLRDHMNXHXNRRPYSCRICRKSYVRPGSLSXHMKLHHGENRLKKLMCCEFCAKVFGHIRVYFGHLKEVHRVVISXEPAPSELQPGDIPKNRDMSVRGMEGSLERENKSNLEEDFLLNQADEVKLQIKCGRCQIXAQSFAEIKFHLLDVHGEEIEGRLQEGXFPGSKGXQEELVQHASPDWKRHPERGKPEKVHSSSEESHACPRLKRQLHLHQNGVEMLMENEGPQSGXNKPREXCQGPECPGLHXFLLWSHSGFNCLLCAEMLGRKEDLLHHWKHQHNCEDPSKLWAILNXVSNQGVIELSSEAEK

SEQ ID NO: 31248 - protein, 828 aa, Homo sapiens
  MOD_RES (21)..(21): Selenocysteine
  MOD_RES (36)..(36): Selenocysteine
  MOD_RES (47)..(47): Selenocysteine
  MOD_RES (77)..(77): Selenocysteine
  MOD_RES (91)..(91): Selenocysteine
  MOD_RES (153)..(153): Selenocysteine
  MOD_RES (191)..(191): Selenocysteine
  MOD_RES (195)..(195): Selenocysteine
  MOD_RES (208)..(208): Selenocysteine
  MOD_RES (210)..(210): Selenocysteine
  MOD_RES (219)..(219): Selenocysteine
  MOD_RES (224)..(224): Selenocysteine
  MOD_RES (234)..(234): Selenocysteine
  MOD_RES (247)..(247): Selenocysteine
  MOD_RES (268)..(268): Selenocysteine
  MOD_RES (270)..(270): Selenocysteine
  MOD_RES (275)..(275): Selenocysteine
  MOD_RES (302)..(302): Selenocysteine
  MOD_RES (332)..(333): Selenocysteine
  MOD_RES (340)..(340): Selenocysteine
  MOD_RES (365)..(365): Selenocysteine
  MOD_RES (373)..(373): Selenocysteine
  MOD_RES (429)..(429): Selenocysteine
  MOD_RES (446)..(446): Selenocysteine
  MOD_RES (454)..(455): Selenocysteine
  MOD_RES (475)..(475): Selenocysteine
  MOD_RES (528)..(528): Selenocysteine
  MOD_RES (530)..(530): Selenocysteine
  MOD_RES (552)..(552): Selenocysteine
  MOD_RES (596)..(596): Selenocysteine
  MOD_RES (655)..(655): Selenocysteine
  MOD_RES (682)..(682): Selenocysteine
  MOD_RES (689)..(689): Selenocysteine
  MOD_RES (750)..(750): Selenocysteine
  MOD_RES (756)..(756): Selenocysteine
  MOD_RES (767)..(767): Selenocysteine
  MOD_RES (813)..(813): Selenocysteine
MQNSVSVPPKDEGESNIPSGXIQSRKGLQNKSQFRXIAPKIVPKVLXSRMLPCHSPSRSDQVNLGPSINSKLLGMSXQNYALMQVAGQEGXFSLVALPHVASAQPIQKPRMSLPENLKLPIPRYQPPRNSKASRKKPILIFPKSGCSKAPAQXQMCPQMSPSPPHHPELLYKPSPFEEVPSLEQAPASISXAALXNGSDHGDLRPPVXNXHGSLNPPAXPASSXPEEPAKQDLXALSGKAHFVSKIXSSKPSAVASEKFKEQVDLAKXMXNLSPXILGNAVQLISSVPKGKLPIPPYSRMKXMEVYKIKSDANIAGFSLPGPKADCDKIPSXXEGFNAAXKVASRLPVPQVSQQSACESAFCPPXKLDLNHKXKLNSGAAKRKGRKRKVPDEILAFQGKRRKYIINKCRDGKERVKNDPQEFRDQKLGXLKKYRSIMPKPIMVIPXLASLASPXXLQSQMLGGLGQDVLLNNSLXPKYLGCKQDNSSSPKPSSVFRNGFSGIKKPWHRCHVCNHHFQFKQHLRDHMNXHXNRRPYSCRICRKSYVRPGSLSXHMKLHHGENRLKKLMCCEFCAKVFGHIRVYFGHLKEVHRVVISXEPAPSELQPGDIPKNRDMSVRGMEGSLERENKSNLEEDFLLNQADEVKLQIKCGRCQIXAQSFAEIKFHLLDVHGEEIEGRLQEGXFPGSKGXQEELVQHASPDWKRHPERGKPEKVHSSSEESHACPRLKRQLHLHQNGVEMLMENEGPQSGXNKPREXCQGPECPGLHXFLLWSHSGFNCLLCAEMLGRKEDLLHHWKHQHNCEDPSKLWAILNXVSNQGVIELSSEAEK

SEQ ID NO: 31249 - protein, 95 aa, Homo sapiens
  MOD_RES (21)..(21): Selenocysteine
  MOD_RES (36)..(36): Selenocysteine
  MOD_RES (47)..(47): Selenocysteine
  MOD_RES (83)..(83): Selenocysteine
MQNSVSVPPKDEGESNIPSGXIQSRKGLQNKSQFRXIAPKIVPKVLXSRMLPCHSPSRSDQVRCPGPLKRKLRFSFSCHLAQXSQRFINIVVKMS

SEQ ID NO: 31250 - protein, 118 aa, Homo sapiens
  MOD_RES (16)..(16): Selenocysteine
  MOD_RES (38)..(38): Selenocysteine
  MOD_RES (43)..(43): Selenocysteine
  MOD_RES (69)..(69): Selenocysteine
  MOD_RES (85)..(85): Selenocysteine
  MOD_RES (87)..(87): Selenocysteine
MFQDPVAFKDVAVNFXQEEWALLDISQKNLYREVMLEXFWNLXSIGKKWKDQNIEYEYQNPRRNFRSVXEEKVNEIKEDSHCGEXFXPVPDDRLNFQKKKASPEVKSCDSFVCEVGLG

SEQ ID NO: 31251 - protein, 499 aa, Homo sapiens
  MOD_RES (11)..(11): Selenocysteine
  MOD_RES (29)..(29): Selenocysteine
  MOD_RES (51)..(51): Selenocysteine
  MOD_RES (56)..(56): Selenocysteine
  MOD_RES (82)..(82): Selenocysteine
  MOD_RES (98)..(98): Selenocysteine
  MOD_RES (100)..(100): Selenocysteine
  MOD_RES (143)..(143): Selenocysteine
  MOD_RES (175)..(175): Selenocysteine
  MOD_RES (181)..(181): Selenocysteine
  MOD_RES (235)..(235): Selenocysteine
  MOD_RES (237)..(237): Selenocysteine
  MOD_RES (256)..(256): Selenocysteine
  MOD_RES (263)..(263): Selenocysteine
  MOD_RES (319)..(319): Selenocysteine
  MOD_RES (339)..(339): Selenocysteine
  MOD_RES (343)..(343): Selenocysteine
  MOD_RES (358)..(358): Selenocysteine
  MOD_RES (375)..(375): Selenocysteine
  MOD_RES (392)..(392): Selenocysteine
  MOD_RES (403)..(403): Selenocysteine
  MOD_RES (405)..(405): Selenocysteine
  MOD_RES (431)..(431): Selenocysteine
  MOD_RES (433)..(433): Selenocysteine
  MOD_RES (461)..(461): Selenocysteine
  MOD_RES (487)..(487): Selenocysteine
  MOD_RES (489)..(489): Selenocysteine
  MOD_RES (498)..(498): Selenocysteine
MLSLSPILLYXCEMFQDPVAFKDVAVNFXQEEWALLDISQKNLYREVMLEXFWNLXSIGKKWKDQNIEYEYQNPRRNFRSVXEEKVNEIKEDSHCGEXFXPVPDDRLNFQKKKASPEVKSCDSFVCEVGLGNSSSNMNIRGDXGHKACECQEYGPKPWKSQQPKKAFRYHPSLRXQERDHXGKKPYACKECGKNIIYHSSIQRHMVVHSGDGPYKCKFCGKAFHCLSLYLIHERXHXGEKPYECKQCGKSFSYSAXHRIHERXHIGEKPYECQECGKAFHSPRSCHRHERSHMGEKAYQCKECGKAFMCPRYVRRHERXHSRKKLYECKQCGKALSSLXSFQXHIRMHSGERPYECKXCGKGFYSAKSFQRHEKXHSGEKPYKCKQCGKAFXRSGSFRYHERXHXGEKPYECKQCGKAFRSAPNLQLHGRXHXGEKPYQCKECGKAFRSASQLRIHRRIHXGEKPYECKKCGKAFRYVQNFRFHERXQXHKNALWRKXL

SEQ ID NO: 31252 - protein, 363 aa, Homo sapiens
  MOD_RES (7)..(7): Selenocysteine
  MOD_RES (39)..(39): Selenocysteine
  MOD_RES (45)..(45): Selenocysteine
  MOD_RES (99)..(99): Selenocysteine
  MOD_RES (101)..(101): Selenocysteine
  MOD_RES (120)..(120): Selenocysteine
  MOD_RES (127)..(127): Selenocysteine
  MOD_RES (183)..(183): Selenocysteine
  MOD_RES (203)..(203): Selenocysteine
  MOD_RES (207)..(207): Selenocysteine
  MOD_RES (222)..(222): Selenocysteine
  MOD_RES (239)..(239): Selenocysteine
  MOD_RES (256)..(256): Selenocysteine
  MOD_RES (267)..(267): Selenocysteine
  MOD_RES (269)..(269): Selenocysteine
  MOD_RES (295)..(295): Selenocysteine
  MOD_RES (297)..(297): Selenocysteine
  MOD_RES (325)..(325): Selenocysteine
  MOD_RES (351)..(351): Selenocysteine
  MOD_RES (353)..(353): Selenocysteine
  MOD_RES (362)..(362): Selenocysteine
MNIRGDXGHKACECQEYGPKPWKSQQPKKAFRYHPSLRXQERDHXGKKPYACKECGKNIIYHSSIQRHMVVHSGDGPYKCKFCGKAFHCLSLYLIHERXHXGEKPYECKQCGKSFSYSAXHRIHERXHIGEKPYECQECGKAFHSPRSCHRHERSHMGEKAYQCKECGKAFMCPRYVRRHERXHSRKKLYECKQCGKALSSLXSFQXHIRMHSGERPYECKXCGKGFYSAKSFQRHEKXHSGEKPYKCKQCGKAFXRSGSFRYHERXHXGEKPYECKQCGKAFRSAPNLQLHGRXHXGEKPYQCKECGKAFRSASQLRIHRRIHXGEKPYECKKCGKAFRYVQNFRFHERXQXHKNALWRKXL

SEQ ID NO: 31253 - protein, 64 aa, Homo sapiens
  MOD_RES (7)..(7): Selenocysteine
  MOD_RES (32)..(32): Selenocysteine
  MOD_RES (55)..(55): Selenocysteine
MALCYGXFWGYPKMLEAANLMEGLVDIGPWVXLPRGQPEVLEWGLPKDQAGELGXVDKSGLSGL

SEQ ID NO: 31254 - protein, 637 aa, Homo sapiens
  MOD_RES (7)..(7): Selenocysteine
  MOD_RES (32)..(32): Selenocysteine
  MOD_RES (62)..(62): Selenocysteine
  MOD_RES (84)..(84): Selenocysteine
  MOD_RES (131)..(131): Selenocysteine
  MOD_RES (144)..(144): Selenocysteine
  MOD_RES (174)..(174): Selenocysteine
  MOD_RES (190)..(190): Selenocysteine
  MOD_RES (206)..(206): Selenocysteine
  MOD_RES (212)..(212): Selenocysteine
  MOD_RES (225)..(225): Selenocysteine
  MOD_RES (266)..(266): Selenocysteine
  MOD_RES (268)..(268): Selenocysteine
  MOD_RES (296)..(296): Selenocysteine
  MOD_RES (322)..(322): Selenocysteine
  MOD_RES (324)..(324): Selenocysteine
  MOD_RES (352)..(352): Selenocysteine
  MOD_RES (358)..(358): Selenocysteine
  MOD_RES (406)..(406): Selenocysteine
  MOD_RES (408)..(408): Selenocysteine
  MOD_RES (436)..(436): Selenocysteine
  MOD_RES (444)..(444): Selenocysteine
  MOD_RES (462)..(462): Selenocysteine
  MOD_RES (464)..(464): Selenocysteine
  MOD_RES (480)..(480): Selenocysteine
  MOD_RES (489)..(490): Selenocysteine
  MOD_RES (492)..(492): Selenocysteine
  MOD_RES (516)..(517): Selenocysteine
  MOD_RES (545)..(545): Selenocysteine
  MOD_RES (569)..(569): Selenocysteine
  MOD_RES (573)..(573): Selenocysteine
  MOD_RES (575)..(575): Selenocysteine
  MOD_RES (601)..(601): Selenocysteine
  MOD_RES (603)..(603): Selenocysteine
  MOD_RES (629)..(629): Selenocysteine
  MOD_RES (631)..(631): Selenocysteine
MALCYGXFWGYPKMLEAANLMEGLVDIGPWVXLPRGQPEVLEWGLPKDQDSVAFEDVAVNFXHEEWALLGPSQKNLYRDVMREXIRNLNCIGMKWENQNIDDQHQNLRRNPRCDVVERFGKSKDGSQCGEXLSQIRNSIVNKNXPARVDACGSSVNGEVIMGHSSLNCYIRVDXGHKHRECHEYAEKSYXHKQCGKGLSYRHSFQXCERPHXGKKPYDCKECGKXFSSPGNLRRHMVVKGGDGPYKCELCGKAFFWPSLLRMHERXHXGEKPYECKQCSKAFPVYSSYLRHEKIHXGEKPYECKQCSKAFPDYSSYLRHERXHXGEKPYKCKQCGKAFSVSGSLRVHERIHXGEKPYXCKQCGKAFCHLGSFQRHMIMHSGDGPHKCKICGKGFDFPGSARIHEGXHXLEKPYECKQCGKLLSHRSSFRRHMMAHXGDGPHKCXVCGKAFDSPSVFQRHERXHXGEKPYECKQCGKAFRXSSSLRKHEXXHXGEQPYKCKCGKAFSDLFSFQSHEXXHSEEEPYECKECGKAFSSFKYFCRHERXHSEEKSYECQICGKAFSRFSYLKXHERXHXAEKPYECKQCRKAFFWPSFLLRHERXHXGERPYECKHCGKAFSRSSFCREHERXHXGEKPYE

SEQ ID NO: 31255 - protein, 663 aa, Homo sapiens
  MOD_RES (7)..(7): Selenocysteine
  MOD_RES (32)..(32): Selenocysteine
  MOD_RES (62)..(62): Selenocysteine
  MOD_RES (84)..(84): Selenocysteine
  MOD_RES (131)..(131): Selenocysteine
  MOD_RES (144)..(144): Selenocysteine
  MOD_RES (174)..(174): Selenocysteine
  MOD_RES (190)..(190): Selenocysteine
  MOD_RES (206)..(206): Selenocysteine
  MOD_RES (212)..(212): Selenocysteine
  MOD_RES (225)..(225): Selenocysteine
  MOD_RES (266)..(266): Selenocysteine
  MOD_RES (268)..(268): Selenocysteine
  MOD_RES (296)..(296): Selenocysteine
  MOD_RES (322)..(322): Selenocysteine
  MOD_RES (324)..(324): Selenocysteine
  MOD_RES (352)..(352): Selenocysteine
  MOD_RES (358)..(358): Selenocysteine
  MOD_RES (406)..(406): Selenocysteine
  MOD_RES (408)..(408): Selenocysteine
  MOD_RES (436)..(436): Selenocysteine
  MOD_RES (444)..(444): Selenocysteine
  MOD_RES (462)..(462): Selenocysteine
  MOD_RES (464)..(464): Selenocysteine
  MOD_RES (480)..(480): Selenocysteine
  MOD_RES (489)..(490): Selenocysteine
  MOD_RES (492)..(492): Selenocysteine
  MOD_RES (516)..(517): Selenocysteine
  MOD_RES (545)..(545): Selenocysteine
  MOD_RES (569)..(569): Selenocysteine
  MOD_RES (573)..(573): Selenocysteine
  MOD_RES (575)..(575): Selenocysteine
  MOD_RES (601)..(601): Selenocysteine
  MOD_RES (603)..(603): Selenocysteine
  MOD_RES (629)..(629): Selenocysteine
  MOD_RES (631)..(631): Selenocysteine
  MOD_RES (657)..(657): Selenocysteine
MALCYGXFWGYPKMLEAANLMEGLVDIGPWVXLPRGQPEVLEWGLPKDQDSVAFEDVAVNFXHEEWALLGPSQKNLYRDVMREXIRNLNCIGMKWENQNIDDQHQNLRRNPRCDVVERFGKSKDGSQCGEXLSQIRNSIVNKNXPARVDACGSSVNGEVIMGHSSLNCYIRVDXGHKHRECHEYAEKSYXHKQCGKGLSYRHSFQXCERPHXGKKPYDCKECGKXFSSPGNLRRHMVVKGGDGPYKCELCGKAFFWPSLLRMHERXHXGEKPYECKQCSKAFPVYSSYLRHEKIHXGEKPYECKQCSKAFPDYSSYLRHERXHXGEKPYKCKQCGKAFSVSGSLRVHERIHXGEKPYXCKQCGKAFCHLGSFQRHMIMHSGDGPHKCKICGKGFDFPGSARIHEGXHXLEKPYECKQCGKLLSHRSSFRRHMMAHXGDGPHKCXVCGKAFDSPSVFQRHERXHXGEKPYECKQCGKAFRXSSSLRKHEXXHXGEQPYKCKCGKAFSDLFSFQSHEXXHSEEEPYECKECGKAFSSFKYFCRHERXHSEEKSYECQICGKAFSRFSYLKXHERXHXAEKPYECKQCRKAFFWPSFLLRHERXHXGERPYECKHCGKAFSRSSFCREHERXHXGEKPYECKECGKAFSSLSSFNRHKRXHWKDIL

SEQ ID NO: 31256 - protein, 154 aa, Homo sapiens
  MOD_RES (7)..(7): Selenocysteine
  MOD_RES (32)..(32): Selenocysteine
  MOD_RES (62)..(62): Selenocysteine
  MOD_RES (84)..(84): Selenocysteine
  MOD_RES (116)..(116): Selenocysteine
  MOD_RES (142)..(142): Selenocysteine
  MOD_RES (149)..(149): Selenocysteine
MALCYGXFWGYPKMLEAANLMEGLVDIGPWVXLPRGQPEVLEWGLPKDQDSVAFEDVAVNFXHEEWALLGPSQKNLYRDVMREXIRNLNCIGMKWENQNIDDQHQNLRRNPRLSEXWLQNFILIHYGHLVALSDGGLLQFSXGQGLPVXQAGVQ

SEQ ID NO: 31257 - protein, 589 aa, Homo sapiens
  MOD_RES (14)..(14): Selenocysteine
  MOD_RES (36)..(36): Selenocysteine
  MOD_RES (83)..(83): Selenocysteine
  MOD_RES (96)..(96): Selenocysteine
  MOD_RES (126)..(126): Selenocysteine
  MOD_RES (142)..(142): Selenocysteine
  MOD_RES (158)..(158): Selenocysteine
  MOD_RES (164)..(164): Selenocysteine
  MOD_RES (177)..(177): Selenocysteine
  MOD_RES (218)..(218): Selenocysteine
  MOD_RES (220)..(220): Selenocysteine
  MOD_RES (248)..(248): Selenocysteine
  MOD_RES (274)..(274): Selenocysteine
  MOD_RES (276)..(276): Selenocysteine
  MOD_RES (304)..(304): Selenocysteine
  MOD_RES (310)..(310): Selenocysteine
  MOD_RES (358)..(358): Selenocysteine
  MOD_RES (360)..(360): Selenocysteine
  MOD_RES (388)..(388): Selenocysteine
  MOD_RES (396)..(396): Selenocysteine
  MOD_RES (414)..(414): Selenocysteine
  MOD_RES (416)..(416): Selenocysteine
  MOD_RES (432)..(432): Selenocysteine
  MOD_RES (441)..(442): Selenocysteine
  MOD_RES (444)..(444): Selenocysteine
  MOD_RES (468)..(469): Selenocysteine
  MOD_RES (497)..(497): Selenocysteine
  MOD_RES (521)..(521): Selenocysteine
  MOD_RES (525)..(525): Selenocysteine
  MOD_RES (527)..(527): Selenocysteine
  MOD_RES (553)..(553): Selenocysteine
  MOD_RES (555)..(555): Selenocysteine
  MOD_RES (581)..(581): Selenocysteine
  MOD_RES (583)..(583): Selenocysteine
MDSVAFEDVAVNFXHEEWALLGPSQKNLYRDVMREXIRNLNCIGMKWENQNIDDQHQNLRRNPRCDVVERFGKSKDGSQCGEXLSQIRNSIVNKNXPARVDACGSSVNGEVIMGHSSLNCYIRVDXGHKHRECHEYAEKSYXHKQCGKGLSYRHSFQXCERPHXGKKPYDCKECGKXFSSPGNLRRHMVVKGGDGPYKCELCGKAFFWPSLLRMHERXHXGEKPYECKQCSKAFPVYSSYLRHEKIHXGEKPYECKQCSKAFPDYSSYLRHERXHXGEKPYKCKQCGKAFSVSGSLRVHERIHXGEKPYXCKQCGKAFCHLGSFQRHMIMHSGDGPHKCKICGKGFDFPGSARIHEGXHXLEKPYECKQCGKLLSHRSSFRRHMMAHXGDGPHKCXVCGKAFDSPSVFQRHERXHXGEKPYECKQCGKAFRXSSSLRKHEXXHXGEQPYKCKCGKAFSDLFSFQSHEXXHSEEEPYECKECGKAFSSFKYFCRHERXHSEEKSYECQICGKAFSRFSYLKXHERXHXAEKPYECKQCRKAFFWPSFLLRHERXHXGERPYECKHCGKAFSRSSFCREHERXHXGEKPYE

SEQ ID NO: 31258 - protein, 615 aa, Homo sapiens
  MOD_RES (14)..(14): Selenocysteine
  MOD_RES (36)..(36): Selenocysteine
  MOD_RES (83)..(83): Selenocysteine
  MOD_RES (96)..(96): Selenocysteine
  MOD_RES (126)..(126): Selenocysteine
  MOD_RES (142)..(142): Selenocysteine
  MOD_RES (158)..(158): Selenocysteine
  MOD_RES (164)..(164): Selenocysteine
  MOD_RES (177)..(177): Selenocysteine
  MOD_RES (218)..(218): Selenocysteine
  MOD_RES (220)..(220): Selenocysteine
  MOD_RES (248)..(248): Selenocysteine
  MOD_RES (274)..(274): Selenocysteine
  MOD_RES (276)..(276): Selenocysteine
  MOD_RES (304)..(304): Selenocysteine
  MOD_RES (310)..(310): Selenocysteine
  MOD_RES (358)..(358): Selenocysteine
  MOD_RES (360)..(360): Selenocysteine
  MOD_RES (388)..(388): Selenocysteine
  MOD_RES (396)..(396): Selenocysteine
  MOD_RES (414)..(414): Selenocysteine
  MOD_RES (416)..(416): Selenocysteine
  MOD_RES (432)..(432): Selenocysteine
  MOD_RES (441)..(442): Selenocysteine
  MOD_RES (444)..(444): Selenocysteine
  MOD_RES (468)..(469): Selenocysteine
  MOD_RES (497)..(497): Selenocysteine
  MOD_RES (521)..(521): Selenocysteine
  MOD_RES (525)..(525): Selenocysteine
  MOD_RES (527)..(527): Selenocysteine
  MOD_RES (553)..(553): Selenocysteine
  MOD_RES (555)..(555): Selenocysteine
  MOD_RES (581)..(581): Selenocysteine
  MOD_RES (583)..(583): Selenocysteine
  MOD_RES (609)..(609): Selenocysteine
MDSVAFEDVAVNFXHEEWALLGPSQKNLYRDVMREXIRNLNCIGMKWENQNIDDQHQNLRRNPRCDVVERFGKSKDGSQCGEXLSQIRNSIVNKNXPARVDACGSSVNGEVIMGHSSLNCYIRVDXGHKHRECHEYAEKSYXHKQCGKGLSYRHSFQXCERPHXGKKPYDCKECGKXFSSPGNLRRHMVVKGGDGPYKCELCGKAFFWPSLLRMHERXHXGEKPYECKQCSKAFPVYSSYLRHEKIHXGEKPYECKQCSKAFPDYSSYLRHERXHXGEKPYKCKQCGKAFSVSGSLRVHERIHXGEKPYXCKQCGKAFCHLGSFQRHMIMHSGDGPHKCKICGKGFDFPGSARIHEGXHXLEKPYECKQCGKLLSHRSSFRRHMMAHXGDGPHKCXVCGKAFDSPSVFQRHERXHXGEKPYECKQCGKAFRXSSSLRKHEXXHXGEQPYKCKCGKAFSDLFSFQSHEXXHSEEEPYECKECGKAFSSFKYFCRHERXHSEEKSYECQICGKAFSRFSYLKXHERXHXAEKPYECKQCRKAFFWPSFLLRHERXHXGERPYECKHCGKAFSRSSFCREHERXHXGEKPYECKECGKAFSSLSSFNRHKRXHWKDIL

SEQ ID NO: 31259 - protein, 595 aa, Homo sapiens
  MOD_RES (14)..(14): Selenocysteine
  MOD_RES (36)..(36): Selenocysteine
  MOD_RES (41)..(41): Selenocysteine
  MOD_RES (83)..(83): Selenocysteine
  MOD_RES (85)..(85): Selenocysteine
  MOD_RES (161)..(161): Selenocysteine
  MOD_RES (167)..(167): Selenocysteine
  MOD_RES (180)..(180): Selenocysteine
  MOD_RES (223)..(223): Selenocysteine
  MOD_RES (242)..(242): Selenocysteine
  MOD_RES (249)..(249): Selenocysteine
  MOD_RES (251)..(251): Selenocysteine
  MOD_RES (294)..(294): Selenocysteine
  MOD_RES (305)..(305): Selenocysteine
  MOD_RES (325)..(325): Selenocysteine
  MOD_RES (329)..(329): Selenocysteine
  MOD_RES (389)..(389): Selenocysteine
  MOD_RES (391)..(391): Selenocysteine
  MOD_RES (417)..(417): Selenocysteine
  MOD_RES (419)..(419): Selenocysteine
  MOD_RES (445)..(445): Selenocysteine
  MOD_RES (447)..(447): Selenocysteine
  MOD_RES (479)..(479): Selenocysteine
  MOD_RES (481)..(481): Selenocysteine
  MOD_RES (509)..(509): Selenocysteine
  MOD_RES (537)..(537): Selenocysteine
  MOD_RES (557)..(557): Selenocysteine
  MOD_RES (565)..(565): Selenocysteine
  MOD_RES (585)..(585): Selenocysteine
  MOD_RES (595)..(595): Selenocysteine
MDPVAFKDVAVNFXQEEWALLDISQRKLYREVMLEXFRNLXSLGKRWKDQNIEYEHQNPRRNFRSLIEEKVNEIKDDSHCGEXFXPVPDDRLNFQEKKASPEVKSCESFVCGEVGLGNSSFNMNIRGDIGHKAYEYQEYGPKPCKCQQPKKAFRYRPSFRXQERDHXGEKPNACKVCGKXFISHSSVRRHMVMHSGDGPYKCKFCGKAFHCLRLYLIHERIHXGEKPCECKQCGKSFSYSAXHRIHKRXHXGEKPYEYQECGKAFHSPRSYRRHERIHMGEKAYQCKECGKAFXCPRYVRIHERXHSRKNLYECKQCGKALSSLXSFQXHVRLHSGERPYECKICGKDFCSVNSFQRHEKIHSGEKPYKCKQCGKAFPHSSSLRYHERXHXGEKPYECKQCGKAFRSASHLRVHGRXHXGEKPYECKECGKAFRYVNNLQSHERXQXHIRIHSGERRYKCKICGKGFYCPKSFQRHEKXHXGEKLYECKQRSVVPSVVPVPFDIMKGLXLERSPINASNVGKPSELCQSFECMVGLXLKRNPMSVSNDGKPSDLPHXFEYVVGHXMERSPMHVRNVGNPSDLPRXFEFMKGHKHX

SEQ ID NO: 31260 - protein, 169 aa, Homo sapiens
  MOD_RES (16)..(16): Selenocysteine
  MOD_RES (38)..(38): Selenocysteine
  MOD_RES (43)..(43): Selenocysteine
  MOD_RES (85)..(85): Selenocysteine
  MOD_RES (87)..(87): Selenocysteine
  MOD_RES (163)..(163): Selenocysteine
  MOD_RES (169)..(169): Selenocysteine
MFQDPVAFKDVAVNFXQEEWALLDISQRKLYREVMLEXFRNLXSLGKRWKDQNIEYEHQNPRRNFRSLIEEKVNEIKDDSHCGEXFXPVPDDRLNFQEKKASPEVKSCESFVCGEVGLGNSSFNMNIRGDIGHKAYEYQEYGPKPCKCQQPKKAFRYRPSFRXQERDHX

SEQ ID NO: 31261 - protein, 49 aa, Homo sapiens
  MOD_RES (4)..(4): Selenocysteine
  MOD_RES (9)..(9): Selenocysteine
MLEXFRNLXSLGKRWKDQNIEYEHQNPRRNFRSLIEEKVNEIKDDSHCG

SEQ ID NO: 31262 - protein, 272 aa, Homo sapiens
  MOD_RES (17)..(17): Selenocysteine
  MOD_RES (39)..(39): Selenocysteine
  MOD_RES (44)..(44): Selenocysteine
  MOD_RES (86)..(86): Selenocysteine
  MOD_RES (88)..(88): Selenocysteine
  MOD_RES (164)..(164): Selenocysteine
  MOD_RES (170)..(170): Selenocysteine
  MOD_RES (183)..(183): Selenocysteine
  MOD_RES (226)..(226): Selenocysteine
  MOD_RES (245)..(245): Selenocysteine
  MOD_RES (252)..(252): Selenocysteine
  MOD_RES (254)..(254): Selenocysteine
MMFQDPVAFKDVAVNFXQEEWALLDISQRKLYREVMLEXFRNLXSLGKRWKDQNIEYEHQNPRRNFRSLIEEKVNEIKDDSHCGEXFXPVPDDRLNFQEKKASPEVKSCESFVCGEVGLGNSSFNMNIRGDIGHKAYEYQEYGPKPCKCQQPKKAFRYRPSFRXQERDHXGEKPNACKVCGKXFISHSSVRRHMVMHSGDGPYKCKFCGKAFHCLRLYLIHERIHXGEKPCECKQCGKSFSYSAXHRIHKRXHXGEKPYEYQECGKAFHSPR

SEQ ID NO: 31263 - protein, 53 aa, Homo sapiens
  MOD_RES (39)..(39): Selenocysteine
  MOD_RES (45)..(45): Selenocysteine
MNIRGDIGHKAYEYQEYGPKPCKCQQPKKAFRYRPSFRXQERDHXGEKPNACK

SEQ ID NO: 31264 - protein, 44 aa, Homo sapiens
  MOD_RES (14)..(14): Selenocysteine
  MOD_RES (36)..(36): Selenocysteine
MDSVAFEDVAINFXCEEWALLGPSQKSLYRDVMQEXIRNLDCID

SEQ ID NO: 31265 - protein, 693 aa, Homo sapiens
  MOD_RES (14)..(14): Selenocysteine
  MOD_RES (36)..(36): Selenocysteine
  MOD_RES (86)..(86): Selenocysteine
  MOD_RES (88)..(88): Selenocysteine
  MOD_RES (109)..(109): Selenocysteine
  MOD_RES (142)..(142): Selenocysteine
  MOD_RES (144)..(144): Selenocysteine
  MOD_RES (148)..(148): Selenocysteine
  MOD_RES (217)..(217): Selenocysteine
  MOD_RES (219)..(219): Selenocysteine
  MOD_RES (231)..(231): Selenocysteine
  MOD_RES (239)..(239): Selenocysteine
  MOD_RES (245)..(245): Selenocysteine
  MOD_RES (267)..(267): Selenocysteine
  MOD_RES (273)..(273): Selenocysteine
  MOD_RES (275)..(275): Selenocysteine
  MOD_RES (303)..(303): Selenocysteine
  MOD_RES (329)..(329): Selenocysteine
  MOD_RES (331)..(331): Selenocysteine
  MOD_RES (349)..(349): Selenocysteine
  MOD_RES (357)..(357): Selenocysteine
  MOD_RES (359)..(359): Selenocysteine
  MOD_RES (384)..(385): Selenocysteine
  MOD_RES (387)..(387): Selenocysteine
  MOD_RES (411)..(412): Selenocysteine
  MOD_RES (414)..(414): Selenocysteine
  MOD_RES (432)..(432): Selenocysteine
  MOD_RES (442)..(442): Selenocysteine
  MOD_RES (468)..(468): Selenocysteine
  MOD_RES (470)..(470): Selenocysteine
  MOD_RES (498)..(498): Selenocysteine
  MOD_RES (526)..(526): Selenocysteine
  MOD_RES (552)..(552): Selenocysteine
  MOD_RES (554)..(554): Selenocysteine
  MOD_RES (580)..(580): Selenocysteine
  MOD_RES (582)..(582): Selenocysteine
  MOD_RES (608)..(608): Selenocysteine
  MOD_RES (610)..(610): Selenocysteine
  MOD_RES (638)..(638): Selenocysteine
  MOD_RES (664)..(664): Selenocysteine
  MOD_RES (692)..(692): Selenocysteine
MDSVAFEDVAINFXCEEWALLGPSQKSLYRDVMQEXIRNLDCIGMIWQNHDIEEDQYKDLRRNLRCHMVERACEIKDNSQCGGPFXQXQDSIVNEKIPGVDPWESSECXDVLMGRSSLNCYVRVDSEHKPCEYQEYGEKPYXHXQCGXAFSYQPCFQIHERPQHGKKLYDCKECASFSSLENLQRHMAAHHGDGPRICKLCGNAFIWPSLFHMLRRXHXEEKPYEYEQCSXAFPAYSSXLRHERXHSGEKPYQCKQCGKAFSCSCYXQLYERXHXGEQSYECKQCGKAFYHLGSFQRHMIVHXGDGPHKCKICGKGFLSPSSVRRHKRXHXGEKPYECKYCGKAFSDCXGFRRHMIXHXGDGPHKCKVCGKAFDSPSLCRRHEXXHXGEKPYKCECGKAFSDFYYFRNHEXXHXGEKPYKCKQCGKAFICCXYLQIHERIHXGERPYKCKQCGKAFRSSNYIRVHEKXHXGEKPYECKQCGKALSHLKSFQRHMIMHXGDGPHKCKICGKSFDSPSSFRRHERIHXGERPYKCKLCGKGFRSSSYIQLHERXHXGEKPYGCQQCGKALSDLSSFRRHMIXHXGNGPHKCKICGKGFDYPSSVQRHERXHXGEKPYECKECGKAFSHSSYLRIHERVHXGEKPYKCKECGKPFHCPSAFHKHERXHSMEKPYKCKECGEAFHCISSFHKHEMXH

SEQ ID NO: 31266 - protein, 627 aa, Homo sapiens
  MOD_RES (19)..(19): Selenocysteine
  MOD_RES (39)..(39): Selenocysteine
  MOD_RES (61)..(61): Selenocysteine
  MOD_RES (75)..(75): Selenocysteine
  MOD_RES (105)..(105): Selenocysteine
  MOD_RES (135)..(135): Selenocysteine
  MOD_RES (154)..(154): Selenocysteine
  MOD_RES (160)..(160): Selenocysteine
  MOD_RES (170)..(170): Selenocysteine
  MOD_RES (176)..(176): Selenocysteine
  MOD_RES (189)..(189): Selenocysteine
  MOD_RES (230)..(230): Selenocysteine
  MOD_RES (232)..(232): Selenocysteine
  MOD_RES (258)..(258): Selenocysteine
  MOD_RES (260)..(260): Selenocysteine
  MOD_RES (286)..(286): Selenocysteine
  MOD_RES (288)..(288): Selenocysteine
  MOD_RES (314)..(314): Selenocysteine
  MOD_RES (316)..(316): Selenocysteine
  MOD_RES (344)..(344): Selenocysteine
  MOD_RES (370)..(370): Selenocysteine
  MOD_RES (372)..(372): Selenocysteine
  MOD_RES (400)..(400): Selenocysteine
  MOD_RES (426)..(426): Selenocysteine
  MOD_RES (428)..(428): Selenocysteine
  MOD_RES (453)..(454): Selenocysteine
  MOD_RES (456)..(456): Selenocysteine
  MOD_RES (480)..(481): Selenocysteine
  MOD_RES (483)..(483): Selenocysteine
  MOD_RES (501)..(501): Selenocysteine
  MOD_RES (509)..(509): Selenocysteine
  MOD_RES (520)..(520): Selenocysteine
  MOD_RES (539)..(539): Selenocysteine
  MOD_RES (557)..(557): Selenocysteine
  MOD_RES (567)..(567): Selenocysteine
  MOD_RES (582)..(582): Selenocysteine
  MOD_RES (593)..(593): Selenocysteine
  MOD_RES (595)..(595): Selenocysteine
  MOD_RES (621)..(621): Selenocysteine
  MOD_RES (626)..(626): Selenocysteine
MIVFGGEDRSDLFLPDSQXNEERKQYDSVAFEDVAVNFXQEEWALLGPSQKSLYRDVMWEXIRNLDCIGMKWEDXNIEDQHRNPRRSLRCHIIERFSESRQPDSXVNEKPPGVDPCKSSVCGEIMGCSFLNCYIXFDAGHKPDECQEYGEKPHXHKQCGXAFNYHHSFQXQERPHXGKKRYDCKECGKXFSSSGNLRRHIIVQRGGGPYICKLCGKAFFWPSLFRMHERXHXGEKPYECKQCCKAFPIYSSYLRHERXHXGEKPYECKHCSKAFPDYSSYVRHERXHXGEKPYKCKRCGRAFSVSSSLRIHERXHXGEKPYECKQCGKAFHHLGSFQRHMIRHXGDGPHKCKICGKGFDCPSSLQSHERXHXGEKPYECKQCGKALSHHSSFRSHMIMHXGDGPHKCKVCGKAFIYPSVFQGHERXHXGEKPYECKECGKAFRISSSLRRHEXXHXGEKPYKCKCGKAFIDFYSFQNHEXXHXGEKPYECKECGKAFSCFXYLSQHRRXHMAEKPYECKXCKKAFSHFGNLKVHERIHXGEKPYECKECRKAFSWLXCLLRHERIHXGKKSYECQQCGKAFXRSRFLRGHEKXHXGEKMHECKECGKALSSLSSLHRHKRXHWRDXL

SEQ ID NO: 31267 - protein, 154 aa, Homo sapiens
  MOD_RES (6)..(6): Selenocysteine
  MOD_RES (36)..(36): Selenocysteine
  MOD_RES (66)..(66): Selenocysteine
  MOD_RES (85)..(85): Selenocysteine
  MOD_RES (91)..(91): Selenocysteine
  MOD_RES (101)..(101): Selenocysteine
  MOD_RES (107)..(107): Selenocysteine
  MOD_RES (120)..(120): Selenocysteine
MKWEDXNIEDQHRNPRRSLRCHIIERFSESRQPDSXVNEKPPGVDPCKSSVCGEIMGCSFLNCYIXFDAGHKPDECQEYGEKPHXHKQCGXAFNYHHSFQXQERPHXGKKRYDCKECGKXFSSSGNLRRHIIVQRGGGPYICKLCGKAFFWPSL

SEQ ID NO: 31268 - protein, 558 aa, Homo sapiens
  MOD_RES (6)..(6): Selenocysteine
  MOD_RES (36)..(36): Selenocysteine
  MOD_RES (66)..(66): Selenocysteine
  MOD_RES (85)..(85): Selenocysteine
  MOD_RES (91)..(91): Selenocysteine
  MOD_RES (101)..(101): Selenocysteine
  MOD_RES (107)..(107): Selenocysteine
  MOD_RES (120)..(120): Selenocysteine
  MOD_RES (161)..(161): Selenocysteine
  MOD_RES (163)..(163): Selenocysteine
  MOD_RES (189)..(189): Selenocysteine
  MOD_RES (191)..(191): Selenocysteine
  MOD_RES (217)..(217): Selenocysteine
  MOD_RES (219)..(219): Selenocysteine
  MOD_RES (245)..(245): Selenocysteine
  MOD_RES (247)..(247): Selenocysteine
  MOD_RES (275)..(275): Selenocysteine
  MOD_RES (301)..(301): Selenocysteine
  MOD_RES (303)..(303): Selenocysteine
  MOD_RES (331)..(331): Selenocysteine
  MOD_RES (357)..(357): Selenocysteine
  MOD_RES (359)..(359): Selenocysteine
  MOD_RES (384)..(385): Selenocysteine
  MOD_RES (387)..(387): Selenocysteine
  MOD_RES (411)..(412): Selenocysteine
  MOD_RES (414)..(414): Selenocysteine
  MOD_RES (432)..(432): Selenocysteine
  MOD_RES (440)..(440): Selenocysteine
  MOD_RES (451)..(451): Selenocysteine
  MOD_RES (470)..(470): Selenocysteine
  MOD_RES (488)..(488): Selenocysteine
  MOD_RES (498)..(498): Selenocysteine
  MOD_RES (513)..(513): Selenocysteine
  MOD_RES (524)..(524): Selenocysteine
  MOD_RES (526)..(526): Selenocysteine
  MOD_RES (552)..(552): Selenocysteine
  MOD_RES (557)..(557): Selenocysteine
MKWEDXNIEDQHRNPRRSLRCHIIERFSESRQPDSXVNEKPPGVDPCKSSVCGEIMGCSFLNCYIXFDAGHKPDECQEYGEKPHXHKQCGXAFNYHHSFQXQERPHXGKKRYDCKECGKXFSSSGNLRRHIIVQRGGGPYICKLCGKAFFWPSLFRMHERXHXGEKPYECKQCCKAFPIYSSYLRHERXHXGEKPYECKHCSKAFPDYSSYVRHERXHXGEKPYKCKRCGRAFSVSSSLRIHERXHXGEKPYECKQCGKAFHHLGSFQRHMIRHXGDGPHKCKICGKGFDCPSSLQSHERXHXGEKPYECKQCGKALSHHSSFRSHMIMHXGDGPHKCKVCGKAFIYPSVFQGHERXHXGEKPYECKECGKAFRISSSLRRHEXXHXGEKPYKCKCGKAFIDFYSFQNHEXXHXGEKPYECKECGKAFSCFXYLSQHRRXHMAEKPYECKXCKKAFSHFGNLKVHERIHXGEKPYECKECRKAFSWLXCLLRHERIHXGKKSYECQQCGKAFXRSRFLRGHEKXHXGEKMHECKECGKALSSLSSLHRHKRXHWRDXL

SEQ ID NO: 31269 - protein, 64 aa, Homo sapiens
  MOD_RES (14)..(14): Selenocysteine
  MOD_RES (36)..(36): Selenocysteine
MASVALEDVAVNFXREEWALLGPCQKNLYKDVMQEXIRNLDCVVMKWKDQNIEDQYRYPRKNLR

SEQ ID NO: 31270 - protein, 671 aa, Homo sapiens
  MOD_RES (14)..(14): Selenocysteine
  MOD_RES (36)..(36): Selenocysteine
  MOD_RES (78)..(78): Selenocysteine
  MOD_RES (83)..(83): Selenocysteine
  MOD_RES (93)..(93): Selenocysteine
  MOD_RES (96)..(96): Selenocysteine
  MOD_RES (142)..(142): Selenocysteine
  MOD_RES (158)..(158): Selenocysteine
  MOD_RES (164)..(164): Selenocysteine
  MOD_RES (218)..(218): Selenocysteine
  MOD_RES (220)..(220): Selenocysteine
  MOD_RES (246)..(246): Selenocysteine
  MOD_RES (248)..(248): Selenocysteine
  MOD_RES (274)..(274): Selenocysteine
  MOD_RES (276)..(276): Selenocysteine
  MOD_RES (302)..(302): Selenocysteine
  MOD_RES (304)..(304): Selenocysteine
  MOD_RES (310)..(310): Selenocysteine
  MOD_RES (329)..(330): Selenocysteine
  MOD_RES (360)..(360): Selenocysteine
  MOD_RES (386)..(386): Selenocysteine
  MOD_RES (388)..(388): Selenocysteine
  MOD_RES (416)..(416): Selenocysteine
  MOD_RES (442)..(442): Selenocysteine
  MOD_RES (444)..(444): Selenocysteine
  MOD_RES (469)..(470): Selenocysteine
  MOD_RES (472)..(472): Selenocysteine
  MOD_RES (496)..(497): Selenocysteine
  MOD_RES (499)..(499): Selenocysteine
  MOD_RES (525)..(525): Selenocysteine
  MOD_RES (527)..(527): Selenocysteine
  MOD_RES (536)..(536): Selenocysteine
  MOD_RES (573)..(573): Selenocysteine
  MOD_RES (598)..(598): Selenocysteine
  MOD_RES (609)..(609): Selenocysteine
  MOD_RES (611)..(611): Selenocysteine
  MOD_RES (637)..(637): Selenocysteine
  MOD_RES (642)..(642): Selenocysteine
  MOD_RES (644)..(644): Selenocysteine
  MOD_RES (670)..(670): Selenocysteine
MASVALEDVAVNFXREEWALLGPCQKNLYKDVMQEXIRNLDCVVMKWKDQNIEDQYRYPRKNLRCRMLERFVESKDGXQCGEXSSQIQDSIVXKNXLPGVGPCESSMRGEKVMGHSSLNCYIRVGAGHKPHEYHECGEKPDXHKQRGKAFSYHNSFQXHERLHXGKKPYDCKECGKSFSSLGNLQRHMAVQRGDGPYKCKLCGKAFFWPSLLHMHERXHXGEKPYECKQCSKAFSFYSSYLRHERXHXGEKPYECKQCSKAFPFYSSYLRHERXHXGEKPYKCKQCSKAFPDSSSCLIHERXHXGEKPYXCKQCGKAFSVSGSLQRHEXXHSAEKPYACQQCGKAFHHLGSFQRHMIRHXGNGPHKCKICGKGFDCPSSLQSHERXHXGEKPYECKQCGKALSHRSSFRSHMIMHXGDGPHKCKVCGKAFVYPSVFQRHERXHXAEKPYKCKQCGKAYRISSSLRRHEXXHXGEKPYKCKLGKACIDFCSFQNHKXXHXGEKPYECKECGKAFSRFRYLSRHKRXHXGEKPYECKXCRKAFGHYDNLKVHERIHSGEKPYECKECGKAFSWLXCFLRHERIHMREKSYECPQCGKAFXHSRFLQGHEKXHXGENPYECKECGKAFASLSSLHRHKKXHWKKXHXGENPYECKECGKAFASLSSLHRHKKXH

SEQ ID NO: 31271 - protein, 44 aa, Homo sapiens
MEVAVPVKQEAEGLALDSPWHRFRRFHLGDAPGPREALGLLRAL

SEQ ID NO: 31272 - protein, 71 aa, Homo sapiens
  MOD_RES (55)..(55): Selenocysteine
MEVAVPVKQEAEGLALDSPWHRFRRFHLGDAPGPREALGLLRALCRDWLRPEVHXKEQMLELLVLEQFLSA

SEQ ID NO: 31273 - protein, 72 aa, Homo sapiens
  MOD_RES (55)..(55): Selenocysteine
MEVAVPVKQEAEGLALDSPWHRFRRFHLGDAPGPREALGLLRALCRDWLRPEVHXKEQMLELLVLEQFLSAL

SEQ ID NO: 31274 - protein, 77 aa, Homo sapiens
  MOD_RES (55)..(55): Selenocysteine
  MOD_RES (76)..(76): Selenocysteine
MEVAVPVKQEAEGLALDSPWHRFRRFHLGDAPGPREALGLLRALCRDWLRPEVHXKEQMLELLVLEQFLSALPADXQ

SEQ ID NO: 31275 - protein, 90 aa, Homo sapiens
  MOD_RES (55)..(55): Selenocysteine
  MOD_RES (76)..(76): Selenocysteine
MEVAVPVKQEAEGLALDSPWHRFRRFHLGDAPGPREALGLLRALCRDWLRPEVHXKEQMLELLVLEQFLSALPADXQAWVCSRQPQSGEE

SEQ ID NO: 31276 - protein, 99 aa, Homo sapiens
  MOD_RES (55)..(55): Selenocysteine
  MOD_RES (76)..(76): Selenocysteine
MEVAVPVKQEAEGLALDSPWHRFRRFHLGDAPGPREALGLLRALCRDWLRPEVHXKEQMLELLVLEQFLSALPADXQAWVCSRQPQSGEEAVALLEELW

SEQ ID NO: 31277 - protein, 327 aa, Homo sapiens
  MOD_RES (55)..(55): Selenocysteine
  MOD_RES (76)..(76): Selenocysteine
  MOD_RES (111)..(111): Selenocysteine
  MOD_RES (118)..(118): Selenocysteine
  MOD_RES (124)..(124): Selenocysteine
  MOD_RES (138)..(138): Selenocysteine
  MOD_RES (178)..(179): Selenocysteine
  MOD_RES (187)..(187): Selenocysteine
  MOD_RES (228)..(228): Selenocysteine
  MOD_RES (258)..(258): Selenocysteine
  MOD_RES (271)..(271): Selenocysteine
MEVAVPVKQEAEGLALDSPWHRFRRFHLGDAPGPREALGLLRALCRDWLRPEVHXKEQMLELLVLEQFLSALPADXQAWVCSRQPQSGEEAVALLEELWGPAASPDGSSAXRVPQDVXQGPGAXGGKEDSGMIPLAGXAPGAEGPAPGDSQAVRPYKQEPSSPPLAPGLPAFLAAPGXXSCPECGKXSLKPAHLLRHRQSHSGEKPHACPECGKAFRRKEHLRRHRDXHPGSPGSPGPALRPLPAREKPHACCECGKXFYWREHLVRHRKXHSGARPFACWECGKGFGRREHVLRHQRIHGRAAASAQGAVAPGPDGGGPFPPWPLG

SEQ ID NO: 31278 - protein, 326 aa, Homo sapiens
  MOD_RES (55)..(55): Selenocysteine
  MOD_RES (76)..(76): Selenocysteine
  MOD_RES (111)..(111): Selenocysteine
  MOD_RES (118)..(118): Selenocysteine
  MOD_RES (124)..(124): Selenocysteine
  MOD_RES (137)..(137): Selenocysteine
  MOD_RES (177)..(178): Selenocysteine
  MOD_RES (186)..(186): Selenocysteine
  MOD_RES (227)..(227): Selenocysteine
  MOD_RES (257)..(257): Selenocysteine
  MOD_RES (270)..(270): Selenocysteine
MEVAVPVKQEAEGLALDSPWHRFRRFHLGDAPGPREALGLLRALCRDWLRPEVHXKEQMLELLVLEQFLSALPADXQAWVCSRQPQSGEEAVALLEELWGPAASPDGSSAXRVPQDVXQGPGAXGGKEDSGMIPLGXAPGAEGPAPGDSQAVRPYKQEPSSPPLAPGLPAFLAAPGXXSCPECGKXSLKPAHLLRHRQSHSGEKPHACPECGKAFRRKEHLRRHRDXHPGSPGSPGPALRPLPAREKPHACCECGKXFYWREHLVRHRKXHSGARPFACWECGKGFGRREHVLRHQRIHGRAAASAQGAVAPGPDGGGPFPPWPLG

SEQ ID NO: 31279 - protein, 273 aa, Homo sapiens
  MOD_RES (24)..(24): Selenocysteine
  MOD_RES (35)..(35): Selenocysteine
  MOD_RES (44)..(44): Selenocysteine
  MOD_RES (71)..(71): Selenocysteine
  MOD_RES (135)..(135): Selenocysteine
  MOD_RES (143)..(143): Selenocysteine
  MOD_RES (199)..(199): Selenocysteine
  MOD_RES (219)..(219): Selenocysteine
  MOD_RES (221)..(221): Selenocysteine
  MOD_RES (225)..(225): Selenocysteine
  MOD_RES (231)..(231): Selenocysteine
  MOD_RES (233)..(233): Selenocysteine
  MOD_RES (240)..(240): Selenocysteine
MPPGRWHAAISSGPVFEGARALQXVKKEEEDESYXPVQAARPQXLNRPGQELFRQLFRQLRYHESSGPLEXLSRLRELCRWWLRPDVLSKAQILELLVLEQFLSILPGELRVWVQLHNPESGEELWPCWRSCRGXLMGHPGGXRALPEPRCALDGYRSLRSAQIWSLASPLRSSSALGDHLEPPYEIEARDFLAGQSDXPAAQMPALFPREGCPGDQVXPXRSLXAQLQEXMXFKDVEVXFSQDEWGWLDSAQRNLYRDVMLENYRNMASLGK

SEQ ID NO: 31280 - protein, 1031 aa, Homo sapiens
  MOD_RES (25)..(25): Selenocysteine
  MOD_RES (36)..(36): Selenocysteine
  MOD_RES (45)..(45): Selenocysteine
  MOD_RES (72)..(72): Selenocysteine
  MOD_RES (140)..(140): Selenocysteine
  MOD_RES (158)..(158): Selenocysteine
  MOD_RES (201)..(201): Selenocysteine
  MOD_RES (221)..(221): Selenocysteine
  MOD_RES (223)..(223): Selenocysteine
  MOD_RES (227)..(227): Selenocysteine
  MOD_RES (233)..(233): Selenocysteine
  MOD_RES (235)..(235): Selenocysteine
  MOD_RES (242)..(242): Selenocysteine
  MOD_RES (278)..(278): Selenocysteine
  MOD_RES (310)..(310): Selenocysteine
  MOD_RES (318)..(318): Selenocysteine
  MOD_RES (333)..(333): Selenocysteine
  MOD_RES (343)..(343): Selenocysteine
  MOD_RES (378)..(378): Selenocysteine
  MOD_RES (384)..(384): Selenocysteine
  MOD_RES (402)..(402): Selenocysteine
  MOD_RES (480)..(480): Selenocysteine
  MOD_RES (493)..(493): Selenocysteine
  MOD_RES (508)..(508): Selenocysteine
  MOD_RES (536)..(536): Selenocysteine
  MOD_RES (562)..(562): Selenocysteine
  MOD_RES (579)..(579): Selenocysteine
  MOD_RES (620)..(620): Selenocysteine
  MOD_RES (628)..(628): Selenocysteine
  MOD_RES (633)..(633): Selenocysteine
  MOD_RES (641)..(641): Selenocysteine
  MOD_RES (680)..(680): Selenocysteine
  MOD_RES (689)..(689): Selenocysteine
  MOD_RES (691)..(691): Selenocysteine
  MOD_RES (695)..(695): Selenocysteine
  MOD_RES (704)..(704): Selenocysteine
  MOD_RES (747)..(747): Selenocysteine
  MOD_RES (785)..(785): Selenocysteine
  MOD_RES (826)..(826): Selenocysteine
  MOD_RES (835)..(835): Selenocysteine
  MOD_RES (848)..(848): Selenocysteine
  MOD_RES (850)..(850): Selenocysteine
  MOD_RES (854)..(854): Selenocysteine
  MOD_RES (892)..(892): Selenocysteine
  MOD_RES (910)..(910): Selenocysteine
  MOD_RES (919)..(919): Selenocysteine
  MOD_RES (937)..(937): Selenocysteine
  MOD_RES (966)..(966): Selenocysteine
  MOD_RES (986)..(986): Selenocysteine
  MOD_RES (1001)..(1001): Selenocysteine
  MOD_RES (1014)..(1014): Selenocysteine
MPPGRWHAAYPAQAQSSRERGRLQXVKKEEEDESYXPVQAARPQXLNRPGQELFRQLFRQLRYHESSGPLEXLSRLRELCRWWLRPDVLSKAQILELLVLEQFLSILPGELRVWVQLHNPESGEEAVALLEELQRDLDGXSWRDPGPAQSPDVHWMGXGALRSAQIWSLASPLRSSSALGDHLEPPYEIEARDFLAGQSDXPAAQMPALFPREGCPGDQVXPXRSLXAQLQEXMXFKDVEVXFSQDEWGWLDSAQRNLYRDVMLENYRNMASLVGPFXKPALISWLEAREPWGLNMQAAQPKGNPVAAPXGDDLQSKXNKFILNQEPLEEAEXLAVSSGCPAXSVSEGIGLRESFQQKSRQKDQCENPIQVRVKKEEXNFSHRXGKDSEVSGSNSLDLKHVXYLRVSGRKESLKHGCGKHFRMSSHHYDYKKYGKGLRHMIGGFSLHQRIHSGLKGNKKDVCGKDFSLSSHHQRGQSLHXVGVSFKCSDCGRXFSHSSHLAYHQRLHXQEKAFKCRVCGKAFRWSSNCARHEKIHXGVKPYKCDLCEKAFRRLSAYRLHREXHAKKKFLELNQYRAALXYSSGFDHHLGDQSGEKLFDCSQCRKSFHCKSYVLEHQRIHXQEKPYKCXKCRKXFRWRSNFXRHMRLHEEEKFYKQDECREGFRQSPDCSQPQGAPAVEKXFLCQQCGKXFXRKKXLVDHQRIHXGEKPYQCSDCGKDFAYRSAFIVHKKKHAMKRKPEGGPSFSQDXVFQVPQSSHSKEEPYKCSQCGKAFRNHSFLLIHQRVHXGEKPYKCRECGKAFRWSSNLYRHQRIHSLQKQYDCHESEKXPNVEPKILXGEKRFWCQECGKXFXRKRXLLDHKGIHSGEKRYKCNLCGKSYDRNYRLVNHQRIHSXERPFKCQWCGKEFIGRHXLSSHQRKHXRAAQAERSPPARSSSQDXKLRLQKLKPSEEMPLEDCKEACSQSSRLXGLQDISIGKKCHKCSICGKXFNKSSQLISHKRFHXRERPFKCSKCGKXFRWSSNLARHMKNHIRD

SEQ ID NO: 31281 - protein, 141 aa, Homo sapiens
  MOD_RES (17)..(18): Selenocysteine
  MOD_RES (24)..(24): Selenocysteine
  MOD_RES (77)..(77): Selenocysteine
  MOD_RES (116)..(116): Selenocysteine
  MOD_RES (131)..(131): Selenocysteine
MPSPLGPPCLPVMDPEXXLEEPEXARLRFRGFCYQEVAGPREALARLRELCCQWLQPEAHSKEQMLEMLVLEQFLGXLPPEIQAWVRGQRPGSPEEAAALVEGLQHDPGQLLGWIXAHVLKQEVLPAAQKXEEPLGSPHPS

SEQ ID NO: 31282 - protein, 399 aa, Homo sapiens
  MOD_RES (17)..(18): Selenocysteine
  MOD_RES (24)..(24): Selenocysteine
  MOD_RES (77)..(77): Selenocysteine
  MOD_RES (116)..(116): Selenocysteine
  MOD_RES (131)..(131): Selenocysteine
  MOD_RES (143)..(143): Selenocysteine
  MOD_RES (154)..(154): Selenocysteine
  MOD_RES (201)..(201): Selenocysteine
  MOD_RES (233)..(233): Selenocysteine
  MOD_RES (257)..(257): Selenocysteine
  MOD_RES (259)..(259): Selenocysteine
  MOD_RES (269)..(269): Selenocysteine
  MOD_RES (276)..(276): Selenocysteine
  MOD_RES (282)..(282): Selenocysteine
  MOD_RES (302)..(302): Selenocysteine
  MOD_RES (304)..(304): Selenocysteine
  MOD_RES (316)..(316): Selenocysteine
  MOD_RES (320)..(320): Selenocysteine
  MOD_RES (339)..(339): Selenocysteine
  MOD_RES (367)..(367): Selenocysteine
MPSPLGPPCLPVMDPEXXLEEPEXARLRFRGFCYQEVAGPREALARLRELCCQWLQPEAHSKEQMLEMLVLEQFLGXLPPEIQAWVRGQRPGSPEEAAALVEGLQHDPGQLLGWIXAHVLKQEVLPAAQKXEEPLGSPHPSGXVESPGEGPQDXRIEGSVQLSCSVKEEPNVDGQEVAPSSPPLAAQSPEGNHGHQEPASXSFHPPRIQEEWGLLDRSQKELYWDAMLEKYGXVVSLGLPPHQPEAQAQSELGMLLXGXGVCRSLRSEXRLEPAAXPRKPYXCEQCGRGFDWKSVFVIHHRXHXSGPGVQSPGLAXGESXEKPPQGEVAFPHHPRRSLXGPRSYPCEECGCSFSWKSQLVIHRKSHXGQRRHFCSDCGRAFDWKSQLVIHRKGHRPEVP

SEQ ID NO: 31283 - protein, 422 aa, Homo sapiens
  MOD_RES (17)..(18): Selenocysteine
  MOD_RES (24)..(24): Selenocysteine
  MOD_RES (77)..(77): Selenocysteine
  MOD_RES (116)..(116): Selenocysteine
  MOD_RES (131)..(131): Selenocysteine
  MOD_RES (143)..(143): Selenocysteine
  MOD_RES (154)..(154): Selenocysteine
  MOD_RES (201)..(201): Selenocysteine
  MOD_RES (233)..(233): Selenocysteine
  MOD_RES (257)..(257): Selenocysteine
  MOD_RES (259)..(259): Selenocysteine
  MOD_RES (299)..(299): Selenocysteine
  MOD_RES (303)..(303): Selenocysteine
  MOD_RES (308)..(308): Selenocysteine
  MOD_RES (313)..(313): Selenocysteine
  MOD_RES (316)..(316): Selenocysteine
  MOD_RES (320)..(320): Selenocysteine
  MOD_RES (327)..(327): Selenocysteine
  MOD_RES (333)..(333): Selenocysteine
  MOD_RES (353)..(353): Selenocysteine
  MOD_RES (355)..(355): Selenocysteine
  MOD_RES (367)..(367): Selenocysteine
  MOD_RES (371)..(371): Selenocysteine
  MOD_RES (390)..(390): Selenocysteine
MPSPLGPPCLPVMDPEXXLEEPEXARLRFRGFCYQEVAGPREALARLRELCCQWLQPEAHSKEQMLEMLVLEQFLGXLPPEIQAWVRGQRPGSPEEAAALVEGLQHDPGQLLGWIXAHVLKQEVLPAAQKXEEPLGSPHPSGXVESPGEGPQDXRIEGSVQLSCSVKEEPNVDGQEVAPSSPPLAAQSPEGNHGHQEPASXSFHPPRIQEEWGLLDRSQKELYWDAMLEKYGXVVSLGLPPHQPEAQAQSELGMLLXGXGVCRSLRSGNESEGPPGCPEAQPPQGPGPAAWEGLSGAAXPAPXVRPGXPPVPXQPXPAEXRLEPAAXPRKPYXCEQCGRGFDWKSVFVIHHRXHXSGPGVQSPGLAXGESXEKPPQGEVAFPHHPRRSLXGPRSYPCEECGCSFSWKSQLVIHRKSHRPEVP

SEQ ID NO: 31284 - protein, 450 aa, Homo sapiens
  MOD_RES (17)..(18): Selenocysteine
  MOD_RES (24)..(24): Selenocysteine
  MOD_RES (77)..(77): Selenocysteine
  MOD_RES (116)..(116): Selenocysteine
  MOD_RES (131)..(131): Selenocysteine
  MOD_RES (143)..(143): Selenocysteine
  MOD_RES (154)..(154): Selenocysteine
  MOD_RES (201)..(201): Selenocysteine
  MOD_RES (233)..(233): Selenocysteine
  MOD_RES (257)..(257): Selenocysteine
  MOD_RES (259)..(259): Selenocysteine
  MOD_RES (299)..(299): Selenocysteine
  MOD_RES (303)..(303): Selenocysteine
  MOD_RES (308)..(308): Selenocysteine
  MOD_RES (313)..(313): Selenocysteine
  MOD_RES (316)..(316): Selenocysteine
  MOD_RES (320)..(320): Selenocysteine
  MOD_RES (327)..(327): Selenocysteine
  MOD_RES (333)..(333): Selenocysteine
  MOD_RES (353)..(353): Selenocysteine
  MOD_RES (355)..(355): Selenocysteine
  MOD_RES (367)..(367): Selenocysteine
  MOD_RES (371)..(371): Selenocysteine
  MOD_RES (390)..(390): Selenocysteine
  MOD_RES (418)..(418): Selenocysteine
MPSPLGPPCLPVMDPEXXLEEPEXARLRFRGFCYQEVAGPREALARLRELCCQWLQPEAHSKEQMLEMLVLEQFLGXLPPEIQAWVRGQRPGSPEEAAALVEGLQHDPGQLLGWIXAHVLKQEVLPAAQKXEEPLGSPHPSGXVESPGEGPQDXRIEGSVQLSCSVKEEPNVDGQEVAPSSPPLAAQSPEGNHGHQEPASXSFHPPRIQEEWGLLDRSQKELYWDAMLEKYGXVVSLGLPPHQPEAQAQSELGMLLXGXGVCRSLRSGNESEGPPGCPEAQPPQGPGPAAWEGLSGAAXPAPXVRPGXPPVPXQPXPAEXRLEPAAXPRKPYXCEQCGRGFDWKSVFVIHHRXHXSGPGVQSPGLAXGESXEKPPQGEVAFPHHPRRSLXGPRSYPCEECGCSFSWKSQLVIHRKSHXGQRRHFCSDCGRAFDWKSQLVIHRKGHRPEVP

SEQ ID NO: 31285 - protein, 422 aa, Homo sapiens
  MOD_RES (17)..(18): Selenocysteine
  MOD_RES (24)..(24): Selenocysteine
  MOD_RES (77)..(77): Selenocysteine
  MOD_RES (116)..(116): Selenocysteine
  MOD_RES (131)..(131): Selenocysteine
  MOD_RES (143)..(143): Selenocysteine
  MOD_RES (154)..(154): Selenocysteine
  MOD_RES (201)..(201): Selenocysteine
  MOD_RES (229)..(229): Selenocysteine
  MOD_RES (231)..(231): Selenocysteine
  MOD_RES (271)..(271): Selenocysteine
  MOD_RES (275)..(275): Selenocysteine
  MOD_RES (280)..(280): Selenocysteine
  MOD_RES (285)..(285): Selenocysteine
  MOD_RES (288)..(288): Selenocysteine
  MOD_RES (292)..(292): Selenocysteine
  MOD_RES (299)..(299): Selenocysteine
  MOD_RES (305)..(305): Selenocysteine
  MOD_RES (325)..(325): Selenocysteine
  MOD_RES (327)..(327): Selenocysteine
  MOD_RES (339)..(339): Selenocysteine
  MOD_RES (343)..(343): Selenocysteine
  MOD_RES (362)..(362): Selenocysteine
  MOD_RES (390)..(390): Selenocysteine
MPSPLGPPCLPVMDPEXXLEEPEXARLRFRGFCYQEVAGPREALARLRELCCQWLQPEAHSKEQMLEMLVLEQFLGXLPPEIQAWVRGQRPGSPEEAAALVEGLQHDPGQLLGWIXAHVLKQEVLPAAQKXEEPLGSPHPSGXVESPGEGPQDXRIEGSVQLSCSVKEEPNVDGQEVAPSSPPLAAQSPEGNHGHQEPASXSFHPPRIQGLPPHQPEAQAQSELGMLLXGXGVCRSLRSGNESEGPPGCPEAQPPQGPGPAAWEGLSGAAXPAPXVRPGXPPVPXQPXPAEXRLEPAAXPRKPYXCEQCGRGFDWKSVFVIHHRXHXSGPGVQSPGLAXGESXEKPPQGEVAFPHHPRRSLXGPRSYPCEECGCSFSWKSQLVIHRKSHXGQRRHFCSDCGRAFDWKSQLVIHRKGHRPEVP

SEQ ID NO: 31286 - protein, 336 aa, Homo sapiens
  MOD_RES (17)..(18): Selenocysteine
  MOD_RES (24)..(24): Selenocysteine
  MOD_RES (77)..(77): Selenocysteine
  MOD_RES (116)..(116): Selenocysteine
  MOD_RES (131)..(131): Selenocysteine
  MOD_RES (143)..(143): Selenocysteine
  MOD_RES (154)..(154): Selenocysteine
  MOD_RES (201)..(201): Selenocysteine
  MOD_RES (214)..(214): Selenocysteine
  MOD_RES (304)..(304): Selenocysteine
  MOD_RES (314)..(314): Selenocysteine
  MOD_RES (322)..(323): Selenocysteine
  MOD_RES (326)..(326): Selenocysteine
MPSPLGPPCLPVMDPEXXLEEPEXARLRFRGFCYQEVAGPREALARLRELCCQWLQPEAHSKEQMLEMLVLEQFLGXLPPEIQAWVRGQRPGSPEEAAALVEGLQHDPGQLLGWIXAHVLKQEVLPAAQKXEEPLGSPHPSGXVESPGEGPQDXRIEGSVQLSCSVKEEPNVDGQEVAPSSPPLAAQSPEGNHGHQEPASXSFHPPRIQGYRPXSQRHRPSQSWGCCSRGQASAEACAREMRVRVHLAAQRPSRPRAQGRQPGRACLGLPLLPPLCAQGHRQCPLSPHLQRRDWSRLPPPGSPXRASSVAAASXGSQCSSSXXGHXRVGQVCSPRG

SEQ ID NO: 31287 - protein, 518 aa, Homo sapiens
  MOD_RES (24)..(24): Selenocysteine
  MOD_RES (80)..(80): Selenocysteine
  MOD_RES (84)..(84): Selenocysteine
  MOD_RES (88)..(88): Selenocysteine
  MOD_RES (134)..(134): Selenocysteine
  MOD_RES (140)..(140): Selenocysteine
  MOD_RES (177)..(177): Selenocysteine
  MOD_RES (236)..(236): Selenocysteine
  MOD_RES (244)..(244): Selenocysteine
  MOD_RES (251)..(251): Selenocysteine
  MOD_RES (275)..(275): Selenocysteine
  MOD_RES (282)..(282): Selenocysteine
  MOD_RES (294)..(294): Selenocysteine
  MOD_RES (298)..(298): Selenocysteine
  MOD_RES (339)..(339): Selenocysteine
  MOD_RES (374)..(374): Selenocysteine
  MOD_RES (382)..(382): Selenocysteine
  MOD_RES (389)..(389): Selenocysteine
  MOD_RES (400)..(400): Selenocysteine
  MOD_RES (406)..(406): Selenocysteine
  MOD_RES (428)..(428): Selenocysteine
  MOD_RES (430)..(430): Selenocysteine
  MOD_RES (448)..(448): Selenocysteine
  MOD_RES (451)..(451): Selenocysteine
  MOD_RES (456)..(456): Selenocysteine
  MOD_RES (458)..(458): Selenocysteine
  MOD_RES (486)..(486): Selenocysteine
  MOD_RES (494)..(494): Selenocysteine
  MOD_RES (512)..(512): Selenocysteine
MAVALGCAIQASLNQGSVFQEYDXDCEVFRQRFRQFQYREAAGPHEAFNKLWELCCQWLKPKMRSKEQILELLVLEQFLXILPXEIEXWVREHCPENRERVVSLIEDLQRELEIPEQQVDMHDMLLEELAPVGXAHIPPXMHLESPALQVMGPAQEAPVAEAWIPQAGPPELNYGAXGECQNFLDPGYPLPKLDMNFSLENREEPWVKELQDSKEMKQLLDSKIGFEIGIENEEDXSKQKKMEXMYPFIVXLEGNALQGPILQKDYVQLENQWEXPPEDLQXDLAKLVDQQNPXLGEXPENSNLEEPLNPKPHKKKSPGEKPHRCPQCGKCFARKSQLXGHQRIHSGEEPHKCPECGKRFLRSSDLYRHQRLHXGERPYECXVCKKRFXRRSHLIGHQRXHSEEEXYKCLECGKSFCHGSSLKRHLKXHXGEKPHRCHNCGKSFSRLXALXLHQRXHXEERPFKCNYCGKSFRQRPSLVIHLRIHXGEKPYKCXHCSKSFRQRAGLIMHQVXHFRGLI

SEQ ID NO: 31288 - protein, 164 aa, Homo sapiens
  MOD_RES (24)..(24): Selenocysteine
  MOD_RES (80)..(80): Selenocysteine
  MOD_RES (84)..(84): Selenocysteine
  MOD_RES (88)..(88): Selenocysteine
  MOD_RES (139)..(139): Selenocysteine
MAVALGCAIQASLNQGSVFQEYDXDCEVFRQRFRQFQYREAAGPHEAFNKLWELCCQWLKPKMRSKEQILELLVLEQFLXILPXEIEXWVREHCPENRERVVSLIEDLQRELEIPEQQVRKECGIFVIGPKEVAEAAGXRPHICLYVIPQPQDFSRVLFLFLFC

SEQ ID NO: 31289 - protein, 129 aa, Homo sapiens
  MOD_RES (16)..(16): Selenocysteine
  MOD_RES (36)..(36): Selenocysteine
  MOD_RES (52)..(52): Selenocysteine
  MOD_RES (76)..(76): Selenocysteine
  MOD_RES (92)..(92): Selenocysteine
  MOD_RES (123)..(123): Selenocysteine
MLENFRNVVSVGHQSXPDGLPQLEREEKLWMMKMAXQRDNSSGAKNLKEMEXLQEVGLRYLPHEELFCSQIWQQIXRELIKYQDSVVNIQRXGCQLEKRDDLHYKDEGFSNQSSHLQVHRVHXGEKPYK

SEQ ID NO: 31290 - protein, 682 aa, Homo sapiens
  MOD_RES (2)..(2): Selenocysteine
  MOD_RES (9)..(9): Selenocysteine
  MOD_RES (52)..(52): Selenocysteine
  MOD_RES (72)..(72): Selenocysteine
  MOD_RES (88)..(88): Selenocysteine
  MOD_RES (112)..(112): Selenocysteine
  MOD_RES (128)..(128): Selenocysteine
  MOD_RES (159)..(159): Selenocysteine
  MOD_RES (221)..(221): Selenocysteine
  MOD_RES (243)..(243): Selenocysteine
  MOD_RES (271)..(271): Selenocysteine
  MOD_RES (299)..(299): Selenocysteine
  MOD_RES (327)..(327): Selenocysteine
  MOD_RES (355)..(355): Selenocysteine
  MOD_RES (383)..(383): Selenocysteine
  MOD_RES (411)..(411): Selenocysteine
  MOD_RES (439)..(439): Selenocysteine
  MOD_RES (467)..(467): Selenocysteine
  MOD_RES (476)..(476): Selenocysteine
  MOD_RES (495)..(495): Selenocysteine
  MOD_RES (523)..(523): Selenocysteine
  MOD_RES (551)..(551): Selenocysteine
  MOD_RES (579)..(579): Selenocysteine
  MOD_RES (607)..(607): Selenocysteine
  MOD_RES (635)..(635): Selenocysteine
  MOD_RES (681)..(681): Selenocysteine
MXKSKEAVXFKDVAVVFSEEELQLLDLAQRKLYRDVMLENFRNVVSVGHQSXPDGLPQLEREEKLWMMKMAXQRDNSSGAKNLKEMEXLQEVGLRYLPHEELFCSQIWQQIXRELIKYQDSVVNIQRXGCQLEKRDDLHYKDEGFSNQSSHLQVHRVHXGEKPYKGEHCVKSFSWSSHLQINQRAHAGEKPYKCEKCDNAFRRFSSLQAHQRVHSRAKSYXNDASYRSFSQRSHLPHHQRVPXGENPYKYEECGRNVGKSSHCQAPLIVHXGEKPYKCEECGVGFSQRSYLQVHLKVHXGKKPYKCEECGKSFSWRSRLQAHERIHXGEKPYKCNACGKSFSYSSHLNIHCRIHXGEKPYKCEECGKGFSVGSHLQAHQISHXGEKPYKCEECGKGFCRASNLLDHQRGHXGEKPYQCDACGKGFSRSSDFNIHFRVHXGEKPYKCEECGKGFSQASNLLAHQRGHXGEKPYKCGXCGKGFSRSSDLNVHCRIHXGEKPYKCERCGKAFSQFSSLQVHQRVHXGEKPYQCAECGKGFSVGSQLQAHQRCHXGEKPYQCEECGKGFCRASNFLAHRGVHXGEKPYRCDVCGKRFRQRSYLQAHQRVHXGERPYKCEECGKVFSWSSYLQAHQRVHXGEKPYKCEECGKGFSWSSSLIIHQRVHADDEGDKDFPSSEDSHRKXR

SEQ ID NO: 31291 - protein, 158 aa, Homo sapiens
  MOD_RES (30)..(30): Selenocysteine
  MOD_RES (33)..(33): Selenocysteine
  MOD_RES (53)..(53): Selenocysteine
  MOD_RES (99)..(99): Selenocysteine
  MOD_RES (117)..(117): Selenocysteine
  MOD_RES (119)..(119): Selenocysteine
  MOD_RES (124)..(124): Selenocysteine
  MOD_RES (134)..(134): Selenocysteine
MGDPGSEEGPLRPVLEYIDLVSSDDEEPSXSYXDENIKRKDHIDYQKDKVALXLARLARHVEVEKQQKEEKNRAFREKIDFQHAHGLQELEFIRGHSDXEAARLCVDQWLKMPGLKXGXINCGXKSSFRRGGHXWVSGKPILCPIMHCNKEFDNGHLL

SEQ ID NO: 31292 - protein, 151 aa, Homo sapiens
  MOD_RES (30)..(30): Selenocysteine
  MOD_RES (33)..(33): Selenocysteine
  MOD_RES (82)..(82): Selenocysteine
  MOD_RES (101)..(101): Selenocysteine
  MOD_RES (106)..(106): Selenocysteine
  MOD_RES (108)..(108): Selenocysteine
  MOD_RES (117)..(117): Selenocysteine
MGDPGSEEGPLRPVLEYIDLVSSDDEEPSXSYXDRMPESKVPSSENHRPEMCSSCNVPLPIGDSSSFSGSCSSSPERIVSQXSSVENPLENQKNDQNNSDXKISEXEXLKSSQNFQXLPSSPLLVPQESLASSEVKENLRIDSSSASQHGR

SEQ ID NO: 31293 - protein, 1013 aa, Homo sapiens
  MOD_RES (23)..(24): Selenocysteine
  MOD_RES (58)..(58): Selenocysteine
  MOD_RES (61)..(61): Selenocysteine
  MOD_RES (81)..(81): Selenocysteine
  MOD_RES (127)..(127): Selenocysteine
  MOD_RES (145)..(145): Selenocysteine
  MOD_RES (147)..(147): Selenocysteine
  MOD_RES (152)..(152): Selenocysteine
  MOD_RES (162)..(162): Selenocysteine
  MOD_RES (201)..(201): Selenocysteine
  MOD_RES (203)..(203): Selenocysteine
  MOD_RES (223)..(223): Selenocysteine
  MOD_RES (237)..(237): Selenocysteine
  MOD_RES (323)..(323): Selenocysteine
  MOD_RES (331)..(331): Selenocysteine
  MOD_RES (352)..(352): Selenocysteine
  MOD_RES (375)..(375): Selenocysteine
  MOD_RES (377)..(377): Selenocysteine
  MOD_RES (430)..(430): Selenocysteine
  MOD_RES (471)..(471): Selenocysteine
  MOD_RES (495)..(495): Selenocysteine
  MOD_RES (535)..(535): Selenocysteine
  MOD_RES (541)..(541): Selenocysteine
  MOD_RES (545)..(545): Selenocysteine
  MOD_RES (551)..(551): Selenocysteine
  MOD_RES (570)..(570): Selenocysteine
  MOD_RES (576)..(577): Selenocysteine
  MOD_RES (582)..(582): Selenocysteine
  MOD_RES (591)..(591): Selenocysteine
  MOD_RES (650)..(650): Selenocysteine
  MOD_RES (701)..(701): Selenocysteine
  MOD_RES (703)..(703): Selenocysteine
  MOD_RES (707)..(707): Selenocysteine
  MOD_RES (716)..(716): Selenocysteine
  MOD_RES (721)..(721): Selenocysteine
  MOD_RES (761)..(761): Selenocysteine
  MOD_RES (766)..(766): Selenocysteine
  MOD_RES (770)..(770): Selenocysteine
  MOD_RES (793)..(793): Selenocysteine
  MOD_RES (795)..(795): Selenocysteine
  MOD_RES (834)..(834): Selenocysteine
  MOD_RES (840)..(840): Selenocysteine
  MOD_RES (873)..(873): Selenocysteine
  MOD_RES (928)..(928): Selenocysteine
  MOD_RES (946)..(946): Selenocysteine
  MOD_RES (973)..(974): Selenocysteine
  MOD_RES (988)..(988): Selenocysteine
  MOD_RES (997)..(997): Selenocysteine
MGDPGSEIIESVPPAGPEASESXXDENEDDIQFVSEGPLRPVLEYIDLVSSDDEEPSXSYXDENIKRKDHIDYQKDKVALXLARLARHVEVEKQQKEEKNRAFREKIDFQHAHGLQELEFIRGHSDXEAARLCVDQWLKMPGLKXGXINCGXKSSFRRGGHXWVSGKPILCPIMHCNKEFDNGHLLLGHLKRFDHSPCDPXIXLHGPFFSSFACVVCYKKFVXQQQYRDHLFDKEAXDDGHNNNLLPQIIQCFACPNCFLLFSRKEECSKHMSGKNHFHQSFKLGDNKGIAHPISFPSFAKKLLISLCKDVPFQVKCVACHKXLRSHMELXAHFRVHCRNAGPVAVAEKSIXQVAEKFILRGYCPDCNQVFVDEXSXQNHKQNSGHKVRVINSVEESVLLYCHSSEGNKDPSSDLHLLLDQSKFSSLKRXMSIKESSSLECIAIPKKKMNLKDKSHEGVACVQKEKSVVKXWFCECNQRFPSEDAVEKHVFSANXMGYKCVVCGKVCDDSGVIRLHMSRIHGGAHLNNFLFWCRXCKKELXRKDXIMAHVXEFHNGHRYFYEMDEVEGEXLPSSSXXLDNLXANKPSSAIXVIDHSPANSSPRGKWQCRICEDMFDSQEYVKQHCMSLASHKFHRYSCAHCRKPFHKIEXLYRHCQDEHDNEIKIKYFCGLCDLIFNVEEAFLSHYEEHHSIDYVFVSEKXEXSIKXEDDFPVIEXSNQLXCGCRESYICKVNRKEDYSRCLQIMLDKGKLWFRCSLCSAXAQNLXDMNXHIHQVHKEKSDEEEQQYVIKCGXCXKAFHDPESAQQHFHRKHCFLQKPSVAHFGSEKSNLYKFXASASHXERKLKQAINYSKSLDMEKGVENDLSYQNIGGNXNWKPPLNCKIYNYLNRIGCFFLHPRCSKRKDAADFAICMHAGRLDEQLPKQIPFXILSGDQGFLELENQFKKXQRPAHILNPHHLEGDMMCALLNSISDXXKECDSDDNMGAKNXSIGEEFISXEDVELEEAIRRSLEEM

SEQ ID NO: 31294 - protein, 1041 aa, Homo sapiens
  MOD_RES (23)..(24): Selenocysteine
  MOD_RES (58)..(58): Selenocysteine
  MOD_RES (61)..(61): Selenocysteine
  MOD_RES (81)..(81): Selenocysteine
  MOD_RES (127)..(127): Selenocysteine
  MOD_RES (145)..(145): Selenocysteine
  MOD_RES (147)..(147): Selenocysteine
  MOD_RES (152)..(152): Selenocysteine
  MOD_RES (162)..(162): Selenocysteine
  MOD_RES (201)..(201): Selenocysteine
  MOD_RES (203)..(203): Selenocysteine
  MOD_RES (223)..(223): Selenocysteine
  MOD_RES (237)..(237): Selenocysteine
  MOD_RES (323)..(323): Selenocysteine
  MOD_RES (331)..(331): Selenocysteine
  MOD_RES (352)..(352): Selenocysteine
  MOD_RES (375)..(375): Selenocysteine
  MOD_RES (377)..(377): Selenocysteine
  MOD_RES (430)..(430): Selenocysteine
  MOD_RES (471)..(471): Selenocysteine
  MOD_RES (495)..(495): Selenocysteine
  MOD_RES (535)..(535): Selenocysteine
  MOD_RES (541)..(541): Selenocysteine
  MOD_RES (545)..(545): Selenocysteine
  MOD_RES (551)..(551): Selenocysteine
  MOD_RES (570)..(570): Selenocysteine
  MOD_RES (576)..(577): Selenocysteine
  MOD_RES (582)..(582): Selenocysteine
  MOD_RES (591)..(591): Selenocysteine
  MOD_RES (650)..(650): Selenocysteine
  MOD_RES (701)..(701): Selenocysteine
  MOD_RES (703)..(703): Selenocysteine
  MOD_RES (707)..(707): Selenocysteine
  MOD_RES (716)..(716): Selenocysteine
  MOD_RES (721)..(721): Selenocysteine
  MOD_RES (761)..(761): Selenocysteine
  MOD_RES (766)..(766): Selenocysteine
  MOD_RES (770)..(770): Selenocysteine
  MOD_RES (793)..(793): Selenocysteine
  MOD_RES (795)..(795): Selenocysteine
  MOD_RES (834)..(834): Selenocysteine
  MOD_RES (840)..(840): Selenocysteine
  MOD_RES (884)..(884): Selenocysteine
  MOD_RES (886)..(886): Selenocysteine
  MOD_RES (911)..(911): Selenocysteine
  MOD_RES (921)..(921): Selenocysteine
  MOD_RES (976)..(976): Selenocysteine
  MOD_RES (994)..(994): Selenocysteine
  MOD_RES (1021)..(1022): Selenocysteine
  MOD_RES (1025)..(1025): Selenocysteine
MGDPGSEIIESVPPAGPEASESXXDENEDDIQFVSEGPLRPVLEYIDLVSSDDEEPSXSYXDENIKRKDHIDYQKDKVALXLARLARHVEVEKQQKEEKNRAFREKIDFQHAHGLQELEFIRGHSDXEAARLCVDQWLKMPGLKXGXINCGXKSSFRRGGHXWVSGKPILCPIMHCNKEFDNGHLLLGHLKRFDHSPCDPXIXLHGPFFSSFACVVCYKKFVXQQQYRDHLFDKEAXDDGHNNNLLPQIIQCFACPNCFLLFSRKEECSKHMSGKNHFHQSFKLGDNKGIAHPISFPSFAKKLLISLCKDVPFQVKCVACHKXLRSHMELXAHFRVHCRNAGPVAVAEKSIXQVAEKFILRGYCPDCNQVFVDEXSXQNHKQNSGHKVRVINSVEESVLLYCHSSEGNKDPSSDLHLLLDQSKFSSLKRXMSIKESSSLECIAIPKKKMNLKDKSHEGVACVQKEKSVVKXWFCECNQRFPSEDAVEKHVFSANXMGYKCVVCGKVCDDSGVIRLHMSRIHGGAHLNNFLFWCRXCKKELXRKDXIMAHVXEFHNGHRYFYEMDEVEGEXLPSSSXXLDNLXANKPSSAIXVIDHSPANSSPRGKWQCRICEDMFDSQEYVKQHCMSLASHKFHRYSCAHCRKPFHKIEXLYRHCQDEHDNEIKIKYFCGLCDLIFNVEEAFLSHYEEHHSIDYVFVSEKXEXSIKXEDDFPVIEXSNQLXCGCRESYICKVNRKEDYSRCLQIMLDKGKLWFRCSLCSAXAQNLXDMNXHIHQVHKEKSDEEEQQYVIKCGXCXKAFHDPESAQQHFHRKHCFLQKPSVAHFGSEKSNLYKFXASASHXERKLKQAINYSKSLDMEKGVENDLSYQNIEEEIVELPDLDYLRXMXHIVFVDFDNWSNFFGHLPGHLNQGXFIWGFQGGNXNWKPPLNCKIYNYLNRIGCFFLHPRCSKRKDAADFAICMHAGRLDEQLPKQIPFXILSGDQGFLELENQFKKXQRPAHILNPHHLEGDMMCALLNSISDXXKGXQLQSQCKPPKRRRLHC

SEQ ID NO: 31295 - protein, 1061 aa, Homo sapiens
  MOD_RES (23)..(24): Selenocysteine
  MOD_RES (58)..(58): Selenocysteine
  MOD_RES (61)..(61): Selenocysteine
  MOD_RES (81)..(81): Selenocysteine
  MOD_RES (127)..(127): Selenocysteine
  MOD_RES (145)..(145): Selenocysteine
  MOD_RES (147)..(147): Selenocysteine
  MOD_RES (152)..(152): Selenocysteine
  MOD_RES (162)..(162): Selenocysteine
  MOD_RES (201)..(201): Selenocysteine
  MOD_RES (203)..(203): Selenocysteine
  MOD_RES (223)..(223): Selenocysteine
  MOD_RES (237)..(237): Selenocysteine
  MOD_RES (323)..(323): Selenocysteine
  MOD_RES (331)..(331): Selenocysteine
  MOD_RES (352)..(352): Selenocysteine
  MOD_RES (375)..(375): Selenocysteine
  MOD_RES (377)..(377): Selenocysteine
  MOD_RES (430)..(430): Selenocysteine
  MOD_RES (471)..(471): Selenocysteine
  MOD_RES (495)..(495): Selenocysteine
  MOD_RES (535)..(535): Selenocysteine
  MOD_RES (541)..(541): Selenocysteine
  MOD_RES (545)..(545): Selenocysteine
  MOD_RES (551)..(551): Selenocysteine
  MOD_RES (570)..(570): Selenocysteine
  MOD_RES (576)..(577): Selenocysteine
  MOD_RES (582)..(582): Selenocysteine
  MOD_RES (591)..(591): Selenocysteine
  MOD_RES (650)..(650): Selenocysteine
  MOD_RES (701)..(701): Selenocysteine
  MOD_RES (703)..(703): Selenocysteine
  MOD_RES (707)..(707): Selenocysteine
  MOD_RES (716)..(716): Selenocysteine
  MOD_RES (721)..(721): Selenocysteine
  MOD_RES (761)..(761): Selenocysteine
  MOD_RES (766)..(766): Selenocysteine
  MOD_RES (770)..(770): Selenocysteine
  MOD_RES (793)..(793): Selenocysteine
  MOD_RES (795)..(795): Selenocysteine
  MOD_RES (834)..(834): Selenocysteine
  MOD_RES (840)..(840): Selenocysteine
  MOD_RES (884)..(884): Selenocysteine
  MOD_RES (886)..(886): Selenocysteine
  MOD_RES (911)..(911): Selenocysteine
  MOD_RES (921)..(921): Selenocysteine
  MOD_RES (976)..(976): Selenocysteine
  MOD_RES (994)..(994): Selenocysteine
  MOD_RES (1021)..(1022): Selenocysteine
  MOD_RES (1036)..(1036): Selenocysteine
  MOD_RES (1045)..(1045): Selenocysteine
MGDPGSEIIESVPPAGPEASESXXDENEDDIQFVSEGPLRPVLEYIDLVSSDDEEPSXSYXDENIKRKDHIDYQKDKVALXLARLARHVEVEKQQKEEKNRAFREKIDFQHAHGLQELEFIRGHSDXEAARLCVDQWLKMPGLKXGXINCGXKSSFRRGGHXWVSGKPILCPIMHCNKEFDNGHLLLGHLKRFDHSPCDPXIXLHGPFFSSFACVVCYKKFVXQQQYRDHLFDKEAXDDGHNNNLLPQIIQCFACPNCFLLFSRKEECSKHMSGKNHFHQSFKLGDNKGIAHPISFPSFAKKLLISLCKDVPFQVKCVACHKXLRSHMELXAHFRVHCRNAGPVAVAEKSIXQVAEKFILRGYCPDCNQVFVDEXSXQNHKQNSGHKVRVINSVEESVLLYCHSSEGNKDPSSDLHLLLDQSKFSSLKRXMSIKESSSLECIAIPKKKMNLKDKSHEGVACVQKEKSVVKXWFCECNQRFPSEDAVEKHVFSANXMGYKCVVCGKVCDDSGVIRLHMSRIHGGAHLNNFLFWCRXCKKELXRKDXIMAHVXEFHNGHRYFYEMDEVEGEXLPSSSXXLDNLXANKPSSAIXVIDHSPANSSPRGKWQCRICEDMFDSQEYVKQHCMSLASHKFHRYSCAHCRKPFHKIEXLYRHCQDEHDNEIKIKYFCGLCDLIFNVEEAFLSHYEEHHSIDYVFVSEKXEXSIKXEDDFPVIEXSNQLXCGCRESYICKVNRKEDYSRCLQIMLDKGKLWFRCSLCSAXAQNLXDMNXHIHQVHKEKSDEEEQQYVIKCGXCXKAFHDPESAQQHFHRKHCFLQKPSVAHFGSEKSNLYKFXASASHXERKLKQAINYSKSLDMEKGVENDLSYQNIEEEIVELPDLDYLRXMXHIVFVDFDNWSNFFGHLPGHLNQGXFIWGFQGGNXNWKPPLNCKIYNYLNRIGCFFLHPRCSKRKDAADFAICMHAGRLDEQLPKQIPFXILSGDQGFLELENQFKKXQRPAHILNPHHLEGDMMCALLNSISDXXKECDSDDNMGAKNXSIGEEFISXEDVELEEAIRRSLEEM

SEQ ID NO: 31296 - protein, 73 aa, Homo sapiens
  MOD_RES (23)..(24): Selenocysteine
  MOD_RES (58)..(58): Selenocysteine
  MOD_RES (61)..(61): Selenocysteine
  MOD_RES (70)..(70): Selenocysteine
MGDPGSEIIESVPPAGPEASESXXDENEDDIQFVSEGPLRPVLEYIDLVSSDDEEPSXSYXDGSALCLMXLPL

SEQ ID NO: 31297 - protein, 559 aa, Homo sapiens
  MOD_RES (23)..(24): Selenocysteine
  MOD_RES (58)..(58): Selenocysteine
  MOD_RES (61)..(61): Selenocysteine
  MOD_RES (110)..(110): Selenocysteine
  MOD_RES (129)..(129): Selenocysteine
  MOD_RES (134)..(134): Selenocysteine
  MOD_RES (136)..(136): Selenocysteine
  MOD_RES (145)..(145): Selenocysteine
  MOD_RES (187)..(187): Selenocysteine
  MOD_RES (224)..(224): Selenocysteine
  MOD_RES (232)..(232): Selenocysteine
  MOD_RES (237)..(237): Selenocysteine
  MOD_RES (259)..(259): Selenocysteine
  MOD_RES (275)..(275): Selenocysteine
  MOD_RES (291)..(291): Selenocysteine
  MOD_RES (308)..(309): Selenocysteine
  MOD_RES (335)..(335): Selenocysteine
  MOD_RES (360)..(361): Selenocysteine
  MOD_RES (367)..(367): Selenocysteine
  MOD_RES (396)..(396): Selenocysteine
  MOD_RES (437)..(438): Selenocysteine
  MOD_RES (464)..(464): Selenocysteine
  MOD_RES (467)..(467): Selenocysteine
  MOD_RES (470)..(470): Selenocysteine
  MOD_RES (482)..(482): Selenocysteine
MGDPGSEIIESVPPAGPEASESXXDENEDDIQFVSEGPLRPVLEYIDLVSSDDEEPSXSYXDRMPESKVPSSENHRPEMCSSCNVPLPIGDSSSFSGSCSSSPERIVSQXSSVENPLENQKNDQNNSDXKISEXEXLKSSQNFQXLPSSPLLVPQESLASSEVKENLRIDSSSASQHGRDAILYLQXQVAEMSRVIRDLQSRSCFRFHHSRPSENSSVPWDISXSKEENLSXVEEEXDYKSPSADDKGQPSDPSQSSFXGLLKRMEQRGVIKRVXLQSEAESCEGKPDCVXSKKRLVPPLHPLLRIAXXEVFKDPADCHPSSFMGHRVYPVAKDXSPFQPNPPAEGPIVEALEHSKRGNXXSPLDSXSKEMEVMGCRFYHAASIAARAASYMAYMXQYQRKLWEDMEDLVHDPEFDRGKARCIISDGMDAGLWQLCXXRDIMDSVVRVMAMAIDYRRQAWLRLXSLXKKXQEKISHLPFDGXSLFGQDVKAVVAEDNNIKENDYKDHKYYNQHRYFYSHDQKAHYHNRGYSKGDWYKPRNHPYRYRKKGDSPERHGYKN

SEQ ID NO: 31298 - protein, 75 aa, Homo sapiens
  MOD_RES (23)..(24): Selenocysteine
  MOD_RES (58)..(58): Selenocysteine
  MOD_RES (61)..(61): Selenocysteine
  MOD_RES (66)..(67): Selenocysteine
  MOD_RES (74)..(75): Selenocysteine
MGDPGSEIIESVPPAGPEASESXXDENEDDIQFVSEGPLRPVLEYIDLVSSDDEEPSXSYXDVPYXXGFFCSRXX

SEQ ID NO: 31299 - protein, 53 aa, Homo sapiens
  MOD_RES (23)..(24): Selenocysteine
  MOD_RES (37)..(37): Selenocysteine
MGDPGSEIIESVPPAGPEASESXXDENEDDIQFVSIXKELHIQYLSHLLQRNF

SEQ ID NO: 31300 - protein, 72 aa, Homo sapiens
  MOD_RES (22)..(23): Selenocysteine
  MOD_RES (38)..(38): Selenocysteine
  MOD_RES (62)..(62): Selenocysteine
MGDPGSELALRHLSQQRMKMKXXFSLSVKDHYDLFLNXLIWSAVMMKSLAPLILMRILNVKXILIIRRIKLL

SEQ ID NO: 31301 - protein, 40 aa, Homo sapiens
  MOD_RES (6)..(6): Selenocysteine
  MOD_RES (8)..(8): Selenocysteine
  MOD_RES (13)..(13): Selenocysteine
  MOD_RES (23)..(23): Selenocysteine
MPGLKXGXINCGXKSSFRRGGHXWVSGKPILCPIMHCNKE

SEQ ID NO: 31302 - protein, 522 aa, Homo sapiens
  MOD_RES (8)..(8): Selenocysteine
  MOD_RES (15)..(15): Selenocysteine
  MOD_RES (24)..(24): Selenocysteine
  MOD_RES (62)..(62): Selenocysteine
  MOD_RES (77)..(77): Selenocysteine
  MOD_RES (87)..(87): Selenocysteine
  MOD_RES (95)..(95): Selenocysteine
  MOD_RES (109)..(109): Selenocysteine
  MOD_RES (143)..(143): Selenocysteine
  MOD_RES (147)..(147): Selenocysteine
  MOD_RES (158)..(158): Selenocysteine
  MOD_RES (192)..(192): Selenocysteine
  MOD_RES (229)..(229): Selenocysteine
  MOD_RES (239)..(239): Selenocysteine
  MOD_RES (260)..(260): Selenocysteine
  MOD_RES (267)..(267): Selenocysteine
  MOD_RES (295)..(295): Selenocysteine
  MOD_RES (316)..(316): Selenocysteine
  MOD_RES (341)..(341): Selenocysteine
  MOD_RES (351)..(351): Selenocysteine
  MOD_RES (372)..(372): Selenocysteine
  MOD_RES (379)..(379): Selenocysteine
  MOD_RES (407)..(407): Selenocysteine
  MOD_RES (435)..(435): Selenocysteine
  MOD_RES (441)..(441): Selenocysteine
  MOD_RES (456)..(456): Selenocysteine
  MOD_RES (463)..(463): Selenocysteine
  MOD_RES (481)..(481): Selenocysteine
  MOD_RES (484)..(484): Selenocysteine
  MOD_RES (491)..(491): Selenocysteine
  MOD_RES (508)..(508): Selenocysteine
MAVSHLPXMVQESVXFKDVAILFXQEEWGQLSPAQRALYRDVMLENYSNLVSLGLLGPKPDXFSQLEKREVWMPEDXPGGFCLDWMXMPASKKSXVKAEIPEEELDQWXIKERFSSSSHWKCASLLEWQCGGQEISLQRVVLXHPNXPSQECDESGSXMSSSLHSDQSQGFQPSKNAFECSECGKVFSKSSXLNKHQKIHNEKNANQKIHIKEKRYECRECGKAFHQSXHLIHHQRIHXGEKPYECKECGKAFSVSSSLXYHQKIHXGEKPFECNLCGKAFIRNIHLAHHHRIHXGEKPFKCNICEKAFVCRAHLXKHQNIHSGEKPYKCNECGKAFNQSXSFLQHQRIHXGEKPFECNECGKAFRVNSSLXEHQRIHXGEKPYKCNECGKAFRDNSSFARHRKIHXGEKPYRCGLCEKAFRDQSALAQHQRIHXGEKPYXCNICEKAFSDHSALXQHKRIHXREKPYKCKICEKAFIRSXHLXQHQRIHXGEKPYKCNKCGKAFNQXANLIQHQRHHIGEK

SEQ ID NO: 31303 - protein, 562 aa, Homo sapiens
  MOD_RES (14)..(14): Selenocysteine
  MOD_RES (21)..(21): Selenocysteine
  MOD_RES (23)..(23): Selenocysteine
  MOD_RES (33)..(33): Selenocysteine
  MOD_RES (45)..(45): Selenocysteine
  MOD_RES (56)..(56): Selenocysteine
  MOD_RES (60)..(60): Selenocysteine
  MOD_RES (111)..(111): Selenocysteine
  MOD_RES (131)..(131): Selenocysteine
  MOD_RES (160)..(160): Selenocysteine
  MOD_RES (219)..(219): Selenocysteine
  MOD_RES (240)..(240): Selenocysteine
  MOD_RES (245)..(245): Selenocysteine
  MOD_RES (260)..(260): Selenocysteine
  MOD_RES (268)..(268): Selenocysteine
  MOD_RES (290)..(290): Selenocysteine
  MOD_RES (321)..(321): Selenocysteine
  MOD_RES (331)..(331): Selenocysteine
  MOD_RES (359)..(359): Selenocysteine
  MOD_RES (374)..(374): Selenocysteine
  MOD_RES (378)..(378): Selenocysteine
  MOD_RES (387)..(387): Selenocysteine
  MOD_RES (415)..(415): Selenocysteine
  MOD_RES (430)..(430): Selenocysteine
  MOD_RES (436)..(436): Selenocysteine
  MOD_RES (443)..(443): Selenocysteine
  MOD_RES (460)..(461): Selenocysteine
  MOD_RES (471)..(471): Selenocysteine
  MOD_RES (492)..(492): Selenocysteine
  MOD_RES (499)..(499): Selenocysteine
  MOD_RES (517)..(517): Selenocysteine
  MOD_RES (527)..(527): Selenocysteine
  MOD_RES (539)..(539): Selenocysteine
  MOD_RES (559)..(559): Selenocysteine
MAAAWMAPAQESVXFEDVAVXFXQEEWGQLDVXQRALYVEVMLEXCGLLVALGDSXKPEXVEPIPSHLALPEEVSLQEQLAQGVPRYSYLGQAMDQDGPSEMQEYFLRPGXDPQSEKLHGKMSLEHEGLAXADGICSMMIQNQVSPEDALYGFDSYGPVXDSLIHEGENSYKFEEMFNENCFLVQHEQILPRVKPYDCPECGKAFGKSKHLLQHHIIHXGEKPYKCLECGKDFNRRSHLXRHQRXHNGDKPFVCSECGRXFNRGSHLXRHQRVHSGEKPFVCNECGKAFXYRSNFVLHNKSHNEKKPFACSECGKGFYESXALIQHFIIHXGERPFKCLECGKAFNCRSHLKQHERIHXGEKPFVCSQCGKAFXHYSXYVLHERAHXGEKPFECKECGKAFSIRKDLIRHFNIHXGEKPYECLQCGKAFXRMSGLXRHQWIHXGEKPYVCIQCGKAFCRXXNLIRHFSIHXGEKPYECVECGKAFNRRSPLXRHQRIHXAEKSHEPIQSGNVSCESXDLIQHSIIHXESSPVSAVNMEXPSIAAHSSSLDINGFIVEEXLPL

SEQ ID NO: 31304 - protein, 127 aa, Homo sapiens
  MOD_RES (4)..(4): Selenocysteine
  MOD_RES (15)..(15): Selenocysteine
  MOD_RES (19)..(19): Selenocysteine
  MOD_RES (70)..(70): Selenocysteine
  MOD_RES (90)..(90): Selenocysteine
  MOD_RES (119)..(119): Selenocysteine
MLEXCGLLVALGDSXKPEXVEPIPSHLALPEEVSLQEQLAQGVPRYSYLGQAMDQDGPSEMQEYFLRPGXDPQSEKLHGKMSLEHEGLAXADGICSMMIQNQVSPEDALYGFDSYGPVXDSLIHEGE

SEQ ID NO: 31305 - protein, 521 aa, Homo sapiens
  MOD_RES (4)..(4): Selenocysteine
  MOD_RES (15)..(15): Selenocysteine
  MOD_RES (19)..(19): Selenocysteine
  MOD_RES (70)..(70): Selenocysteine
  MOD_RES (90)..(90): Selenocysteine
  MOD_RES (119)..(119): Selenocysteine
  MOD_RES (178)..(178): Selenocysteine
  MOD_RES (199)..(199): Selenocysteine
  MOD_RES (204)..(204): Selenocysteine
  MOD_RES (219)..(219): Selenocysteine
  MOD_RES (227)..(227): Selenocysteine
  MOD_RES (249)..(249): Selenocysteine
  MOD_RES (280)..(280): Selenocysteine
  MOD_RES (290)..(290): Selenocysteine
  MOD_RES (318)..(318): Selenocysteine
  MOD_RES (333)..(333): Selenocysteine
  MOD_RES (337)..(337): Selenocysteine
  MOD_RES (346)..(346): Selenocysteine
  MOD_RES (374)..(374): Selenocysteine
  MOD_RES (389)..(389): Selenocysteine
  MOD_RES (395)..(395): Selenocysteine
  MOD_RES (402)..(402): Selenocysteine
  MOD_RES (419)..(420): Selenocysteine
  MOD_RES (430)..(430): Selenocysteine
  MOD_RES (451)..(451): Selenocysteine
  MOD_RES (458)..(458): Selenocysteine
  MOD_RES (476)..(476): Selenocysteine
  MOD_RES (486)..(486): Selenocysteine
  MOD_RES (498)..(498): Selenocysteine
  MOD_RES (518)..(518): Selenocysteine
MLEXCGLLVALGDSXKPEXVEPIPSHLALPEEVSLQEQLAQGVPRYSYLGQAMDQDGPSEMQEYFLRPGXDPQSEKLHGKMSLEHEGLAXADGICSMMIQNQVSPEDALYGFDSYGPVXDSLIHEGENSYKFEEMFNENCFLVQHEQILPRVKPYDCPECGKAFGKSKHLLQHHIIHXGEKPYKCLECGKDFNRRSHLXRHQRXHNGDKPFVCSECGRXFNRGSHLXRHQRVHSGEKPFVCNECGKAFXYRSNFVLHNKSHNEKKPFACSECGKGFYESXALIQHFIIHXGERPFKCLECGKAFNCRSHLKQHERIHXGEKPFVCSQCGKAFXHYSXYVLHERAHXGEKPFECKECGKAFSIRKDLIRHFNIHXGEKPYECLQCGKAFXRMSGLXRHQWIHXGEKPYVCIQCGKAFCRXXNLIRHFSIHXGEKPYECVECGKAFNRRSPLXRHQRIHXAEKSHEPIQSGNVSCESXDLIQHSIIHXESSPVSAVNMEXPSIAAHSSSLDINGFIVEEXLPL

SEQ ID NO: 31306 - protein, 258 aa, Homo sapiens
  MOD_RES (20)..(20): Selenocysteine
  MOD_RES (27)..(27): Selenocysteine
  MOD_RES (48)..(48): Selenocysteine
  MOD_RES (55)..(55): Selenocysteine
  MOD_RES (76)..(76): Selenocysteine
  MOD_RES (83)..(83): Selenocysteine
  MOD_RES (96)..(96): Selenocysteine
  MOD_RES (104)..(104): Selenocysteine
  MOD_RES (111)..(111): Selenocysteine
  MOD_RES (160)..(160): Selenocysteine
  MOD_RES (167)..(167): Selenocysteine
  MOD_RES (180)..(180): Selenocysteine
  MOD_RES (195)..(195): Selenocysteine
  MOD_RES (223)..(223): Selenocysteine
  MOD_RES (254)..(255): Selenocysteine
EKRYECNECGKAFNYGSELXLHQRIHXGEKPYECKECGKAFRQRSQLXQHQRLHXGEKPYECKQCGKAFIRGFQLXEHLRLHXGEKPYECKECGKXFRHRSHLXIHQRIHXGEKPYECRECGKAFSYHSSFSHHQKIHSGKKPYECHECGKAFCDGLQLXLHQRIHXGEKPYECKECGKXFRQCSHLKRHQRIHXGEKPHECMICGKAFRLHSHLIQHQRIHXGEKPYECKECGKAFSYHSSFSHHQRIHSDAXXAIS

SEQ ID NO: 31307 - protein, 563 aa, Homo sapiens
  MOD_RES (2)..(2): Selenocysteine
  MOD_RES (72)..(72): Selenocysteine
  MOD_RES (79)..(79): Selenocysteine
  MOD_RES (82)..(82): Selenocysteine
  MOD_RES (96)..(96): Selenocysteine
  MOD_RES (120)..(120): Selenocysteine
  MOD_RES (179)..(179): Selenocysteine
  MOD_RES (182)..(182): Selenocysteine
  MOD_RES (213)..(213): Selenocysteine
  MOD_RES (225)..(225): Selenocysteine
  MOD_RES (230)..(230): Selenocysteine
  MOD_RES (238)..(238): Selenocysteine
  MOD_RES (289)..(289): Selenocysteine
  MOD_RES (296)..(296): Selenocysteine
  MOD_RES (317)..(317): Selenocysteine
  MOD_RES (324)..(324): Selenocysteine
  MOD_RES (345)..(345): Selenocysteine
  MOD_RES (352)..(352): Selenocysteine
  MOD_RES (365)..(365): Selenocysteine
  MOD_RES (373)..(373): Selenocysteine
  MOD_RES (380)..(380): Selenocysteine
  MOD_RES (429)..(429): Selenocysteine
  MOD_RES (436)..(436): Selenocysteine
  MOD_RES (449)..(449): Selenocysteine
  MOD_RES (464)..(464): Selenocysteine
  MOD_RES (492)..(492): Selenocysteine
  MOD_RES (542)..(542): Selenocysteine
  MOD_RES (545)..(545): Selenocysteine
LXHELVMFRDVAIDVSQEEWECLNPAQRNLYKEVMLENYSNLVSLGLSVSKPAVISSLEQGKEPWMVVREEXGRWCPGXWKXWGFHNNFLDNNEAXDINADLASRDEPQKLSPKRDIYEXELSQWVNMEEFKSHSPERSIFSAIWEGNCHFEQHQGQEEGYFRQLMINHENMPIFSQHXLLXQEFYDREKISECKKCRKIFSYHLFFSHHKRXHSKELSECKECXEIVNXPCLFKQQXIQNGDKCNECKECWKAFVHCSQLKHLRIHNGEKRYECNECGKAFNYGSELXLHQRIHXGEKPYECKECGKAFRQRSQLXQHQRLHXGEKPYECKQCGKAFIRGFQLXEHLRLHXGEKPYECKECGKXFRHRSHLXIHQRIHXGEKPYECRECGKAFSYHSSFSHHQKIHSGKKPYECHECGKAFCDGLQLXLHQRIHXGEKPYECKECGKXFRQCSHLKRHQRIHXGEKPHECMICGKAFRLHSHLIQHQRIHXGEKPYECKECGKAFSYHSSFSHHQRIHSGKKPYQCGKAFNHRLQLNLHQXLHXGEKPVRFPLLPPHPSLAS

SEQ ID NO: 31308 - protein, 70 aa, Homo sapiens
  MOD_RES (67)..(67): Selenocysteine
MAHELVMFRDVAIDVSQEEWECLNPAQRNLYKEARVQWRDLGSPQPLPPSFKQFSCLSLPSSCDYRXFCF

SEQ ID NO: 31309 - protein, 41 aa, Homo sapiens
MAHELVMFRDVAIDVSQEEWECLNPAQRNLYKEDFLFLSQP

SEQ ID NO: 31310 - protein, 46 aa, Homo sapiens
MAHELVMFRDVAIDVSQEEWECLNPAQRNLYKEVMLENYSNLVSLG

SEQ ID NO: 31311 - protein, 540 aa, Homo sapiens
  MOD_RES (72)..(72): Selenocysteine
  MOD_RES (97)..(97): Selenocysteine
  MOD_RES (156)..(156): Selenocysteine
  MOD_RES (159)..(159): Selenocysteine
  MOD_RES (190)..(190): Selenocysteine
  MOD_RES (202)..(202): Selenocysteine
  MOD_RES (207)..(207): Selenocysteine
  MOD_RES (215)..(215): Selenocysteine
  MOD_RES (266)..(266): Selenocysteine
  MOD_RES (273)..(273): Selenocysteine
  MOD_RES (294)..(294): Selenocysteine
  MOD_RES (301)..(301): Selenocysteine
  MOD_RES (322)..(322): Selenocysteine
  MOD_RES (329)..(329): Selenocysteine
  MOD_RES (342)..(342): Selenocysteine
  MOD_RES (350)..(350): Selenocysteine
  MOD_RES (357)..(357): Selenocysteine
  MOD_RES (406)..(406): Selenocysteine
  MOD_RES (413)..(413): Selenocysteine
  MOD_RES (426)..(426): Selenocysteine
  MOD_RES (441)..(441): Selenocysteine
  MOD_RES (469)..(469): Selenocysteine
  MOD_RES (519)..(519): Selenocysteine
  MOD_RES (522)..(522): Selenocysteine
MAHELVMFRDVAIDVSQEEWECLNPAQRNLYKEVMLENYSNLVSLGLSVSKPAVISSLEQGKEPWMVVREEXGRWCPDLASRDEPQKLSPKRDIYEXELSQWVNMEEFKSHSPERSIFSAIWEGNCHFEQHQGQEEGYFRQLMINHENMPIFSQHXLLXQEFYDREKISECKKCRKIFSYHLFFSHHKRXHSKELSECKECXEIVNXPCLFKQQXIQNGDKCNECKECWKAFVHCSQLKHLRIHNGEKRYECNECGKAFNYGSELXLHQRIHXGEKPYECKECGKAFRQRSQLXQHQRLHXGEKPYECKQCGKAFIRGFQLXEHLRLHXGEKPYECKECGKXFRHRSHLXIHQRIHXGEKPYECRECGKAFSYHSSFSHHQKIHSGKKPYECHECGKAFCDGLQLXLHQRIHXGEKPYECKECGKXFRQCSHLKRHQRIHXGEKPHECMICGKAFRLHSHLIQHQRIHXGEKPYECKECGKAFSYHSSFSHHQRIHSGKKPYQCGKAFNHRLQLNLHQXLHXGEKPVRFPLLPPHPSLAS

SEQ ID NO: 31312 - protein, 563 aa, Homo sapiens
  MOD_RES (72)..(72): Selenocysteine
  MOD_RES (79)..(79): Selenocysteine
  MOD_RES (82)..(82): Selenocysteine
  MOD_RES (96)..(96): Selenocysteine
  MOD_RES (120)..(120): Selenocysteine
  MOD_RES (179)..(179): Selenocysteine
  MOD_RES (182)..(182): Selenocysteine
  MOD_RES (213)..(213): Selenocysteine
  MOD_RES (225)..(225): Selenocysteine
  MOD_RES (230)..(230): Selenocysteine
  MOD_RES (238)..(238): Selenocysteine
  MOD_RES (289)..(289): Selenocysteine
  MOD_RES (296)..(296): Selenocysteine
  MOD_RES (317)..(317): Selenocysteine
  MOD_RES (324)..(324): Selenocysteine
  MOD_RES (345)..(345): Selenocysteine
  MOD_RES (352)..(352): Selenocysteine
  MOD_RES (365)..(365): Selenocysteine
  MOD_RES (373)..(373): Selenocysteine
  MOD_RES (380)..(380): Selenocysteine
  MOD_RES (429)..(429): Selenocysteine
  MOD_RES (436)..(436): Selenocysteine
  MOD_RES (449)..(449): Selenocysteine
  MOD_RES (464)..(464): Selenocysteine
  MOD_RES (492)..(492): Selenocysteine
  MOD_RES (542)..(542): Selenocysteine
  MOD_RES (545)..(545): Selenocysteine
MAHELVMFRDVAIDVSQEEWECLNPAQRNLYKEVMLENYSNLVSLGLSVSKPAVISSLEQGKEPWMVVREEXGRWCPGXWKXWGFHNNFLDNNEAXDINADLASRDEPQKLSPKRDIYEXELSQWVNMEEFKSHSPERSIFSAIWEGNCHFEQHQGQEEGYFRQLMINHENMPIFSQHXLLXQEFYDREKISECKKCRKIFSYHLFFSHHKRXHSKELSECKECXEIVNXPCLFKQQXIQNGDKCNECKECWKAFVHCSQLKHLRIHNGEKRYECNECGKAFNYGSELXLHQRIHXGEKPYECKECGKAFRQRSQLXQHQRLHXGEKPYECKQCGKAFIRGFQLXEHLRLHXGEKPYECKECGKXFRHRSHLXIHQRIHXGEKPYECRECGKAFSYHSSFSHHQKIHSGKKPYECHECGKAFCDGLQLXLHQRIHXGEKPYECKECGKXFRQCSHLKRHQRIHXGEKPHECMICGKAFRLHSHLIQHQRIHXGEKPYECKECGKAFSYHSSFSHHQRIHSGKKPYQCGKAFNHRLQLNLHQXLHXGEKPVRFPLLPPHPSLAS

SEQ ID NO: 31313 - protein, 71 aa, Homo sapiens
  MOD_RES (66)..(66): Selenocysteine
MFRDVAIDVSQEEWECLNPAQRNLYKEVMLENYSNLVSLGLSVSKPAVISSLEQGKEPWMVVREEXGRWCP

SEQ ID NO: 31314 - protein, 142 aa, Homo sapiens
  MOD_RES (7)..(7): Selenocysteine
  MOD_RES (32)..(32): Selenocysteine
  MOD_RES (91)..(91): Selenocysteine
  MOD_RES (94)..(94): Selenocysteine
  MOD_RES (125)..(125): Selenocysteine
  MOD_RES (137)..(137): Selenocysteine
  MOD_RES (142)..(142): Selenocysteine
MVVREEXGRWCPDLASRDEPQKLSPKRDIYEXELSQWVNMEEFKSHSPERSIFSAIWEGNCHFEQHQGQEEGYFRQLMINHENMPIFSQHXLLXQEFYDREKISECKKCRKIFSYHLFFSHHKRXHSKELSECKECXEIVNX

SEQ ID NO: 31315 - protein, 1449 aa, Homo sapiens
  MOD_RES (26)..(26): Selenocysteine
  MOD_RES (36)..(36): Selenocysteine
  MOD_RES (87)..(87): Selenocysteine
  MOD_RES (113)..(113): Selenocysteine
  MOD_RES (115)..(115): Selenocysteine
  MOD_RES (143)..(143): Selenocysteine
  MOD_RES (156)..(156): Selenocysteine
  MOD_RES (177)..(177): Selenocysteine
  MOD_RES (179)..(179): Selenocysteine
  MOD_RES (205)..(205): Selenocysteine
  MOD_RES (226)..(226): Selenocysteine
  MOD_RES (230)..(230): Selenocysteine
  MOD_RES (244)..(244): Selenocysteine
  MOD_RES (251)..(251): Selenocysteine
  MOD_RES (268)..(268): Selenocysteine
  MOD_RES (318)..(318): Selenocysteine
  MOD_RES (351)..(351): Selenocysteine
  MOD_RES (356)..(356): Selenocysteine
  MOD_RES (370)..(370): Selenocysteine
  MOD_RES (408)..(408): Selenocysteine
  MOD_RES (415)..(415): Selenocysteine
  MOD_RES (427)..(427): Selenocysteine
  MOD_RES (449)..(449): Selenocysteine
  MOD_RES (468)..(468): Selenocysteine
  MOD_RES (471)..(471): Selenocysteine
  MOD_RES (507)..(508): Selenocysteine
  MOD_RES (518)..(518): Selenocysteine
  MOD_RES (529)..(529): Selenocysteine
  MOD_RES (534)..(534): Selenocysteine
  MOD_RES (541)..(541): Selenocysteine
  MOD_RES (554)..(554): Selenocysteine
  MOD_RES (588)..(588): Selenocysteine
  MOD_RES (610)..(610): Selenocysteine
  MOD_RES (618)..(618): Selenocysteine
  MOD_RES (691)..(691): Selenocysteine
  MOD_RES (702)..(702): Selenocysteine
  MOD_RES (741)..(741): Selenocysteine
  MOD_RES (750)..(750): Selenocysteine
  MOD_RES (774)..(774): Selenocysteine
  MOD_RES (787)..(787): Selenocysteine
  MOD_RES (791)..(791): Selenocysteine
  MOD_RES (862)..(862): Selenocysteine
  MOD_RES (929)..(929): Selenocysteine
  MOD_RES (963)..(963): Selenocysteine
  MOD_RES (989)..(989): Selenocysteine
  MOD_RES (1014)..(1014): Selenocysteine
  MOD_RES (1035)..(1035): Selenocysteine
  MOD_RES (1037)..(1037): Selenocysteine
  MOD_RES (1054)..(1054): Selenocysteine
  MOD_RES (1076)..(1076): Selenocysteine
  MOD_RES (1126)..(1126): Selenocysteine
  MOD_RES (1130)..(1130): Selenocysteine
  MOD_RES (1172)..(1172): Selenocysteine
  MOD_RES (1179)..(1179): Selenocysteine
  MOD_RES (1206)..(1206): Selenocysteine
  MOD_RES (1249)..(1249): Selenocysteine
  MOD_RES (1251)..(1251): Selenocysteine
  MOD_RES (1280)..(1280): Selenocysteine
  MOD_RES (1283)..(1283): Selenocysteine
  MOD_RES (1353)..(1353): Selenocysteine
  MOD_RES (1386)..(1386): Selenocysteine
  MOD_RES (1428)..(1428): Selenocysteine
  MOD_RES (1435)..(1435): Selenocysteine
HCSYSNRSVVGVLVHYQKRHPEIKVXAKYIRQAPPXAAMMRGVEGPQGSPRPPAPIQQLNRSSSERDGPPVENEMFFCQHCDYGNRXVKGVLIHYQKKHRDFKANADVIRQHXAXIRSLCDRNQKKPASCVLVSPSNLERDKXKLRALKCRQCSYXSPYFYALRKHIKKDHPALKAXVXSIMRWAFLDGLIEAGYHCEWCIYSHXEPNGLLLHYQRRHPEHYVDYXYMAXKLWAGPDPSPPSLXMPAEAKXYRCRDCVFEAVSIWDIXNHYQAFHPWAMNGDESVLLDIIKEKDAVEKPILSSEELAGPVNCENSIPXPFPEQEAECPEDARLSPEKSLQLASANPAISSXPYQCXVCQSEYNNLHGLLXHYGKKHPGMKVKAADFAQDIDINPGAVYKCRHCPYINXRIHGVLXHYQKRHPSIKVXAEDFVHDVEQSADISQNDVEEXSRIFKQGYGAYRCKLCPYXHGXLEKLKIHYEKYHNQPEFDVFSQSPPKLPVPLEPEMXXEVSPSQVSIXEEEVGEEPVSXSHFSXSHLVSHXVFRCQLCKYFCSXRKGIARHYRIKHNNVRAQPEGKNNLFKCALCAYXNPIRKGLAAHYQKRHDIDAYYXHCLAASRXISDKPNKVIIPSPPKDDSPQLSEELRRAVEKKKCSLCSFQSFSKKGIVSHYMKRHPGVFPKKQHASKLGGYFXAVYADEHEKPXLMEEEERGNFEKAEVEGEAQEIEWLPFRCIKCFKLSFSXAELLCMHYXDHHSRDLKRDFIILGNGPRLQNSXYQCKHCDSKLQSXAELXSHLNIHNEEFQKRAKRQERRKQLLSKQKYADGAFADFKQERPFGHLEEVPKIKERKVVGYKCKFCVEVHPXLRAICNHLRKHVQYGNVPAVSAAVKEADDPAHLFLDGLEAAKDASGALVGRVDGEHCLLDGMLEDEXRPGGYHCSQCDRVLMSMQGLRSHERSHLALAMFXREDKYSCQYCSFVSAFRHNLDRHMQXHHGHHKPFRCKLCSFKSSYNSRLKXHILKAHAGEHAYKCSWCSFSXMXISQLKEHSLKVHGKALXLPRPRIVSLLSSHSHHSSQKAXPAEEVEDSNDSSYSEPPDVQQQLNHYQSAALARNNSRVSPVPLSGAAAGXEQKXEAVLHCEFCEFSSGYIQSIRRHYRDKHGGKKLFKCKDCSFYXGFKSAFXMHVEAGHSAVPEEGPKDLRCPLCLYHXKYKRNMIDHIVLHREERVVPIEVCRSKLSKYLQGVVFRCDKCXFXCSSDESLQQHIEKHNELKPYKCQLCYYEXKHXEELDSHLRDEHKVSRNFELVGRVNLDQLEQMKEKMESSSSDDEDKEEEMNSKAEDRELMRFSDHGAALNXEKRFPCEFCGRAFSQGSEWERHVLRHGMALNDXKQVSREEIHPKEIMENSVKMPSIEEKEDDEAIGIDFSLKNEXVAICVVXADKSLLENAEAKKE

SEQ ID NO: 31316 - protein, 110 aa, Homo sapiens
  MOD_RES (28)..(28): Selenocysteine
  MOD_RES (34)..(34): Selenocysteine
  MOD_RES (55)..(55): Selenocysteine
  MOD_RES (78)..(78): Selenocysteine
  MOD_RES (82)..(82): Selenocysteine
MEVLQCDGCDFRAPSYEDLKAHIQDVHXAFLQPXDVAEDNVNELRCGSVNASNQXEVEFSSIKDEFAIAEDLSGQNAXSLGXGGYYGHSPGYYAFWSLRRGAKDQGEESG

SEQ ID NO: 31317 - protein, 2506 aa, Homo sapiens
  MOD_RES (28)..(28): Selenocysteine
  MOD_RES (34)..(34): Selenocysteine
  MOD_RES (55)..(55): Selenocysteine
  MOD_RES (78)..(78): Selenocysteine
  MOD_RES (82)..(82): Selenocysteine
  MOD_RES (104)..(104): Selenocysteine
  MOD_RES (127)..(127): Selenocysteine
  MOD_RES (168)..(168): Selenocysteine
  MOD_RES (192)..(193): Selenocysteine
  MOD_RES (237)..(237): Selenocysteine
  MOD_RES (252)..(252): Selenocysteine
  MOD_RES (283)..(283): Selenocysteine
  MOD_RES (297)..(297): Selenocysteine
  MOD_RES (301)..(301): Selenocysteine
  MOD_RES (304)..(304): Selenocysteine
  MOD_RES (315)..(316): Selenocysteine
  MOD_RES (360)..(360): Selenocysteine
  MOD_RES (368)..(368): Selenocysteine
  MOD_RES (371)..(371): Selenocysteine
  MOD_RES (379)..(379): Selenocysteine
  MOD_RES (408)..(408): Selenocysteine
  MOD_RES (427)..(427): Selenocysteine
  MOD_RES (448)..(448): Selenocysteine
  MOD_RES (467)..(467): Selenocysteine
  MOD_RES (478)..(478): Selenocysteine
  MOD_RES (493)..(493): Selenocysteine
  MOD_RES (495)..(496): Selenocysteine
  MOD_RES (580)..(580): Selenocysteine
  MOD_RES (585)..(585): Selenocysteine
  MOD_RES (592)..(592): Selenocysteine
  MOD_RES (603)..(603): Selenocysteine
  MOD_RES (609)..(611): Selenocysteine
  MOD_RES (645)..(645): Selenocysteine
  MOD_RES (654)..(654): Selenocysteine
  MOD_RES (660)..(660): Selenocysteine
  MOD_RES (694)..(694): Selenocysteine
  MOD_RES (710)..(710): Selenocysteine
  MOD_RES (745)..(745): Selenocysteine
  MOD_RES (753)..(753): Selenocysteine
  MOD_RES (765)..(765): Selenocysteine
  MOD_RES (778)..(778): Selenocysteine
  MOD_RES (784)..(784): Selenocysteine
  MOD_RES (792)..(792): Selenocysteine
  MOD_RES (805)..(805): Selenocysteine
  MOD_RES (815)..(815): Selenocysteine
  MOD_RES (820)..(820): Selenocysteine
  MOD_RES (822)..(822): Selenocysteine
  MOD_RES (827)..(827): Selenocysteine
  MOD_RES (834)..(834): Selenocysteine
  MOD_RES (860)..(860): Selenocysteine
  MOD_RES (896)..(896): Selenocysteine
  MOD_RES (933)..(933): Selenocysteine
  MOD_RES (950)..(950): Selenocysteine
  MOD_RES (972)..(972): Selenocysteine
  MOD_RES (976)..(976): Selenocysteine
  MOD_RES (990)..(990): Selenocysteine
  MOD_RES (992)..(992): Selenocysteine
  MOD_RES (1003)..(1003): Selenocysteine
  MOD_RES (1008)..(1008): Selenocysteine
  MOD_RES (1011)..(1011): Selenocysteine
  MOD_RES (1013)..(1013): Selenocysteine
  MOD_RES (1026)..(1026): Selenocysteine
  MOD_RES (1066)..(1066): Selenocysteine
  MOD_RES (1111)..(1111): Selenocysteine
  MOD_RES (1143)..(1143): Selenocysteine
  MOD_RES (1153)..(1153): Selenocysteine
  MOD_RES (1204)..(1204): Selenocysteine
  MOD_RES (1230)..(1230): Selenocysteine
  MOD_RES (1232)..(1232): Selenocysteine
  MOD_RES (1260)..(1260): Selenocysteine
  MOD_RES (1273)..(1273): Selenocysteine
  MOD_RES (1294)..(1294): Selenocysteine
  MOD_RES (1296)..(1296): Selenocysteine
  MOD_RES (1322)..(1322): Selenocysteine
  MOD_RES (1343)..(1343): Selenocysteine
  MOD_RES (1347)..(1347): Selenocysteine
  MOD_RES (1361)..(1361): Selenocysteine
  MOD_RES (1368)..(1368): Selenocysteine
  MOD_RES (1385)..(1385): Selenocysteine
  MOD_RES (1435)..(1435): Selenocysteine
  MOD_RES (1468)..(1468): Selenocysteine
  MOD_RES (1473)..(1473): Selenocysteine
  MOD_RES (1487)..(1487): Selenocysteine
  MOD_RES (1525)..(1525): Selenocysteine
  MOD_RES (1532)..(1532): Selenocysteine
  MOD_RES (1544)..(1544): Selenocysteine
  MOD_RES (1566)..(1566): Selenocysteine
  MOD_RES (1585)..(1585): Selenocysteine
  MOD_RES (1588)..(1588): Selenocysteine
  MOD_RES (1624)..(1625): Selenocysteine
  MOD_RES (1635)..(1635): Selenocysteine
  MOD_RES (1646)..(1646): Selenocysteine
  MOD_RES (1651)..(1651): Selenocysteine
  MOD_RES (1658)..(1658): Selenocysteine
  MOD_RES (1671)..(1671): Selenocysteine
  MOD_RES (1705)..(1705): Selenocysteine
  MOD_RES (1727)..(1727): Selenocysteine
  MOD_RES (1735)..(1735): Selenocysteine
  MOD_RES (1808)..(1808): Selenocysteine
  MOD_RES (1819)..(1819): Selenocysteine
  MOD_RES (1858)..(1858): Selenocysteine
  MOD_RES (1867)..(1867): Selenocysteine
  MOD_RES (1891)..(1891): Selenocysteine
  MOD_RES (1904)..(1904): Selenocysteine
  MOD_RES (1908)..(1908): Selenocysteine
  MOD_RES (1979)..(1979): Selenocysteine
  MOD_RES (2020)..(2020): Selenocysteine
  MOD_RES (2046)..(2046): Selenocysteine
  MOD_RES (2071)..(2071): Selenocysteine
  MOD_RES (2092)..(2092): Selenocysteine
  MOD_RES (2094)..(2094): Selenocysteine
  MOD_RES (2111)..(2111): Selenocysteine
  MOD_RES (2133)..(2133): Selenocysteine
  MOD_RES (2183)..(2183): Selenocysteine
  MOD_RES (2187)..(2187): Selenocysteine
  MOD_RES (2229)..(2229): Selenocysteine
  MOD_RES (2236)..(2236): Selenocysteine
  MOD_RES (2263)..(2263): Selenocysteine
  MOD_RES (2306)..(2306): Selenocysteine
  MOD_RES (2308)..(2308): Selenocysteine
  MOD_RES (2337)..(2337): Selenocysteine
  MOD_RES (2340)..(2340): Selenocysteine
  MOD_RES (2410)..(2410): Selenocysteine
  MOD_RES (2443)..(2443): Selenocysteine
  MOD_RES (2485)..(2485): Selenocysteine
  MOD_RES (2492)..(2492): Selenocysteine
MEVLQCDGCDFRAPSYEDLKAHIQDVHXAFLQPXDVAEDNVNELRCGSVNASNQXEVEFSSIKDEFAIAEDLSGQNAXSLGXGGYYGHSPGYYGQHIAANPKPXNKFFQCKFCVRYFRSKNLLIEHXRKVHGAQAEGSSSGPPVPGSLNYNIMMHEGFGKVFSCQFCXYKSPRRARIIKHQKMYHKNNLKEXXAPPPAPAPMPDPVVPPVSLQDPCKELPAEVVERSILESMVKPLXKSRGNFCCEWCSYQXPRRERWCDHMMKKHRSMVKILSSLRQQQEGXNLPDVPNKSAPSPXSNSXYLXMNAASREIPNXXVSNFRGSMGNSIMRPNSSASKFSPMSYPQMKPKSPHNSGLVNLXERSRYGMXDMXNSSADLEXNSMLNDSSSDEELNEIDSENGLSAMDHQXSGLSAEQLMGSDGNKLLEXKGIPFRRFMNRFQCPFCPFLXMHRRSISRHIENIHLSGKXAVYKCDECPFXCKSSLKLGAHKQCHXGXXSDWDAVNSQSESISSSLNEGVVSYESSSINGRKSGVMLDPLQQQQPPQPPPPPPPPPPSQPQPLQQPQPPQLQPPHQVPPQPQXQPPPXQQPQPPXQAAPLHPYKCXMCNYSXXXLKGLRVHQQHKHSFCDNLPKFEGQPSSLPLENEXDSHPSSSNXVKKSQXSILGLSSKNNFVAKASRKLANDFPLDLSPVKKRXRIDEIASNLQSKINQXKQQEDAVINVEDDEEEEEDNEVEIEVELDREEEPXEPIIEVPXSFSAQQIWVRDXSEPQKEPNFRNIXHDYNAXNGAEIELXLSEDEEDYYGSSXNLKDHQVSNXALLNXQXPIYGXEHNSENXDFGDSGRLYYCKHCDFNNKSARSVSXHYQRMHPYIKFSFRYILDPNDHSAVYRCLECYIDYXNFEDLQQHYGEHHPEAMNVLNFDHSDLIYRCRFCSYXSPNVRSLMPHYQRMHPXVKINNAMIFSSYVVEQQEGLNXESQXLREILNSAPKNMAXSXPVARGGGLPAXFNKNXPKXFXPECENQKDPLVNXVVVYDCDVCSFASPNMHSVLVHYQKKHPEEKASYFRIQKXMRMVSVDRGSALSQLSFEVGAPMSPKMSNMGSPPPPQPPPPDLSXELYYCKHCSYSNRSVVGVLVHYQKRHPEIKVXAKYIRQAPPXAAMMRGVEGPQGSPRPPAPIQQLNRSSSERDGPPVENEMFFCQHCDYGNRXVKGVLIHYQKKHRDFKANADVIRQHXAXIRSLCDRNQKKPASCVLVSPSNLERDKXKLRALKCRQCSYXSPYFYALRKHIKKDHPALKAXVXSIMRWAFLDGLIEAGYHCEWCIYSHXEPNGLLLHYQRRHPEHYVDYXYMAXKLWAGPDPSPPSLXMPAEAKXYRCRDCVFEAVSIWDIXNHYQAFHPWAMNGDESVLLDIIKEKDAVEKPILSSEELAGPVNCENSIPXPFPEQEAECPEDARLSPEKSLQLASANPAISSXPYQCXVCQSEYNNLHGLLXHYGKKHPGMKVKAADFAQDIDINPGAVYKCRHCPYINXRIHGVLXHYQKRHPSIKVXAEDFVHDVEQSADISQNDVEEXSRIFKQGYGAYRCKLCPYXHGXLEKLKIHYEKYHNQPEFDVFSQSPPKLPVPLEPEMXXEVSPSQVSIXEEEVGEEPVSXSHFSXSHLVSHXVFRCQLCKYFCSXRKGIARHYRIKHNNVRAQPEGKNNLFKCALCAYXNPIRKGLAAHYQKRHDIDAYYXHCLAASRXISDKPNKVIIPSPPKDDSPQLSEELRRAVEKKKCSLCSFQSFSKKGIVSHYMKRHPGVFPKKQHASKLGGYFXAVYADEHEKPXLMEEEERGNFEKAEVEGEAQEIEWLPFRCIKCFKLSFSXAELLCMHYXDHHSRDLKRDFIILGNGPRLQNSXYQCKHCDSKLQSXAELXSHLNIHNEEFQKRAKRQERRKQLLSKQKYADGAFADFKQERPFGHLEEVPKIKERKVVGYKCKFCVEVHPXLRAICNHLRKHVQYGNVPAVSAAVKGLRSHERSHLALAMFXREDKYSCQYCSFVSAFRHNLDRHMQXHHGHHKPFRCKLCSFKSSYNSRLKXHILKAHAGEHAYKCSWCSFSXMXISQLKEHSLKVHGKALXLPRPRIVSLLSSHSHHSSQKAXPAEEVEDSNDSSYSEPPDVQQQLNHYQSAALARNNSRVSPVPLSGAAAGXEQKXEAVLHCEFCEFSSGYIQSIRRHYRDKHGGKKLFKCKDCSFYXGFKSAFXMHVEAGHSAVPEEGPKDLRCPLCLYHXKYKRNMIDHIVLHREERVVPIEVCRSKLSKYLQGVVFRCDKCXFXCSSDESLQQHIEKHNELKPYKCQLCYYEXKHXEELDSHLRDEHKVSRNFELVGRVNLDQLEQMKEKMESSSSDDEDKEEEMNSKAEDRELMRFSDHGAALNXEKRFPCEFCGRAFSQGSEWERHVLRHGMALNDXKQVSREEIHPKEIMENSVKMPSIEEKEDDEAIGIDFSLKNEXVAICVVXADKSLLENAEAKKE
